United States Patent Application Publication US 2008/0114160 A1 - sequence listing, part 26

SEQ ID NO: 7672 - DNA, 71693 bp, Oryza sativa
  unsure (1)..(71693): unsure at all n locations
caaaatccacacgctttacctttggagtttggagaagagatgaacgaaaattccaaacatggacacttccaagaactgagcagatgatattacagctttttttcttgaagggaattttttttctgtttgaagggagatattacaagttttcatgtccaaaagcctttcctttgtaagcaaattgactgacctacttcaatagatgaatccatgtatttgctgacctaatatttcgagatacggagctatcctgcaacagataattagaccagcattattatgctgatcattatcgttggaagactgcaggtcgttgccaatggctgaaaaaaaatgatttattttttttctgatgatgcaaccgtggagacgctaagctgaggtcaggtcttcggtcgcatatggtagccctttgatcaaatcttaatgtttagatgtcatcatcaaagaagaccttgacttagtaataaaaagggaataatggtaattgcaaaataaacagatactaaattaaaatcaaagtaatggttcacacttcacaaggtgatccagtcttttattgcttctcttcctagttgggatgcagtgcagtcataaacaagaaaatgactacacgacctggtttcaggaaaataaaaagaaaaagaaaaagaaaagaaaaggactagatgtgatgcgctggaagtatagagataaacatgggtaaaaatattacagcttgtaagtaagaaaaggcactctgcacaagtaggtagcgtttgaaatagatttacttgttggattattgttgctgattatctacttcattattggaataaattaaatattttgataagtaaatttaacaaaatagtttagaacaagtagtctaagcaatgtttgacacttagcaatacaatagaagattttttttttaggaaaatgtatttctaaaagcatggagcaaagaatgcacatggtgaataagtttgtaacacctgtgatacagttagagaccaggatttacatttaacatatcatttttcagaaatcaagagacaagatgccctctccatgacaagaagttatccggagtgattcatgtagaagaaataaaatttaccatagcattacattaattgcatatgttttacaaaacaaacaatattacagtatatgtaacagttggacccctacctagcctagtccctttcagtcaagacaactactggacagtaaaacacttgcacacagagagagagagagagagagagaacgacttgccgatatataaatactcattgagccacccaccctcttaacaaagaattcgtccagccttgggaagccgagaagaggagagaaacaagagacagaccgccgagatagagtaactgagtaagcatctcgatcttggcatgttctttcttcttcccctttccatcaatgatttctcctcttgttttcctcatcacnaactcntgcagagacctgttcttcaacccaattctgctcttgttatattgcctggattcctttttttttttggttcttggaagcttctattgccgctgcttgttcttgagtgccctctgcaatttatagataattttcttcagtttttttatccaaaaagagttcttggattagttgtaaagaagaggttaaatcaaggaaggttgcatcttgttcttgactgattaattggtgtgccatgatctgcaggtaaacgggttcttgcctgacatttgtcttgtccgggtggccattcatggccaccgtggggcagcctgatgccatgagaaggatcaccgttcactacgtgaatccgccgccgatcgccggcgccggagaagcacacgtcgatggcctcgacgacgaggttcttgattatgtgattggtgatgttcttcaggatcaggtatgcatttgatccaacctttccatcattattagcatactgctcttacaggcttgcagaatgatgagctttagcatcaaacatatgtttctaagcctttgatatggcctctttactttagttcaacattgtttagtaaactttccactgtttctctgaaacttttttgagaataaacttatttgtttttctgaacttttttctaggagggtctgtatcaatcgatattgtatggcaaatacggggatgacatgagaggggcaagaaacactgctcttgcccaatctgatggtttacattactactatcacggagagaacagcagtggtgaagcaacaacctcgagaaattcagaaatcgaccaacagattgagtatgacttggtgttcgctaggcagctgcaggcaatggataatctgacaattgagacacctgcagatgaagatgatggtatgcattcattctcgttcagtttttgtaagcacttgatgtgcataatgattttcagtcgtggcaatcttaatcttttcacctctgaaattttgttgcccatgttggtttgattcagatataagctgcgtaccctctccatctgactctgaaaccgatgaaccggcagaaggcaacaacgaagaggtgattatatgagctgtttcagaattgcaattattcagcattgttcgtttcagacttcttgatgcaaagatacacaattgcgtattcactaaaaagatgagctgtttcagaataaagcctttccaaatggataatgtataaacatgtactacgaaaagttgagattcctatcatttgtttgcaggctgccacacaggatgataacgatgatccagacaacatgacatacgaggttagtgttatattcacttgtatcacatttcttctgtaaaagaggtttacaccatctatgaaaaagttgctgattcttattctttctgtaatccagcaaaggcaggcacttgtggaatctgtaggaaatgagaacagaggtttatctgatctgcttatctcctacttggagacatggaagtacaaatcaggctttttcccaaggaaggcaaaccatgataagtatgtctaccatttcagttttcaatcaatcacatactgatttcttgcagaagataatccaagcatgtaactgatgacactctgattaaaatcttcatcatggcatgcaactgatgatttcctcctcttttttctcccaaaattgcagctgtcctatatgtctatccgctttcagacgccgagaaacactcattacattggcttgcaagcatagttaccatgaaggttgtattgctagatggctcaagattgacaaggtaaacaccttcttgggacactagatttgctatctgaattgtgtacctatcttagattataccatttgtcaaagtttacatgagcactgatatgcactgtccatttcatataacaagatggtctttgtctttcagtttccttgagcttcttccaaattaaaagaacttcatgggcttgtgcagtggaattcctgacatttttgtttatgaaacaggcctgcccagtttgcaaatatgaagtgtttggaccttcctagcgtgtgaggaggcgatcaacaaggctgaccaactatgactcgatgagacggcatatagtggttgcagcatctgctctgcagtattaattaaaaagggaaaccttaactcccaaaaaaaacagagaagggaagaaaaagaaagcaaaaaggaaaaaggaaaaagaaaaagaaaagacaaggagaaaagaaatttgaaaacagagatgcttcgtcaagattgtgcatttttttcatgtttttttttggctgtgtacaagcgtaattttgacctgatcgactcaaggcagtcgctcgaggcctttaatttcgtaaagcttcatatgcatgagtgtgcaattgtgtgcctatagtagtatagtacatgttttctgtttgaaacggagtcaaagatctctctcctgccgaccacccatctaaaagaaggccatgtgtacatcaatacatgtactgatatatactccctctgtccaaaataaatcaacttttgtacatgtcaaaatcttcttgttcaacttgtacaaaccagaacatattactccaaaatcacaaaaaagaacatattactctaggagtactcgtcctaaataatttgtgctttgcttggcttggtaccagcaaggcagcaacaagtatgctatgccacttcacttactacctgacaggcagtccagctatgatatctctcgtttatagtgggcccatctggtagtggcaggctggcagctgccttacgtgtgacgccagcgaggcagcgggcatgggtggcgtgcccgagaagagacacgtggagtcgaacgagacaaagcaaaaacatgggctcacatccccaacgtccagaagaagccgccgctgcctcctctcatttcggaactctaaagcctcctcttatttcccacttctctcttgccgtcgacccagcgaaccctagccaacgagatcggtagctagaggcagccgctatagccatggatgtggtaaatgcagcaaccttggatgtgttaaccaaggtttcccatccgatcagttactgcacggttatcgtggtctgtgcttaccgcaagggagcggtaataggaactgcccagtatatcgacttagttaaaaagaataaaaaaatatatatttttggttaaatttgtctggctttcttctgttttgcaccgtaaccgctgttacagcggtgaaggatacccctcccctgacggtaagggaaaccctggtgttcactaggcactaggtggtaagggaaactctggtgttcaataggcaccaggctaagcagaccaatgcgtaggcaccacagatcagctagacagacaaggtggtggaataaagcctaataccagaagacgtctttcagaacaatgttaagttattaggtttgcatagttacataaacagtaacaaacttttttctgaagaagaatcaatgctatcacaattttaatatactgcctaagtaatcacctcacccagatcaacatgctattaccaaaaattacctacttcatggttagtgtggcatatgcaattgcatgaacgctggcttgctctaacgcatcccattaatataagttaaaattggataataaagaaactatatttttcatgtactccaagttcgaaacaaaccaggccaacatcacaagcaaaggctttatggaaacactagttattgaaagtttcgtttggtggaacaaaaggaatagacgaaattgaacggatgaacattgcagttaggaataggatgtgatcagaaaaacaatttttgcgctcacagataatccaacatgaagtcaattatgctcagagaacaaacgaatcatgagattcagtcacaaactttgcatgcccttggcagttggccccctaaagagaaaatttggaaagacaggagatatcaaaatacctgagaaattataatacattccaatagcagcatgtgctcttcttccccctttctgtttggaaaggaaaattttcaatcagctggtgatttggatttcaaacatatcacatctcgttatcactgaatcaggaaagatcggagtgattaccaaagcaagcaaatcccataaattgataaatacgacaacccccttgctgtcccctccacatcggaatctctcacccaactcaagagcaaccgcagccatggccgacaacaacttcggagagctttcggtggacggtgagcccggccaaccgggagggcgcggtcgcggtggccgcggcggccgtggtggccgaggaggcgctagcggcggcggccggggcgggggcggtggtggtggcggtggcggtggcggcggagccggcgggaaaggagggaaaggcggagccggtgggcacggcggcgccggtggcggtggtggtggtggcggcgggaaaggcaggaaaggcggggccggtgggcacggcggcgccggtggcggtggtggtggtggcggcgggaaaggcaggaaaggcgggcgcggcggggacggtggcagcggcggggccggtgggcgcggaggcgacggtggcagcggcgggcaaggtgggcgcggcggggacggcggcggcgttaggagctgcacaaacagcagagggacccagatgctaatgcgaattagagagcgggttgttaatgcgaatattaatttatatagtgagaagttaaattttttgtataactaaatttaacaaacagtttgaaataagtcgtataagcaatacagtagaaaattttcttctagaaaatgttttttaaaatgtgtagcaaataatccgtttgaataatttgatggataatctgatgtattaagctaacagcctaacaatatattgtttggatcattaatccgtgccctactatcactatctcgaatcttaagtgagagaaagaaagagacgaaaaaaattggaggcaatccaatagctagtctattttagattgatcaacatattgcgtcgggcgtccacaaactgtgattgtgtatgcatcccgattttattagtggactaaaatcacgcattgaatcctacatgtggaaaaagcggtctcccagcgttatattttgatcaatccagcgttatattttgattaatttcaaatgtttgggttttacttacgccgattaataatctacaatggaggaagtacatgttagctctaatactattaaaattggtagtgcttcaatttctaaatttaaatttaataagctctgttttttctaagctaaaaccatttgattccaactctacaacatgtggaataaaacccttccaacctgacctgaattaaacatagtcgaaaatcaaaaactctgtatacagcagattacaggcgggttttttctttcaggaactatttcaaatcccagaaaactcgtgcaaaatccttccattccaggattttggagtaaatcctactataaaaatttcttcgctgaatcgacaatcatatggcattataaagatacaaaaattaaaataatagtactaccactaaagtaaataatagtaatcgccagacgttgtcattcagcagtatgatgggcctcgatgtgtgctagcagaagcagctctggttcgatctcagcattccaagccaactcacttaccagcgcacataacgcttaaattacatcagtgtatcatcatcatcagaaactgtttcagacaccccaaacaaaaactccacatacccaaaacaaaaaagaacaagacgagaagctagaatctacggcagtttccatcatcaccaagaagccaagcaggcaagcatttgtcacatgttccatgagtagccaccacctgcctggtcacccaggaacagcccactctcctccagttcagtactgatcagattcccaagattgtcaagatcatccaactcatgcagagcatcagccttgggggtagccgcatggccgccgctgccaatgccgccgcccgcagcagctgcaacttgggggttgctgctcactgacttgaagctgttacttctgctggggaggatgctggctgtattgttgatcacactgctaggacctgttgtaaccattggagtcccacccttcaccgcgccgttgttattcatatgatccccgctagcggcgctgccggtgatagccgttcctcctgatgcaagaccactgttagcaggagcatgttgaagttgttgttgctgctgctgctgcgccaagacacggttgttagtgttcttggcctcttgcagcaactgatggagcacatgctgctgatattgtgggctcacacccaagccctggaggctgctctgctgaggcataggctgctgaaatgaggccggatgttggaactgcgcgagatgcacctggtttggtccacggaaggatctagatgcttccagctgaatgccattgtgcattgctgtgggacctttaaacatgcttgatgcctcctgctgaagcaaactctggtttgcgactgaacttctaaggatattctggtaattgttaagtgcagcagcattctgcagaccatttccaatgggattctggtaattgttaagtgcagcagcattctgcggaccatttccaattggtccaataccgtgcgtctcattcgcatgggtgttcatttctgttttgacacccatggctttgaggttagtctggtcattaggaaggccagcagctgccattagttgctttggctcgtgcatgttttgtactggaagttttgctgcagtttgcttgggatagctcttcagaccctctgcagatgaacagggaaaacattaaacatttcaaagcataaaaaaattgctgaattttacagggaaaaagggggaaaaacagctgcttcgctgttatcactgtattatctaaattggtatgctgttataatctagtatccagcaacaataataataatttaccaggtaatccttccatacggcaaccacacaccaccatagctagttcaaaaaccatgtttaccaagtgatatcataacaacaagtatatgatgttggatttggtttgccatggatatgcttttactatctagccctgtaagcattttccccaaacaatagaatatctctcaacacttcagaccaaaagaacttctaggcttatgcttattaccattttcatgcaaaacattgnnnnnnnnnnnnnnnnnnnnnnnnnncattatataatattgagcgcctagtcaaacaatagagaactgagtggtgaatttgcataaaccatacctataggaccaagcttgttcttgtggctgaattcaatcaggtctttcatgtgattcaccacctctgatatctgaagaggacacaaattcaatgaagatgctgtgtgcagaagtatattacaggaaattctggataatattatagcaaatgttaaataacacaaggagaactcgtgaaaatatggatactgttagcagcgagatattaataactaaagaaaattcaggagcttctttatggataatatcacaaaaataattaaataacctacaaatgctatgcttacctgcaagcagcgaacatatcttttagatagaccatgctcatttaaggtgtggtggtctatatttttcgctagctgtcgtgacgccgtcacaaacctaaagagcgtaatggggtgctgagatcaattagatcataaataaaaaaaactctagatggaatttttaaaaaatcatgatttgtcatgccagaagaggaattaaaattgcatgtcaaggaactagtggcatagttggctcactaacatgttgcaaatgttctgtgcatcactgtttgagaccccagctggaccactttcagtggcaacagtttgatatttctgggcaacttgcagcagatgagcaacctggaaaaagcacatatgaacaatgagataccaagtcaccaaaattggagtacaccaaagaatggcagagaacaaaatgtgcagaaaaaacagggatgtttaccatcaggacagcactaccaaaataaaaactagacaaggacggtcaagatggcttaaaattcgaaattatcttgtgtttttgcatgtgcagccctcaggaagccagtacataaattggaaaattaaacaagaatctaaatagatgttggagcagtctagcaggaaaaagaaggggctttttacaacccagcctaccaagattcgcaatattcatccaactaaaccactttattaaaattgcttacatacgtgttgacaactatcacataagaggtgtattgggtatattacagcagctaatctactatctgctctctattgatcaaagtttaatcaaataaaacagaacagcataaatctacctggggtgaaagaaacctgcgagtgatatactcatcatgtcgccgtgaacagaactcccaggacattatctgcatattttcacatgaaaacagcagataagaatgatcctaaactgtccaatcatttgcaacatctagatattcacaaatgcaagctattacaaataagcctttaccttcagttctggtgtgaatatgattctcaactgcccctcgtgtatcacatgcatatgttcataaatgcttttctgaacaactttagtatgttccagcagcattagtccattgggcaaccggaattcattggccatgtcaaggaataagtattcatctataacaccatggtcaaatctaatttgacagagtctaggaagtatttcataggtagcctctgccagataagattgaaacaataataacaaagtgagatcaacatcatacaatggaactgaactaatgaaaaaagcaaaaaagatcatgacttcttatgagaagaacacactagtactttaaaaaaggagcaaaatacaaagtagtccagggaaaaatatgttgtgaggtacattttgaagaaatggcaggtgcaaactgcacaatatatggtaacatatactatgcagaaatgcagaaccagaactacataacaatactaggatatcaccatgtagtttcaagaaaaatattttctgccagtctgaccaatcattccaagtatattcaagacagacaaagcctcttgagatataaacttcataggatactttcttttttgctcgtgatggctaatttctcatatgaaagatacactcaagataatacagttttatatatttgcattttctgtcttgagatgaggaggcaatctctatagcacaagacatgtaggaatattgagtttatctaccaaaagtactataggcacaaaacagtgcagtaattgatcttccataaaaaaagacaggagtgggaacagagcaaattgcaaggttcattgttatgataatgaagctggataaggttccaaaaaagtagtcaactaaccatatcctttgcccccatgtgtattacaaatgtcacagcgccatgaatcctgaaacatggagaaaatagtaatttaaaaggtgcaactacgaatttatgcttcacagtttactaaaatctcaacagcatcagctatctcagctctcagtagaacgatcattaaaaaatgaaaatgcaatgctaactatttcaaaatattcatctatagaacacgctcatatggattttgtttctcactacaatcacaagatacttgactgtcaaaatatagtgttcaatatccaagcaaagtttaaaagagatgctaatcaatattgttgtgaacatcacactgagaagtattctgttgaaacaggaaagtaaagggcgtcaatgtacaatgcagatataaagatttaagtgtgaaccgtgaactgaccggagctgtgtgtggaacagcacctgaaggatttcctcttttctcatacgaggatacacaccatctttctcttgctcgtggtgcaaaatattcatcaataagcttcctccagtatgttattggattattctacaagcaggtactccagtaaatagtaaatcttatagccaagaacatgtgtcttgcaataaatgtttacaacgcagaacctcacctctggtcggtgacgcttatggtataagtattgctttaaccttcgagaacaaagcccattctcgacaggagtcctaacaggtccagctagctgcattccaggctgcgctagtggaggcctcaactgtggctgccgaggtatgccaacttgagattgttggatctgtgaaaatggttgcaacatctgatgctgctgttgctgctgaatctgtgccagtttatgctgatggatcaaggcttgaatctgagggttctgttgaccctgcagatgaagagaactctggccttggagcagttgctggattaaattgtgttgcaggatatcatcttgcctaatatcaacccttgacttcttctgagcatgcaatgcaccagcagcatcaataacaggttgtgatgttacactagaagaccttcgcttctgcatctgctcttggggaggactttgttgcacaatgggaccatcaataactgaagatccagagatgttattggatgaaaacgacattggggaagcaggaaggcgcatgaatgaatcagcattcatgctcgtacttggctgcaactgggcacctccggagagcgatgagttagcatccgtcaccaaagagctaacaccaatgcttggcccagaggaatttgtagtgctaatagggatactaccatgcatatccctgggaacaagtccaaggttggagcatggcgccccagacatggaggttaccagggttcgatcccaatcatcactttgaagaacctgcaaaaggtgaacatgaattattaggaaataaatcatcaaatatcttactggataagaactgttaacagcctaatgcgtgagaactgagaaatggtcagcagtaactgaagccaaacagatgcaagtagtaatgagattttagcatcatgaaatttctcgattcaatggttgaaaaaacagaaaacagaagaaggccatttttcaattctctaaccatactacgctactgcaatagcataaccagaaaatgaaactagaatccaacaaatggtaaataaataaaaaaatcgtctttgaaaagaaaataagggacagaaaatatagcatgaaacacaaattgcaaaacagttgatgctggttatgcagggtgtgagctgaaatttactcttttggttgaaattagccgagctttagcattctttccaccacacaaaaaaaaatatttttcccaggttcctctcatacaagtacaagaatggagcatataccaaaatgtcttccaggtcagatcaaacaacgaaagaaatgaaatagaaatcaagttcacatcagacaaaatagaatactgaactaacttcacaacaaaaggctccagggcaacgaatcgagagaggaggggaggggaaactgccacgtccggggaggatggagagagaggacaacgaaggccggagatgtgcccgcagccggatcgccaaccctagcaaagtagaggagcaggagacgaaacaaggagaaaaattcccccctaatctttgctccgtagcagatggataaaaaccctagcccaaactcgccccccaaaaaccaatcgaaaaaccgagctacaaagattaagctaacactcgaccaagaacagaaattccacctctacacccccaaaattaccacgctacattgcaggaatcggcacccatcaacccaaaaaaaaaatcacccaacccctcctctcacaacccaaccacaaatcgccccccaaaaaggggagcaaaaacaagaaatacttaggtcacttcccgcggtccgagccatcaacccccccccccccactaccaaaccatctctctcaccttgagttcgtcggctcaatcgctggccctcccaaaccccaacttctcctcctctaccttgcagctgcgatttttttttcttttttgctgcgaattttttttttctctcctcttccgcttcttctcctcctcttcctgcgcctgtaggcggcgtcctcgccgacgagcaaaccggttaaatagattcgcggcgcccgggacggtggcgaccggctgcagccggtgggccgggcccacattgaccgccattgaccggtctccgtggggcccacgggaggcctccgggccgtcggatcggccgcggagccgcatcgcgaggcgggtgtgtacacgcggccgcgcgtgattggctcccggtgggggcgggggaaaccgggagacgggcaggtcggctcctcgctacgcgcaccccgctcgcgcgcgcgcgcgtacacacgcggtggtggggccatcttgtcagcgaccgtgtggcttggcgggtgtggaaacctcggtgctttgcggtggaaggctcgggtgatctttttggccgagcacgcgggtagctcttcgtggggcccacacctacggttcgtggggcccacatgtaagtgagggtttatgcagggcgggtggctgcgttggtcgcttgaagaaataggaggggtcttttccaggacaggaatgacttggtaacactgactttatcgtcactgaacggtgggtccattgatgtatggcccacctgtaagtcagatctaacatgtgtgtgggtatggctatgcgtgttcggattaacggtgaagtttctgccctttaattttcaaggaccgactgctcactgctttgcctaggaagtggaattgctccatgcacacaaaaggctacacacaagggtggggggagcttccttttgtggctgtacaaagggtgggggccagcagaggctgtgctgagtttgactggttttgcattgtctatgcaaggctggaagactatcataataggctttcctttagcttgattattgcagcttacatagcctaaatcattgtaatgggggcataagggattttttttatgtgggaaatacaaaaggatgaagattgaagatgatcaatggttgttgtggttatagaacatgtattttgtgataaatggaatacaattatggagtgtaggttgtcctaaaaacgtgattcagcatagacagaaaagtgatatcttgtctagagcacaacttcggatagtgagaaatatacggcggaataactggatagaaacctatccaaaatacatgaaacggttattatatgcttttatatctataagatattagtagacttgtctagcacgtcggatctagtaaaatatttagtatactatttttgaaagaaatcagataatcatgcttggagtggcattccaataattttatattattatttctaccaataataatataaaattattatattattatcttgtactccctccgtcccaaaataactcaacttaagatgggccatcttaggacaacgaatcttgacaaatgctttgtccagatattttgggacatagggagtacatgactatgctatgcagataattcttttcaaatcgaactgggatgaattttgaacctgtttagcctgtttttgaccagctttaaaagttaatgtacatattccaaaccagcatattaatcgcttcagctgatggtttctagcgttgtgatggagtgcattccaggttaaccgcgttgctaaaccagccaagccaagccaagccatccctggttacttgattagtctgtgtgacgtgtagcggttgcatccttcgcatggaagaatacatgacgaggatacaagtcagcggccactatataattttccatcatgtgcatatacgaggttcttatcgtgatctaccgcgatatcttgattatatttcttgtaatttgactggttttttcaaagaaagagaactcaatgtcaactcatctttttttttcccgacagcagccccgatgaactaaggcttccttcgaaatagagtatggagtgagcttaattatcaaccgtacgcaaaattaaaaaaaatcattagcatgattaaattaattaagtattaatactagctattacaaacttaaaaaatattaatctaattttaaaagaatttttatgtatatttttttagaaaggaaaacacgattaattgtttagtaagcgtgctgacgttaaacgagaaagttgcccgaaatatgtttgatcaagtttactcaaacatttaaaagaaaactcacatgatgatttgctttaatttagtaagtacgcagtacatgtgaaactaattaactatcttcatatacaagccctgaacgatgcattcacacggatcaattaacacgagccgcgtcgagtagcatgtatgatttctgatattgtacaatcaaccttgaccacccaaaaaaaagtcaaaaagaatccaatttgaagcgacacgtctcctagctaacaaaacgcagcagagagaagagtaacagtaacacaccatgaacacgtaggtacatttgcgttctgtatatatttacggaattttcaatttggtttctcgccatcgccaatccaagacactgcgaccggccatcttaaatcgggcaggaaatcgacaagtaattcgattttgatagctttcagtttacgttccaccgcgacgatcgatggattgatgatgaaataatctcgatcgatcactgcatcatgcatgctgctgagtccaatcaataatcggagatcacctccccttcatgtcggcgagctgcgcgaacatctcgccggcggcggtggtggacacgtcgggcacggtggagacgccggagccggaggaggtcgccggggccgcgccggcgccgtcgtggtcggctggcttgtcggccccctcgggcgggttggcgtcctgcagctggagcgcgtactcgaggttccagagcacgtcgcccatggagatcctgtcgctgccgaactcggcgaggcacttctcggcggcctcggcgaacttgttgagcgactcctggttcaccgtcccggcgagcttggggtccatgatcttctcgatgaggcccttccgcttccactgcatcccccactcggcgaggctgacctgctcgcgcggcagctgcgggtcgatgggcggccgcgcgcacagcgtctcgaggagcacgacgccgaaggagtagacgtcggacttgtccgtcagctgctggcaccggaagtactccgggtcgaggtagccgaagctgcccttgacggcggtgctgacgtgcagctggttcatcccggggccgtccttggacagcccaaagtcggatacctttgcgacgaagttgtcgtcgaggaggatgttggtggtcttgacgtcgcggtggatgatcccctgcgccgtgccggtgtgcaggtagtggaggccgcgggcggcgccgatgcagatctccagccgctgcttccacgtcaacgccggcaggtccttgccgtagatgtggtcgcggaaggggccattgtgcatgtactcgtagacgaggatcatctcggcgttctcgtcgcagtagccgatgagggagacgaggtggcggtggcggagcttggacagcatctggatctcggtgttgaactcgttgatcccttgctccgactgcgggttcccgcgcttcacggcgaccttggtgccgtcgtcgatctcgccgatgtagacgttgccgaagccgccgacgccgatgatggcgctctcctcgaagttcttggtcgcggcctggatctcggcgaaggagaagaagcggccgaggccgagggtggaggagaaggtgtagccgctcttgctggacccgcccttgctggtggtgaaagattggccggtgtggatggggagcagccacgacgagaagctgttccggcgctcccagtcctggggccgcttgtaccacttgacggccatggctcccaggccggcgaacgcgccgaacatcatcgcgaaccccaccgccgccacggccttgcggctgccgctgccgtcgtcggccttcttcccgtccacgccgaactcgccgtcgaggctccccaccgagttgctcatcttgagcacctccacgccgctgagcagcgcgtccacgcgccccgtgtcctcccccatcggccccacctggatgctcagcttgtccgtcgcgatcgacgagttgacgacgatgtccttgtagtacgccgccgacagctcgccggtcaccgtcgacaggtccagcccggagatggccttgcgcccgttgacgaacacgttgaagtagaggtcgttcatgctcttgctcacgatgtccgcgaagaagagccggaccaggtagccgaacgccgggtccacctccatcttccacgacatgttgaagctcgggctccccacgccggcgtccgccatcttcgcgcagctcgcgtacacctgcgccggcgccaccagcttcgacgtcccgtcggggaacttgatgttccccaccggcaccgacacgtccttcaccgcctccttcgactgcacgtacggcgcgtccacgtcccactgccgccccagcgtatccttgtcgggcgcgatggccgggccgccgacgttgatccggtacaccacctggtacgccgcctcggcgagcccggtcatctctccgacgggagcgatccccatggccatgtctgtgatgagctcgtcgggggcgttcacgacctcgatggcgttgatgaacgcggcggagcccttgagcgggtagaacttgacggcgaggtggttctcggtggcgttcacgaggaactccttcatgaccggcttgttctcggcggtgaagctgtggaggaggacgttggtgtcggtggagacggtgaaggtggcggtggtgaggtcgaagtcggagttcttgagcgggaagaggtagaggcggacgaagtgccagcccgggacggtgagcgggaagctgtagacggcctcgtcgcggaagatccgggcggtgaggtagagcggcgagggcacgtcggcgtcggtggtggcgaccttgatggcgtccttggcggagagaaggctgttcgactgcgcgtccgtcttgtacaccttgccgccggtggtgacggggctcgtgctgccgcagtcgatgaggaagttgtccttgggcgtgaacgtcgacggcgtcggcgccgtctgcgcgccgctctcggtgaccggccgcccctgccccgacacggccgtcgcgagcgccgccgccaccgcggcggccagcagcagcgccggcgggatcatcctcccgcggcggcgcatggtggtggggtggcctacgtggcacgcaagacgtggcagtgtattattggaggaggcgcgcggcgccctctcgccctctctctctggttggtggggccaatcggaggagagggaggagggggcgtggggccagggagtctagaagagggtggcggagaggtgggcgggttatgtgggccaatgagcgcgccaagtttagtttaagcaggccgcccctacggttgggcccgcctcgcgcgctccaccgctcgcaaattctcgcatacgcgcgccgcgtcggccgcctattcttagcacgcgacggcttcgttcgattgcaggtggaggagcaagatttgtaccgcacacgaaatctaatttgcaggtggaggcaactccggctcggacgtccgacgtttggggaaaaatcgggcgctgatgtcagcgcccgatttacgtgcaaaaactactttaaattaatttttctcttaaattacttatctaaatcatgattcgatttcaccattaaattcgttgcaattaaatcttcaaaataagaccacacatggatatattccgacgattttttttagcttactgttgaattatttttaaatgttgcacgatgttccaccaggtatatcagaattgtttcactaaatagatcgaaaatgtttcactcgtttaaatcgggtgttgtttcaccttatataaaaataagggccatttgcttatttgaccctgttttgaaggctaactaccaatttgaccctctttttttgagtttgcttatttgaccctgcttttcgaaaacgaacgatcggtctgaccctgttctgttaaggtgagttgacggtgttaagttaggggtaaatagtctattttgcccttgcaacgaagctgacgaccggcgatggcaacgaagctgacggaggcggagacggcgacgacgatgctcttcccggccacggcgggcgcgagtgcgggcgtgagctcgctgcacggggccatcccggcgcttgtgtcggcggggctcggcgccgcggccgacgagtcagcgggcgacgaggccagggacatcggcggggccggcggcgaggccatcgtcatcggcggcggtgggggccttggcgagcaggcactggcgcatgtcccctccgcgcgcataccgccgccgccgccgccccctacatccacaagctgacgccggcgcggatccgcctcccctccgcgcgaatcccgccgccgccgccgccgcccctacctccacaagctgacgccggcgcggatccgcctcccctccgcgcgcatcccgccgctaggcccggctcctctcctcccttcgccggcgcaggcctccgcctccctccccgcgcgccgatgcagatgccgccagcgccgcctctgccgcaggcccggctcccctcccttcgccggcgccggcctccgcctccctccccgcgcgccgatgcagacaccgccgccgccgccaggcccggctcctctccctccccgcgccgcatgccagcctccgcctccatccccactgcgcgcgttgacgccgccgccgctaggcccggctcccctccctcccttcgccgcgtgctgtcaccgccgccgcaaatcgctagcagaagagagagacatggagactcagagacatgtggatagggctagagatggatatggtttcctcaagggtattttgggcattatgaattttaattatatttttttctttttttaaaatcaaatcttaacggtgtagtggaaatagggtcagacggaagattcatttttgaaaagcagggtcaaataagcaaactaaaaaaagtagggtcaaattggtagttagacttcaaaacggggtcaaataagcaattgtccctaaaaataatgtttcagcaaatagcgaaagaatgtttcagttcactgcaatatttgatccatacataatgaaacattataagtacactaggtgaaatattttttggtggaataagaaatgaaatgaattcccttaatagggggtttccaaaatatatgggttttttgttgcaatgaaatatttcagttcactgcaacattggatctatacatagtgaaatattgtgagtacactagatgaaatattttttgtgaaataaaaataaaccaaattcccttaatagggggtttccaaaatatgtgggtgatttgttgtaacggcgcgttccataatgtcaaaatacactacaatatttgatccgtacatagtgaaacatcgcaagtactagctgaaacatcgtaaaactactagctgaaacatcaaaagagatcatatgcaatattcaaaaaaatatcaatagaaaagctaaaatattttttatcgaaatataatcatgtgtggtcttgttataaagatttaattgcaacgaatacaacggtgtgatcggatcgtagattggataactagttttagagaaaaatcgttttaaaaggagcgataggaggcgcgggcgcccgaggcgtccaatttttcctctgccgtcgggcgccggcgtgcagcactctaagcccatcgcagtggcggtcgaggagacacgccggtttagcccgttgtttttcgttgggccgtggactagtggtgagcggtgaggtcataacatattgacatagccaatccaaggtttatttttcttctttaaattttgtttttttaagaaaagacaagctgccaatttttattaaatagagaaggagtaaacggagagagctacaaatcgaacgtccgacgttgtaaaaaaaatcggacagtcaaatgtttcggttgactgttggtgcaacattaagttatacatagtgaaacaaaaaagtcagcctatgaaacatatagaacttttgtgaaacataacaataagaatacatggtgtaacatatttctatcacatatgaaacattgagtttttattgtctgaaacatatgttttttttcatcagaatataatcatgcgatatcttgttgtaaagatttaattataacgatttcaacggtgtgatcgaatcgttcaacggataagtagtttagaagaaaatttttttttaagatcactaaatacttgcatcatgcatggtgtgggggagaaagctaatagaatagcataagagagactaggggcaatagcgtctcatattttttcagtgattggtgaaacattgagttgcacatagtgaaacaaaaaaaaattcagttattgaaacatttaattttttttatgaaacataacaaaaacacacattgaaacatattgctactgcgtctgaaacattaaatttaatggattgaaacatatatttttctttcatcggaatgcaattatatgatatcttgttataaagatttaattgtaacaaatataatgatgtgatcatatcataaattggataaatagttcaaaagataaaacattttgaagaccatcgtatgaatgtgtggagacatagggtactattagtagtttgttcatccgatcttttcttttcgtcggacttatgatctcaagtattttcgaggttatgtgggccagcgagagcgccaagtttagtttaagcaggccgcccctacggttgggcccgcctcgtgcgctccaccgctcgcaaattctcgcatacgcgcgccgcgtcggccgcctattcttagcacgcgacggcttcgttcgattgcaggtggaggagcaagatttgtaccgcgcacgaaatctaattagcatataattaataaaatattaataattataaaaattaaaaaatagatttatttgtattttaaaaaattctatttagaaaattttaaaaaacacatcatttaatagtttgaatagtgtgaatagtgtgctaacggaaaatgaagaagttgaaaattttggagttgaagaatggaattgggcaaatgggaggtagaaatggcgctgcaaatttggatcggttgtattcagagatttcatcagttatttcttcttcttctaataatgcatgaacttggacagcagacaacactggttgatggagcaagcaccgaacacatcacatggatgcataataagttcgattaattaggaacccgtgtttatgttttgtgtttgcagtggtccaaaatcctatgtttgcagtaacgttactattgttcagtaggggtgactgactattatcttgtttgcctccaataattacacagctgaattgcaatgacggagtcgatcgatcacctgctgcaaattctgcggttgtttggcccaaacaggctcgaatcaatggtcattagtgatcagggaaactggagatattaatttcttgtgcattaacgatcaaaacaccgaagtagctaaaaattcccgtttatattttatacgtcttgcacgttacaaccaataacacaacagacactaacatcgaacagaagaattaaaacaatacgtatagaacaaaaacgcttacttcctccgtttcacaatataagtcattctagcattttctatattcatattaatattaatgaatctagataaatatatatgtctagattcattaatatcactatgaatgtggggaatattagaatgatttacattgtgaaacggagagagtacataatagtactgtgtatacgtacggtatatagtagctagctcctaataggagtaataagcacttagagaataaggatagataagttaatccacgcatgatatcttgtttgattattagcatccgacattgaaccacctcctccttgctggcttccaccgctcctccgccttcctcttctccttctcgcacgcacatttcgcttccttcagattcttcatcttcagataaaaaaaatatccatcaaattaattcagatttatatatttttcgaacaagagattcagatttatatcagatcgataaaatgtgtattgataatgcacagtttccagacttttctttctttgtacatttctgcaattattattagtactaatctagcgagcttaatgtgtgtgttgctaatgaatgcgattaattaatctgtaataatcatgtcaccgtggatgtgttcggtttggtgcgatgaagctgccgcgcgcccttgtacaggaaatgcgcgccgctccagctcccgccgccggccgcggcggcggcgcaaaccggcgcctggtgtttgcacggctccggcagcggcggctccgaccacgcgcggtcctcggccggccgcgccaccgccggcacgctcgagccgccggccgccgccgcgacgtccagctcgcagctgagctgcctgatgcgtgactcgagcaggttgaggcggtccatcaggctgcccttcgcctgcacatgctgcagcgccgccgccggcagcgacttgctgtgctggtggtgcgccgccggcccgccgtcgccgtcgccggcattcgcccgccgctgctcctccagctgccgcaactgaaacaaagatcaaacaacgacatggtgatcactgatcaatcgacgaatggatcgatcgacacgcgacggcgacgctctctcgcgctcacccggaggtcgagctggtcgaggcggccgaggagggtctccggcggagggagggcggaggcgctgatgaggacgcggcgctccgagccgaggagcacgtcggccatggcggttgcacgccggagcacgcagcggcaggtacggtttatatagaaggccgcgcgcggcggcgagggcggagccaagatcgggtcgtggactcggctccgcaatctggcccgcgctcctcgcgcgcgcacctttgacttggacactgtcatactgggcctggatttgttggggttgggctttgtatggccctcgtggcaggcctacatgccaggcccaatttgaggcccaccgagtagtcgtaattaacaggagaccaacaaaacatgatactccgtatctctttgaagaaagagagcagagttgatgaatgtcatgtcctgagatttggtctattttttttcacgaacgcgtaaaataattgcacgttaatatattagaggaaaaatagtttttgatacacaacgcaatcagccagatcggcttatgctaggggaatgaagaaaagcaaaacaaaaattgtagctaggaaggaaaaaaaactactacggcggctatgaaactccgattggtgggaaggggtagagccacgttacattttcaataaatctccaaaagtagcaatgcacgctaaagaccacagatgatcttccaagcagatatactctagaaccactgagaccgaagagagcgtagaatcgaaaactctggagttccgttccttccatagtgccaagagaccagaagtatcagagagtcgaaaccggcacggagatgctcagataaagcaggccctagaggttggccaccaatcctgaagccgactgccacaagaggaagagagagcggtctagccaggaggcgacaacacacggaacctgacctgccgagcgaacacacagtcgaggatttggtttagagaatgtctctattgggtattgtaattggaagataaattgcgtagcacgtaaattagctagacatgtttttaatttaatcaattttttttaactaggttcaacccctggcttcttattaaacgttccaaatgtcatccctcaaaaagaaaaagagagagagagagcagagcagagaagagttgatgatggttggatggtgtggtctggaacataagaaaaagtcagaatcagatgattggtccggaggcatctctctctctgttgccaaaagcaatttctgtggtagcaaaccatgatcatcatgcttcttgttctgggagatccactgcaaatttccacaaccccacttcacaatgtacacccattgcttgcccttctctctttaccgtttttctgcatccatacatgttttctaagtggtagcaactcatattcagctgtgtctggaattgcctaaacattttgaaaatgcttcaagcactgaactgctctctaccaaactcctgcactactgcatcgcctcttgctttgaccatcagaatgttacgaagaaattgcaccccttaagctccacatttcacgccagttgcttgtacaccttttttttcaaagcgaaaattgcagaagcaactgtcgtgaaatgtagagcttgacaattgttaaaattacatgagtacaacaatgtccactgtattaagctctacatcccaccggaatatataatcaaaactcgggagagaaattagcctgcaggactgcagtacaggactccactccacatgatcagttgttgtaaccagactaattaagcaaggcgagctaatgagcagcagatcgagcacatggtaatgcctcgctaaaccgatcctgatcgatccatctgcttttatattaaagagatggcacaagccaccagacgatcgaactacctggcaattgctccttctctctctattattatttttttggccattaattgctaactgaatactcaaggcaaactgtgccaaatgatttaattatttgatcacttatgtttaacactccaacgatcgcataccaactgctagtactggtattataaaccagtattaaactagtactatcatgcatgatgatggaagtatgggccattcaggtttcaggtttacgtgcagtgtggctatactgtaggacgaacactcgcaatgatttaaaccgacacttgtggtcaattcaaacctgcccaggatcacgcaagatctctctaattttaattagttcgtgctaagaaagtattatatatgaaatgatttttggttgctctgaaccttttgtgtcgtattcaggcacccaggctgtcttggaagccatttggattccatgggccacaaatataggcatggacagcatgtgaaacttctgccttttaacaaatccctgcaatccaaaggcgattaaaacactttctgaaaagtattttctaacataaatacaataactgtctttttcacacaaacattttctctaggcccatgattcaaactctcataaactatggactccatctcgaacaaaataatttctttttcaaaaaaacgaaaagaaaagaaaccggtatgaccgcataacaatagtcagttacatttcaataaacaaaagtaaaaacctagacgggttacaagaaaagggaaaagaaaaccctcgccgaacaaaagaactccatatagatttcatgagattttttctatttttctatattattctcgtgggaatcatacatttaaaaaggaaaattatacgaagtgagtgagcgagttggtccgtgtttggacggaagtagaggctatgggcagcatgaccaatgacagggaagcggcaccttccgatcactcaggtcatccattcatccattcatccatccatccatccattcatccatccatccatctcaatatatagctaatctgtattttctgtgtgcttggaagcagctttggagggctctattattgtctttagcctctctgattgatatgactccctaaccatatgctattatgatttatgtcatactggcaatgtacatacgcctctatatatattcccatatgtttagcttaatttaaatctacatgatttagcatcggtgtcggtatagctacaagatatcgtaagcttagcttttgatcatgagccttgttgcgactaataggaaggttcatcagtgatgaaatgaatagtgaggcttcgttctggcatccctagggggcgatctcgtctgtgtctctttgttggtctagcggcggtcggtcacgcttaacggcggtcgatccggtgctagccttctcctgggattatgtgttggcgatgtcggtgtgtgggtggttgtatattttttcctttttcctggttacgaccctccagggttgtaatcttgtaatttttttcctgctctatcaatagaacttcgcaccgtctcgtgcgagtcgttcaaaaagaatagtgaggtttcgtgaagaacagttgttgggaagaggaagaataagagagcaatgctttacatatttcaaaaagtgtttcgaaaaacatgcttcaaaattggatattttttccttgtgtagttctgaggccttttttatctgggaaaaatttttaggattgattgtcacatcggatatacggacgcacgtttaaagtattaaacatagtctaataacaaaacaaattatagattccgccagaaaactacgagacaaatttactaagcataattaatccgtcattagtaaatatttactgtagcaccacattgtcaaatcatggcgtaataggcttaaaaagttcgtctcgcaatttacacgcaatatgtgtaattttttttgcctacatttaatattctatgcatgtgtccaaatattcgatatgacagcgtgaatttttttgttttggaaactaaaccgggcctggatttctggtaatcaaaattggctcagtcttgatcctatccatattgcctggttaaatatagcattgcctagatggaaatagaagtgccataaaaatgcacggtgctgacaattcaaaacaacaactactgcatatttgaaaaaccaactaactaaaacgtgtcaaatgatctgaatggaaaattcagagcagaacaattaagcgatctcaaaccaagattaagtacagaataatcaggcgtgcgtttttgtttctgtaaaatacggcaatgcaagcgtccgaacacaacacacataaaaccacatttagtagttaagaactcatagaccgacattaactaatctctgcaacgaataaaaacaacaaaacgaaaaggaaaggaatcggacaaagaaaggaataagaggagaaccacagaaagcaatcgccaaagaaaaggaaataaaaaacattgtgcaaatcaaaacgtggttggctgcatttcgaatcagatacctgtctttttttcatcagaaagcaaagctgattaaggagaagaagaacttgagaaggaggagaagagaggaggaagaaaggaagcagagacgaggaggtgggttacagcgtctctttcctcggtcaacgcaggcgagaggagagcgttgacagtgccagcgtggcatccccaggtgggccccacacgcgcgacactcctgactgtcggtggagctcagactgtctgtcaccttgtgccgccggcctgcgtgtttcagactgttgatgaagagttgttagacaaaaagaaaaaaaaggaaaagttgatctcttgttattagcaacttgttgatcttttttgtagtagtattttgaggagaattcagtggctttggtttactaatccaatctctcaagctgacttgattgctgtgcacatgagcatatagtagttactacttcagtttcagttaaactaagctcaccctccaacgactaatgcacagcaccacgcacatgtagcagtgtcatttaaaaattcagtaacagtttctgaaaactaaaaaacaattcagtatcagttgtgattacaagaacacaatgcaactgatcctgtatgttttattcattggattatatttttgacagtgcacaaaaacacactaataaggcacaacaaagtagcactgttagggtggcggccattcattaaagattgactcgtatcgctgaatgccttgtgttcctgattggattcaactgtttactttccgtgctccactgtttgggaatcaatggttaattatggggatcattagcatgatgctttgctttcttttgtcatcagacttgtatgattcaatgatgatatttttttcttaataaatggaatacaaactagtaattgtcaggctgatcagctcacatccagacagagactgcatactggctgatactgtcagctgtgtttgtgtatgaatctcatacagacagcagcagtttactcagctggttggtaacaaatgtacaccaggttacaataactcttctgtagtttttgaactataaaccaaaaacgacatttagagggagtgacgtccctccaaatatttttttaagaaaaaattatgagtgtatcgggaattgaacacgagaccttggggttaaaactacataccccttgtcattgtactatgaagtgcatctcaatttggaactatagttttatagtttcttttgtttttgaactattaaccaaaagagatagtactctctacatttgaaattactgaacattttagctttcttttaagtcaaacacgtctatctttaaccattaatttttaataggttcgtatagtctaataacatatgaattatatatatgttatgaaagtctcatgctgaatctaaaaatatacttgaaatttattatgttaaaccatacaaatttattaagaaaaaaaattgacttactagaatgacgagtagtttaaaactgagggagtagcttgtttctaaaaccataattcaagagccacttcaattcatgcatcgaaaagctgattgccagcactactgtagctgtcctgcaaacctgcaacagcaaatctagctgtgataaattctgatatctgaaccattgcacttcacttttgaatcatagaagatgaattccacaagcatgattcatgtcccttaacttgtgccttttcttttttctaggatcatgtgatctctttatttattattcctctccctcctggcacacaaagccttcctatgaccactactattgtattactagattttaaacacctctaaataaattaaaaaaacaaactcttacatttttcaacattattatttggcattgtcatgctgcctgctgacctagaatttcacaagattttcataggaaacaattcatttccttcaagatttccacaaaattcctctgttccaaataagaccatgccaatgccaacctcaatggccttgccaaaaggttttgatcatataggcaagtttatttttagttgttttttaaataaaaacttggaaaaaaatatcctgttatgttggacagttcaaattaatcaagagcaatttttttccggtagttggatctagctaactaatcacaaacaaattattttcgcaccttggcgcgaataatgctcccgcgattatttcatctgcatgtgctgcgtattctccactgatgatcagctgctgaactgtaccagcactgctaatctactacgctagctactttgtaactgtttttaaagcgggtagttacatcgttaatttttttttgttttgattacaagtactcggtgctaaaatatatagtatttaaaaaatctattaggcgatggttgggacgttatatcgacaagcaaatcaaacaggaaggaaaaggtttgcagcagcatcagccgacacaatacgaatcaccatctaaccaaacgaaaacgaatcaaaacttggactagcttgctgcaaatttcctggttttaaaagccaagaaaataataatttctcaggcatgtggaatactagtagagacgacaaggaggaaacaccaaaaaattcagcaaataaacaaataaatgaagtgtattcatttctgatggcgccatgatcaagcatctagcacaatgtggagcatccacccttcctttctctcacattccacagtagaatcaaatcaattttgtcatgaaccaacgcaactctgaccctgatcttttcagtttatttaccagattattgaaacatattatttatcgtacactttaaaaactatattttctttataaataatttacactcctctattgcatttcttatcgctagtgttattttctcattaatataaagattttacttcgattttcgtaagcacgcttttaaaactactaaactgtatgcgaaaactctaaatatgaaagttgatttaaaatatcaaatatattcatttgttaagtttataaatattaaaatttaactaataatgtgctaatagctttatcgtttaaccgtgcgtcaacttaatcttaatcttatgagtttcaaacactattattaagtttattcatcaaaacatgtactcctactttatatttatatctgagtgcatagtccgccaataatctaaatcgaacaggaatatatatattatcatgttaattaaatatagttttccagaaacatttatttatataaatctctttggaatttgataatggaaaatgtcatgtggccagtggcaagtaatctaattggcgtatatattccccttgtccatggcgttgcggtttgttccctcatcaacctcaccaccattattttcttctctcctcttctcttcttcctcctctcctctcctctcctcgctctccatccatctcgtcttcttcttcctcctcctcagcttcgagatttcagcttctccaaacccccattcttcccgccacaagctctgctctgtgctttgctcgctcgcctttcccgccattggtgtgcttcgctttcttggcttcaaagatccgacgagctctgtgatagctggggagaagaagaggaggagaggaggatgctgggagcgagccctaaggccaagaaaggcgcgacggtgaagttcgggtcgatgaagaatcctcctcctcccccggtggttggcgccgccgccggagcagcggcggcggcggcgggtgggaaggtgccggcggaggaggtgtgggaggtgcggccaggcgggatgctggtgcagaagaggggcggcggcgccgacgaggagcccgtcaacgtgaagccggtgcccaccatccgcgtcaaggtcaagcacgccggcatcacccacgagatctacatcaactcgcaggcgtccttcggtcagtgcccgccgccgccgtcgtcgtcgtcgtcgacggcgaactcgatggatgggggccatgtctgatttcgttgtgggtggtgcaggggagctgaagaagatggtggcggcgcgaacggggctgcatccggacgaccagaaggtgatgtacaaggacaaggagagggactccaaggcgttcctggacatggccggcgtcaaggacaggtccaagctggtggtcgtcgaggaccccgaggcacgcgcccgccgcctcatcgaggagcgccgcaatggccacctcgagaaggccgccaaggccgtcgccgccgtcaccgccgaggtcgacaagctcgcccccaaggtaggcacccacccacattgcccgccatccatggcgacgccgacgccgaggtagtaggctcacctccgattggttggttggttggttggttggttcggcaggtggcggcgctggacgcgtcggtgaggaagggggagaaggtggcggagaacgacgtggtgcaggtgaccgagctgctcatgaacgagctgctcaagctcgacgcggtggtcgccgacggcgacgtcaaggcgcagaggcggctacaggtgagctgacgagctacctcgccgcctcctccaatctccaccgactagcttgaccgccatggttaatgagctcaacctgttcgtcccatgactctgcaggtgaagcgcgtgcagaagtacgtggagacgctcgacgccgtcatggccaagaacgccgccatcgtgcgcaagtccggcgagaagctcacctccaaacaacaccatcacccgccggcgaggcagcagcagcagcaagctcaccaacaccatcagcagccggcggcggggcagacgcggtgggagatgttcgacctgctgtcctcgctgccgtcgacgtcgtcggcctcctcaacgaccaccgtcagctcaacggcctcctccggcgcgccgccgccgctgccgccgccggcgaaccggctcgactggatgctattctgagcacacacatcacagaatcggcagatgcaatggtggtgcttggttggcaagaattgcacccatgtccggaaaatccgaggtgtcctgtccctgatgagatgatgatgaagatgatgattgaattgccctggattatttgctgctgctctagcaatttggttggccacattacatggtactactaccacttctagatgagttcagttcatcatgtgagagtaatttttttttaattttgttttttctttctttctttctttcttcttcttcttcaccatcaaatgtttgatattcttttgtgtgcatatattctgagaaagagagagagagagagagagagagaggaaattaggggggaagagagaaattgaagtgtattcagattgggaataagtcaaaaagggttattattgttctccaattggcgtttgaagaaaaggcaaagaaaatgttgtacccatatggatacagataccaatacataccgttcttgataaggggagaggccatggacttggactgtggatgatgaattcttaaatctttttattattatttcctgttagttgttatgattaaaaaaattgtttctttcttctccttgttgttgttggtgttggtgttgtctgtgttcttgagttagttggcgcctatctgtcaggcttgattcctttcagaaatgaatagtgcaggggttggtgtgcatctaaatactttattgctgtgccacatttaggtgttgcatcaagccatcagagtccgagctgttttgttttaggtaaaaagaagaagaaaacttgcgagttgctttggcctatttggcgattattacaacaaactaatcagctctaatgaatgaattttctttcttttcctccttgttgattcagcttggatgtctgatgaaatgagagatcaagcgttgattgattgattgattgattcaattaattactagctggttgccgttgcagtgtcagtattgagagagtgaagcatcatgtgtgtattagtgatgtattagtagtggactagtcattgcctggtggttgagctgagcttctcctcttgtgcctgtcacatttgcaattgcattgctggctagagagagatgttgccttccttcctctcctctcctccaagctaatgacaccaaattacatgatagtatccttccttccttcttttgttgtttcttttaaagttgggctatttatttctgaaggtaatgacatggtaccatctgccaattagcaacattgcatggttggtgctgaatagagagagagttttgagtcacatgtttctcgagtgatgatggccaatctttccttttctttaatttggtgagagatcatactccacgagatggcgtggaaccagcttgttaaacactgatttattcatgtttaaataactaagaaaaacaacaagagaagaaacaaaaagggcaggtaacgagtctaacggcagaaggatctttatcatgtatgtctcgtcagagttgttcatcagccaatcgtcatcatcgatttacagtcctcaactaactaatcataagctcgtcaggcagaataaaaatcctgaaaattccatagataaactagtcatacttggccaaatacatagcttaaaaataaagtgtttttgaaggtgataatagtaaagtttgaactgaaattaaggtggcaactggtgctgtaggtgagtctagaaatggggggatgttggttacgtggtcgccgtcgaggggtgagaacaaaggagatggtcggcgttcttgaaagcgaccactcccggcgaacttcgacgacggacacatggatgaacacgcttcctcttcgcctacaccgacgccgccggcaatgcagggcaacgcgcgtttcttttcggctgatcggtttggctgattagctacctgcacgctaaaacatgagaaacataagggtgtagttatatttatggcgtcatattttttattaaaaaatagtcggcatgtatttacattgtaagtccttaaattacatatgtaattttagtgtatttacaatgtaagtctcaaaattacatatgtaagtaataaaattacatatgtaaattcgaaaattacatactaattacatatgtaagtggggtgtaaatgaggtgtaactactgtgtaagtggctgaaaaaaaatcgactgtagcatatgacgccatatttctagcaactccgaaacataattattaactagctgggtggtggcccacgcaattgcgcggctagcacccaaacaaaatcttatatttttttatgattttacttaaaatttattaaatagctatctcattgtcttaagactttgaaagaccaaaccttatcatcctcgtgtttctaatatatagtttgtaaaagtcacaccagttgctaccccttatgtcatctcttcatttttataatttctagatgtcccgtcaaacgttgccactatactcctctgcggcccgtccactgtctcctctctttattatcattgagattttaaaaatcgaacataattatcgtttgggttcatttttactttctagaagtcccgccaaccgtcagcggttttgccattgtactcctctacggctcgtccgctgcctatctttttttattgtcattgagattttaaaatcaaacatgattatcattggttttttttttactttttagaagtttcaaacctttaaaaactggacttgtagttttattttttataatttttagaagtcccatcaaacgatgccactatgcccctctacagcctgtccgccgccaaactctttattgtcattgtgattctaataatcgaacataactatcatcggaattcattttttattttctagaagtcccgtcaaccgtcggcgactatgcaattatactcttatacaccccgcccgctgcttcttctttttattgtcattaagattttaaaaattcaatatgattatcaatgggatttgttttttttactttctagaagccccggcaaccgccttactcgtttgcttcacggcctgcctgacgtccctccttttaatcgtcattaggattcaatttggtgttttattaacaattttatatctcgtatcaaccgccaccactctacttctttataggcttgttacttaatttatctcgtcatgtgtttagatggtcttttcttttaataatctatatttttatcacaaattttagttatttttaaattgtattcctaattgaaatcttatttttctttttctaatttcagattttcttaaaaaaaagttaatatcgtattgtgttatttttaatgtttttattttttattttcaatttcagttgttttaaaattttattcctacttgaactctcttttaatttttctaattttagatattattttatttttattctaaattttaattaatctcgtattgggttcttatatggattcttctttcaatgttgcttatttttaattccaaattttagctaattttaaattgtattcctacatgaactcttattttattttattttcctaatttcaaatttatttatttttatttcgaatttcaattaatcttgtattagattcttatatggactcttcttttattattcctaatttttaattccgaattttagctattttctaattgtattcctacttggactctcgttttcttttctaattttgaattttatttcattttatttttattttgaattttgattaatctcgtattgggttcttatatggaaacttatttcaatattccttatttttaattccgaattcagctatttttaaattgtatttctacttggactctcctttcctttttctaattttggattttattttatttttattttgaattttgattaatctcgtattgggttcttatgtggaaacttctttcaatattgcttatttttaattccgaatttcagctatttttaaattgtacttctacttggactctccttttctttttttcctttttctccgattaatgtgggaatttctagctcccacagcgaatgtggtgcctcctttcaaagctgttttaataatataatagattagcatataattaattaaaaaaaatactttatatgccctaaaatatatgagattttgattggatgaaatacattgtccataattcatagtattagaatgtattctatgcaaccaaaataccctatattttggaacgaagggaataattattagaaacatgaaaaataaatttagtttggctttttagtattaactaaaaaaatttcatacaaaacataccatttagcggtttgaaaaacatgttaacggaaacgagaagtagctatgctcaattagatcttggggtcttaattctcgtcttctcggctaattaatatgtctccacgtttaatttaactctcggatttcaaaccttaattcagcccatgatggaaaaattaaccaaccaagcaaacattaaaacgatgaaaataaagtttgatttcttcacacagatccattaccccatcgattcatctatctgtccatgctgaaccaaagtaccaaatttatgccttacattatcaccgactaataatgatacagcaacagtgacaagtcccggtactgattgcacaagctaatcatgtctatctaataatccggagtatgaagcaaagattcccggccgctcggattgatgaacaaaggcgaagcatcacaaatccaatgacagatcgatcaagcatatgtactgtacattacataccacgatatgatagctagcgcgatcaagaaggccatgcccaattgccaaatgatccagtgacaagcaagctgcagcctgcagggatcggagcagggggacagagcacaagctgaacagtgctcacatagctacagacacaggagcagctgctctctttgcatcgaccaaagatgctgaattgctgagaccacgagtttcagatgctggtgcttgatatttgctgtattctttcttcttctgaattttgccggtgtgcgagttcggctgtgcgtatcttagttatgtagagatcgaaagtgttctcggggaccagaagatgctgatcgatcgatctgcagacaatgcgatgcataagtgcgtgtctcgttctgatcatcaggtgaagatcgagaatggctgaaactgtatatgtgcttgtttgatgctgaatccacagatctgacagtgccatagaattattggcgtacgacgggtacctcctcaggtttcagacagcacttgccctgaccatgatactgttatatatgctgcctgccttttagtatggctagattagattcttcaatctcattccagttgtaccgtgtggtgaaaaagttaaaactgtcatcactggtgaggatgacacaagagtaagtactgataatgccttgaaactgtaggaagaacataccaggatcttctcttgctttgtttgtttctcaaatctcttcttattgatcatcagaattcagatggtgagaggcgagcaagagggagagatcatgcctaaagtgaaaatagccgtactcactactacagaacttgagctgttgggcatattgatgagtcacttagaacatcttcaacacagagcgaccatttttgactctcaaaataactatttggccagcctaacaaaaatttagagagtcaaacttatcttctattccaacagcctctacacatttcactctctattaaccaatgtaccccacctgtcattcttctcctcctctttcttcttcctccactctccaatcccctgctcgtgctagcggggtcagcggcggcgacgctgcggaggcggtggcaaaggcatcgagccgccccgctgccgctccctccctcccttgccgcacatggagggcgacgacgacggcgtgggcaggcagatcaaggaggagaaggagccattgcgggaaaagggaggtgggggggggggggggcaaagcagccgccattggtgggtggaccatcctcgccgaccgactcctcatctcctctaggtgcgctgacctcggcaccccgcaccagtcgcgtggaggcggcggaagtcgctcggtgacggcgcagatggtggcgatggtcgcggctagcgacgacggcggcgctggggcaatgcaagagagaatagtcggcaaggagatgggaggataatgtgtgtggggccacagttggccagtgatttttggttggccaagtttggccagtggaaggagggttttggccagccgggttggagaggctattgaaggacgttttttgactggaacggctaaaatttagcttagagaatacttggagaggctgttggagatgctctacgggtcagtgtgtcctgtacctcgttgaacttgttgcatgactaaatagtaaataccattaaggggccttttgtattgtaggattggcaaataatttttctagaggattcaattcctttgggattttctcctatagaactctttattcatataaaggtatatattttttaaacaaaattgcatttctatggtcaaatttgtaagaaaataagtaagaggttacacctcttggaaactttccatttttttactgtggtgtaatcaaaggtcatacctttctgtttttctgtattttcaatttctgtaggattgaagcaacacgttatttcaattccaacagtttctctatttctccttttttttttttccctatcccacgtttaaaaggggcctaagtagctgtagcacatatagcaaaattgctttgacaaaaatagaaaagagaagtaacgggtaggagatttgggtcgggttagggcccatctgctgcgaaacagggtgaggcccataatagcagtaatgccttggcccatgaaacaaggcttgaaccgtaacatgcttccaacgacgccgtctgccgtctcaactactctctacttctctagtctcaactcaggcacgagttcgttctcgtcttggtcagctgggacccacaaagagcttccttccgggactgtaacgattatttattaaacatatcccaatttgccccgttttgatccgggcacatccacaacttacacggattttcggcacttatcctccacgtttggctatttacaacttacaagacactgataactactataaatttctctcaatattgtaacactaaaacttgagatatgagtcaaactgtctcacgatattttgaacccatctcatacaccacattaataacattctaatccgtgaaagcacctgcaactctcggtgacgaagagccaacatcgggtgccaaaccttgatccaatgtgaaccacctgtagctcatgaagatacacgttcttattttttttttgacaattttttgccaaatccaagcaactgactattataatcaaacaaatggataatcttatttttaatttttcttataggcgcacgtaaaaatgttgatatatgtgcatggagatggttgatagatgcatgtggtgctttgtgttcttaattagtatcatggttttacttctaaaagaaattctaactatgtacacttttgagtagtgttttattccattaagaaacaaaatttgatgatacttaatgtttcataacacgaggatttgcgcttgtggatttgtgcatgtccttagaaaaaaacatctaaatttgatcataatatgatttgaagttaaaattttagttacttttttttagaaaatttaccgggagggagagctttcccacctgaattcattgatataaggagttgaaagttcagtttatccaattatacatcaaaagagcgaatagtggaagaaaatagagacttccacgccgagattacatgacgatcatataattttaaccgctcagcccatagagaggcttccgaaacacacataatgcatacccgacacagggaagcttcctcatgccggaagaccacaccatgacgatgattccaaagacaccagaaacaaagtaggtagaacaccctggaatgtttgttgggaatttgatgtggcagaagaagagaagccagctcacacattgacgcaatgttgacctgaatattaaggttgtcctaaaaagcagcagcaaaggggcagtgtaggcacagatacgaagccgtttctttagccgagttgcaaagatcacaggcgggggtggacacaatgttcttcttacaaaggtttttcttcattgggagccgatctttagcaaggagccaggcgaagaactggaccttgagcggtgctttgttgttccagataaacttccaattgaggcaaggaggcagttcactgcgttggacaagatagaggtggctcgtcttcagaatgtcactagaatatttcgagtttctcacatcaggtctgtcatttgccgtggtatgctcagtcaagagaacacgaaggtagttaaattgttcagccataatcgacgacaggcggagagcaaagtgatctctcaaatccatagaaaggacctcggtaaccgagtcttgcttgccaagcgagtgcgtgtagagtggttttattgattaaacataatggtctcacaatattttagttaccttttaaagaaagggttaggctttattgattaaacataatggttacaatcccgcaaaataagataatgtacctttactattgtgagacgtgacattactaacaaaaataattatttggatagggagactcggggttttcaaaatcgtgcagttgtcatataagataaaccttctcagtttttgaaaccacaatatacctcatggtaaccgtacggttttcacggtaatcgtacgattatcacagtaaccgctaaagcgtggggtgacggtaacccacctaggttcggtgaacttgcatggagtacacaaatcatacggacttgcaaaacaggtgcgggtacgttcccaagtgcgcgtagcaaattattagacgtgcagagggtggagtcgctgtcccgatctcctctcctaataaatcacaacttcgcttctcggttggcagcagcgatttcatccaagcaccacgccgccgccgccgtcgaagccgatctcctgcgcgcggagcggatcgcctctgtcaggtacgacccgccctcttcctcctcccctgctaatttctcttcgcttcgtcggccacgccacgccacgcgcgttcttgccaaccttggtctcgcgagcagcgaggatggggaggaggagaggaattcctctcgaattgatcgccggttgatgcgcccggcttgttcctcttctgcggcctaattttgtacgagttcgggggttgtttaggtggagaaatttggtacagattcgattttacccttttggtcttcttcttgtgcgtccatgccgccgttcatcagctacggtgaccttttccagtctagcttttggaaggggccgagctcccagccatggattagctatcatcaacttagtcaagtgacttgtcgagttgtcggggtgtagttcactgtctaggtgttctcaaaatcaccaccttttatagtggcacgcctcttaaactgtatccatgcaatcaaatttaaatcacatgtcattgagttaacctttatgctactttacaggccactgtaaattttaccgagtttatgaaattgtgaatatgtgctaaaggttatatgagctcctttttttttagcagagcctgctgtttaaattatagtcttataggtagcctgatgagtgatgacaaaccttattctgctactgccaatttttccgagattctttaaacctttagctgttagccctgttacattgctttcggttttggcaatttcttcgttatcactatgcaacagagatcacgactgagcctatattatttttggaattaatttgtttcttttcctgcttcaattgtgtccctgattctgtcacggtaatgctcatctattcactgctataattgtgacccaacatcttatcaccgatgcagtcaccagctatacagtatgagttcactggagagtgcaagagcagatcttgctctgcttattttatacctaaacaaggctgaagcaagagataagatctgtagagctatacaatatggctcgaaatttgtgagtaatggacaaccagggcctgcacagaatgttgacaagtcgactagtctagctcgtaaagttttccgactttttaaggtaaagttttaatccttgtccgcagtagatattgcaaatgagaagctattttttcataccttgacatgatctgtggcaccacattattttgcagtttgttaatgatctgcatgctttgattagtcctcctgccaaaggaactccactacccctgatcttacttggaaaggtatgttgaagcttgtattgccttgtaggaactctgagaacctaaagatacgttttttcacttctcattgtatctttttgctttgtgccatccacagtcgaagaatgcactgctatcaactttcctctttctggaccaaattgtatgggctggaaggacaggaatatacaaggtttgattttctcttcacatcattactgatatacataagcaccatacagcatatggttttatcatacctagatgttgacagtagaaattaatggtaggtaatctaattgtttgtacagaacaaggagcgagcagaattcctcagcaagatagcattttattgcttcctgggttctaacacatgtactagtattattgaggtatgagacttcagactgtagaatctatttaatcctgcccctgatattattacaatcaagagaataccatctgactagtatttcattataggtagccgagcttcagcggctatccaagtcgatgaagaaactagagaaggagcttaaacaccaggagctgttaaaggtaccgtcttatatgatcatagctcaatgtaaccacaattttcacatcttgcttttgatgacataatggcgtgtgatggtattggcagaacgagcaataccagatgaaactgcagaagtgcaacgagaggcgtctcgctctcatcaaatcgagcctcgacatagttgttgctatagggctgcttcaactggctcccaagaaagtgactccgcgtgtgacaggggcgtttggatttgctagctcactcattgcttgctatcaggtaccttaactctcacatattgtcatgtggactatcgtctgtttagagttagcaactgcaaaacctgaaactttcattttgatctgcttatttcctctgcagttgctcccagccccagccaaatccaagtgatccacctgaaggggtgtcagtgggcagttccaatgttgcaaccagtaagaaataaaagtggagctgcttgattgactcatgtggacttgaaaatcctttgtgggttatggttaatatgatgatctagtggattgctgcagctgtaattttaaggtgcagtacttgtgacaaaaaataagaaacttagcatgggaaaaatgttgcattgtttgccaatggtttagtgttgggactagctaataagaacattgccattatatcaacatctgtttgtgtgccttgttcgagactgatgagtggttaaatatgctgtgcttgcttcctgcgtgtgtagcgtgaaagcaatggatgtccggtttcggtgcatcgtggaggaaggctttttctgtgggccgtagtttgtgtgggccggcatagctagctcgtgggcctccgtttgcgttccttgtccactgtcgtcgccgacaagctatttattgagtgaaaaaaagatctaaccataaaaaaaaaaagcatcgcaatacatgtctctactattataaaaattgaagatgtttttgccggcacatttagtacgtcatccgtgtatgagtcggtttctaagctcgtttgcttttagaaatacagatccgtatttgaatcgggttttaagttcatttatttttggaaatacataacatataagaaatctatttaaaaaaactcacacgtaaacttaacatgattttctagacatatatatccaagcgaattctcacagtgaactataataagattaaaatagcattcacccgttgcaacacacgggcatttttttaagtaaaattaaagtatttgacatggatagcaaatataatatattttgaccatacaaaataatatttctgtgcctcccttcgcccctccctgtcttcgcccttaagtgtatcgactcacgaatccatccatagatcaaatagatcgataacctttatgtgggggaggagtgcgcgtcagctggtcgggctagcgagagttaagccatggccgatcgaagcaagcaaacagccactttgatatgtaatgtaagcactgtacagtattttaccatgaatcaaatgattagaaaaaaattaataattacttaaattttttaaataagatgaacaattaaacatgttaaaaagaatcaacgcgcgttaaattttagagacggagagagtattatattatcattattgtatgtccacatgttcttttttaggggatatgtccacatgttatgaagcgatactgtcacaccctaaaaattcaaaatatataaattgttgtttaattggaatttttagaaataattttaaaagcctagaagagaagatctaattttttaattaataaattccaatataaaatggggccagataaaatttcattaaatactttgcttaatcctttaattcctagatttttctgggatttatttgagctaaggaagtatttttaataaatggaattgcatttaaggaataatttaaattgaaaaaggttttaaaagtcttcttttggctttgggccgaaagtcggcccaaaacccttctctctctcctcggcccagttcggcccagtccgcagccgccgcgcccacgcgtccgcccgctgacaggtggggcccacctgtcagggtcgtcgtctacctccggccgccgccgcccgaaaccctagtttcgcgccgccgccgttcctttccaaattcggtcgatcctttccttctccggccgaattgatagaggggaaacaatctccgggatcttctctaccttttctcttttggaatcatcggctaattctttttggaaatcgttggattcgagttcgaatcggattcgtctctttcctccgaaccctaaaccttccttctcgtcgccagccgccgtgggccttcgccgtcgcctccgagcccctttaaaaggttccccgagctctcctctacccgtcgccaccctcgccttcgcctctcgtcgtcggaaacgctctagcatcatgggacctagcgccgccgtcgctccagccgtgcgccgccgccgttccagtcgtcgccgtcgctcgggaaggtcgtcatcgtggtcgccgtcgcgtctccgtcctcgtccgccccttcgccgtcgccgaagatcgccggagcaccgtcgccgccgtcaacccgaagagcgtcgccgcttcttcctcgtcgtcgtcgccgtccgttgatcttccgccgctcttttggtcaccggtgagttcgccgcgtcgcgctctacccgttggtgccttccgttcgcgccgccgtgccgtcgttcgccggcgagcatgcaagcccgagccgccgagccgccgccgccggtggtgacgtcaccgctgacgccatcatcgccctctcccgtgaaccggtcgtggaccgttcgatctcggccatccgttttggatcaagtcgatctcggccgtccgttcgcgtgaaccgtcgccgtgcgcccggtccaccgaaaccctagcccgctgacgcaataaatccctttttccttttcaaaaataatttattattgcgtcataattcaattaaaatcaatttaagtgttttaatccgatttaatcttcaaaaattcataactaattcatcttagctcggatttagttggttcaagtctctaaatttttctaaaattgagatctacatgttaaaaatatccacatgtactgttcatgcttgtttatgtgctgttttggtgattttgctcttttctgtttagattccgtcgtttccggagagtccgttttcaccggagaagagtttgaagagttccaaggccagcaaggcaagtcacacagatcccaaacaaccctttgagcatgttgatcccatttaaagctatggtttctattcaactattgcatttattttcgaatgtcattgggtggaattaacctattgtttgttatagcccttttgttcttgattactttattccttgataccttgggttattataattggactagttgagctttatatatattggttcaactagatattaggtatgattgcttagccatgcttagaaacattagcacactttcgggataacttatgactcactattacttaatgatggcttaatgatagttcacgatggtcaatcgtgattggttaattaattaatgtgccaactaaaacctggtaatggtgggttgtgagcacatggttttgatggtcgtgctcatgacaattaaggaccggttcacgagtttcggttgtgaaacattaaccgtgccaaccacaagccagcgtgggcaacggctttatcttttgtatagcatggttcattgcggggcaccagactgagaagtggcggagataagcccacgggggtcgctggggagtccatgcattgtttataagggggtgattatgattcaggaaggtgcgctgcggtggattgtgttatgtaaggggtattgtcacaactcctttccgaggtaccgtggtggtattgaggcacatggtgacatgatgtggggttgtgtcttgtgggtacagtggtacacctctgatcagagtaaaactattcgaatagccgtgcccgcggttatgggcgggtctaacaatgtctttcgtgattagtctcacacttctcaccatagtaaatgatgctataattggtaataatttgattaactcctggtttggaatggtacattcctggtttggagatagaactgtgcagccgggatggttgttcagaatggttgggcctatacaacaaggtatgttgtatagcgttggattaatattgtttaatacttaactgttttattaaattctcaaatgtttgctaaatgctgcttttgcaaatgaaaccctactatgccatcctttgttatcctgtgcacttgcatatttgctgcgtggcttgctgagtatgtcatatactcaccttgcaatcattcatcagaggaagagttctacaataaggctgatggtgtggaggattaggtgtaaccttggtcaagctgcctgtggagtggagccgtctgcgccgtttatcttatttttccgctgcttagatctttattgtttgagaggaactatctacctctgtaatgacattttattcgcttattaattaaagtaataattgtactctattatcaatttgttattgtgtgcctcggctgattcctagacgagggttcacacacatgtaagcgtttggaattttggatagaaattccgggcgtgacagatacggcgaccgcttggctggtgctctcgcaaaaccaatcacaaggacaacaagagtcgtcagagaccgacggccgtagcatacgccacgtggccaccggcaggcgacggcgtctcacctggaccacggacacgtgtcagtggcgttgtacacctgtgagctgccgctgccgccgtcagcagaaacaaacacaaaaggaaatggagaggccgtccggaggagcgacgagcggcggcgcgtgggcacaccggccaccgccccacgtactactactactttcagcactccatgtgtttaagtactccctctgccccgtaatattgattttgattttttcttatgttgtttgaccattcgtcttaatcaagaaactttgaaattattatttattttatttatatcttactttattatccaaagtactttaagcataattttttattttttatatttgcacaaattttttgaataagaagagtggtcaaacagtgtaaaaaaagtcaaaatcacttatattatgggatggagggagtatgtgtttacctaaagtagtactctattcatattatttactaggaacaaaaaaatgccgtcgactttttattaacatttgatcaatcgtcttattcaaaatttatgtgtaaatataaaagtatttatgtcatgctttaaaaacatttgaagataaatcaagtcataataaaataaatgataaaataagacgaatggtcaagcgttgtaaagttaacggcgttatatattaaaatacgaagagagtactgcatcagtatcatactagaagaagtaataccagtactaaacagctttgatattttcgctagtagcccgcatatatcctcagttaatttgttgctttagttaaattgtgttaagagtgaattgcaccttgatctgagtatctttttttttgttatcgtagttttactttagatcacctcttaattcatggtttttactttaaaactagggaatgttacattttctagaatagatggtccaaaatgaagctctggaataaaatatagcccaatgtataattcattaataagaatagtagtataaaaatctccatgtaaaattattttcagttgattagtactcaacaaggtatattgtgtcacgtagaccataagatattgtcttgtagggatgtaagtggacaatctcactacccatataaagcctcacttgccaattactttctcaaaactttaaaagaaaaaaaattaactagaacaggtaaaagggaaaaaaaatcccgcttgtccgcttcccttggcatctggatggtcacgtggcaggaaagaacttgtacagtagtagtacgtgctagggtttgaagtaggagcgcgtgtcaatcaccaaaaaaaaaaaacaaaaaaaggcacagcagcgagtggaaaggagtcgatgggattttatgcccaaaaccgcgagagatccaccgctgtttgatgggttcgttgggacttgggaaggaatccatcggcgaatcgccgcgcggctccgatccggggcgcaagcgcaaggccaccggcccacgtactccactactcctactccgtagagaggcgacgcgtttgcgcgggcggcgccgcggccgcccaacccaaccgtcgctgcctccgtctccgtagtccgtactgcctgtgtctgcctctgctactgctgctgcctgagagcaggtaccatagcatagcaggctacaaaccagctacaaacatattttaaaaaaataaataaggagagagaatggtagcaggctacagatttatagccagctgtagcacggacttcaagacacagtgtgtatgacagatgggaccatatattaatagtgtaatatgtaactattatatgaatgagctattatattggctatagatgaatggtagttattagttggctatactattgaacttgccagagaccaaccagctactccctcacgtgcggctggattaaataaacattaatcaattaattaattatagagacaatcagttgccacttgccaattaaggaagaaggcataagtactgtagcactgcagccgcacactccacgtctccattgggaggaaatggaaaatagtttttcttttttttaaaaaaaaatagaaaatagtgctccttccgttttatattataaatcgtttgatatttttcttagtcaaaatttattaggtttgatcaaatatatagaaaaaaagaaacatgtacaacatcaaatttcattaaatttaacattgtatatattttaatataatgtttattttatattaaaaaacattactatattttgcttaaagtttgacttaaaaaaatctctactattataaaattgaagatgtttttgccggtattctagtacatcatctgtgtatgagtcggtttttaagtttgtttgcttttgaaaatatatatccgtatttgagttggtttgtaagatcgttcacttttgtatgatacaaaaggaatcatataagaaatctgtttaaaataactcacatgctaaattgagacgatcggattccaaactttagctcatgattttctaaaaatatatatatccaagtgaactcccacagtgaattttatcttaactaaactatataattaaaatagatttcacccgttgcaacgcacgatattttttctagtactccctccgtttcataatgtaagacttcaaacattggttatattcatatatgtgttaatgaatctagacacacatatatatctagattcattaacatctatatgaatatggacaatactagaaagacttacattataaaacagaggaagtaactcataaatacggaacgaaggggtagaaatatccgcatctcatacacacacagaagtggtcagccgccgcccaaaagcttgcctttgtcgccatctccacgtggccacccccatatactattgcttaacgctgtcacctcaccctctcgcggtttgagttttccacttccacggttccaccccgacacctagcgaagtactcgtagtaatccgaatcccaccgttccatccgtcgcggacgccacgctctcggctctcagctcacgtgacgtcaaccccgccaaaacgcgttattgccgtagtactacgcctcttcttccacctccatctccccctccgacatctccagccaattccagctcagctctcgccgccctcccctctcccgccacgtgcgcgccgcccctcctccaaatctccttttcttttccttttctataaataaatcaaaattcacacaccaaatcctatataaacttcttcctctccatccccttcccgctcaaactcaaacaccaacaccttcttcctcttcttcttcttccagcagcagcaacacacactactgacatggagtactacgagcaggaggagtacgcgacggtgacgtcggcgccgccgaagcggccggcggggaggaccaagttcagggagacgaggcacccggtgtaccgcggcgtgcggcggcgggggcccgcggggcggtgggtgtgcgaggtcagggagcccaacaagaagtcccgcatctggctcggcaccttcgccaccgccgaggccgccgcgcgcgcccacgacgtcgccgcgctcgccctccgcggccgcggcgcgtgcctcaacttcgccgactcggcccgcctcctccgcgtcgacccggccaccctcgccacccccgacgacatccgccgcgccgccatcgagctcgccgagtcatgcccgcacgacgccgccgccgccgccgcctccagctccgccgccgccgtcgaggcctccgccgccgccgcgcccgccatgatgatgcagtaccaggacgacatggcggcgacgccgtccagctacgactacgcgtactacggcaacatggacttcgaccagccgtcctactactacgacgggatgggcggcggcggcgagtaccagagctggcagatggacggcgacgacgatggtggcgccggcggctacggcggcggcgacgtcacactctggagctactgatgatcgcgagttggagctagcagttttgagctcaaccagctttgctcctcctatacagctaaatactgtaggagaaattaatggagattttttccttctttattttttttatattttttccaagataaaatggctgagctggtagggagttctagaaggaggaaataaagattacgagatttgtaatactactacgagggacagcatgcaaaaaagaagtataattgctatgctctctctctctctctctctcttttgtgtggagtggaataaaatgccagctctgcttatggtcagattttcacttttttttggagtgttaagacaaatgaaagctccagataaattagtgagtgctactgcttatctgaataaatgagatcattcatcatcctataaaagaataattaagaaaatgggtgtaccatatatgctattggcagacaaaatttagcagtacttgtaagtactagaatttggtttcactttattttaagtgagattgagcacttgtttatcatgctatcatcggtctacaattagttagaaactgtagttcgcagctcagttattactggatcaaaacttcgtcctttttttttattttttgagataagggtgtttttactcggcctcatatatgcaacctttttaaattagcaaattagcctatcaatcagaaaacttatttcttaaataacccaatctaaaattcgcttctatatatatttaaattcaggacgttgggaaggtcacttcgtccttttttttaagcttcggatcagttcgcactagctggagaagcagagatagttgcaccagattgatggtggttcgatgcctacgcctacgagaataagtactatatactgtatatgatattttcctcgtactagtatcatacgagtactttgcaaaaacacctcgtatctatacgtccgtgcttatatatatggctgtatatatacgtccgtgcatacgatcgagtactcggcaatggcacgtgctgagtactaatgtaaccctaatagtaaagggcacatgttgccgagagcttaagatactcattacggggagccgtgcgagtgattacatcatgtgacgacggatgattgcacggtctaattaattatcaattatagtaggtaatccatcgattagattagtggtcacacacgcacacacacaccggccctaatcgatcgctgaattaagacgcgtttccgcgggcggcgcagcggacgacgacgacaagatgtcacgaagcaggaagcaactctgcacgattgacaccagaattgttgtttaggtggtaatcctaattgtaatagattagacagtagagtaaaggttaaggtcttaggggggtcggcgctggcgctagctagttaggaggagtaggattctgtgaatcttgtgcacgtcgctggacggctggatacggatatggtccagccagccagctagcgctcatgttgagtcaccgtcacggccaaatggcagcgaccatgtcaactttgccacgtcactccggagaatactcttaacagtggtattttcaatccgtctcaaacaacccagtattagcactatgaatttaaacaaggcatacaagggacaaatgatgtgtctgtaagggcagtcccaaccctccacctaggatgatgtctatgacattaactacattgacatgtgggacttttagcttatgtggcactatattaattaagagagagagtgaagagaggaagaaactgggtctcatgcaagacacagcttcaacacgagaacctatgtaccagacactatcaagttttttgtattggaagagaatattgtcttcataatagatgaagaattaatatggttggtagagaagagagatgatgtatttattaatggcccactttaagaaaccataggttgtagagtgtagtttctattgtgatgtcttattgacataacaccatagataccgcttatggacactatgggttgggactgccctaataggttagtatattttaaaacagagattattatagtttagaatagagttagtagcgaaattttagtcttcagcagcatagttattaagagaaaaggacttacgctgtgtttggaggtgggtgctgggaacccattcccatacacggaaaacggagcggcccattaacgcgtgattattaaccattagcctttttttaaaaaatagatcaatatgattttttaagtaacttttgtatataaactttttgcaaaaaaaaaacgcaccgtttagcagtttgaaaagcgtgcacgcggaaaacgagaggggagtgttgagaacttgctcttgcaaacacacccttagttgttttggcaaaaaaacgttggcgtatacagacacacatttgaagtattaaatgtaaactaataacaaaacaaattacagattccgcatgtaaactacgagacgaatctactaaacctaattaatccgtcattagcaaatgtttaatgtagcaccacattattaaatcatggcgtaattaggctcaaaagatttgtctcgcaatttacatgcaaactgtgcaattgtttttttcgtccatatttaatgctccatgcatgtgtccaaacatttgatgtgaccgaaaagttgaaagtttgaagggaactaaacacaaccttagtactccctccgttttttaatatatgacgccgttgactttttctcacatatttgaccattcatcttattcaaaaaaatttatgtaattataatttattttgttatgagttgttttatcacttatagtactttaagtgtgatttatatcttatacatttgcataaaatttttaaataagacgaatggtcaaacatgtgaaaaaaagtcaacggcgtcatctattgaaaaacggaggtagtagtattttatagtgaggttcacctctgaaagtctatgctttgtacttcaatgtacagccatacattctgaattagttcatcagaagacatgaagcattttattagtagtagcaattttctgtttcttaattgaattagcttctgaaaaccaagaaataatggctacagtaacacacgccttttcttttcagtaaaatcactgaaaagggttacgctactactacagaagaaaacagctgaattggtagcataactattggctatggctaacggctgtaatttagagagcatgaaagggaaatgcgcacccgatgagatccttcattccttgctttctttagttctcttcttttgacgacagctccagaagatgttctgcctccctcaagaacaactttgtcagctgcttttggcctctgcggtacactatgcacgtcctaatatttacttttgacttggtctcgttgctctcgtcacttctgtgaaaaagacaatgagagtaatggtgaaacacaaaaacaagaggtgtacagatggaaatgtcaagcatgatagtgctaatatgcagaaaaaagtatccattaagcaacgtcaaaaggccctacgtccctacctcgttgcgtcttctgaatcactgagatcgaatttctcaagtagttggctgtcagatgcttcagttccagtgccctcttcaagttcagtcattcttgcaaaagagaagggcttgatcaataaattattgacaacgccatagaaaaaatacaggtacactgacatcgaatttctcaagttgtgggtgtgttacttgactctaagaagatccacaagcaaactcagtgctccattatcaccactgacctcccatatagcactccggagctcatcatctctatcttcattagatccaatctacacgaacagattcaaaggatttctacaatcaatttaccatgaaataaatatgctcatacagaataatgctgaaaactagggaaaataaataatatgtgaatattaaggtcatatcagaaaatgtgaaactagatagcctaaatgcttcttgagaagctttcttaatccttttagatgagtaaaacaaccttttttatatcaccaagaaattatgattgatgatgctgccaaaattagtaccatgtgtgataaaattttggactcatggataatattttagtttgaaagcaaatgcgctaattttcataaatactgtttgccagcttacagtacaagtacaggaggatactggttaataagacaactctatggtctgttgagaagtggttaatatcttattaaccagtatccccaggcattagtcccctttatgaaaaagatattaaccacttctcaacagattagatggttacgaacaatgtcatgtaaaatttggggtactaaaatgtcccaaaggaaaaaggaaaaaaaaaaaggacagggcaaggcaatgtcacatatgcaactgatgcctttgaacacatggtacagagtgtgaaaaacactaacctctccaagcaatgaagcggtatgctcaagctcatgttcttgcagagcaattgtacgcagggtacttataaattcctgagagaaaacaattttctcgatatatgatggaaccttgcgttgaccactccagctataactagaaaaaggacttgtattatttttgttctccttgttttcaccagaacagctaccaaaaaatccattttcaagcaaactacgaggtaaaagacatcgcaattcggcattctgtaaacacagaagatatggaaagtgagacccgtgatgtccaaggatacttgttgggcctaaatttttcacaacattcttcatatcgtaaataaaaactagagctaagaaatgttgctacctgtatctccagtagcttcatcttaatatcagcagattgaacctgtcgaagagcttctactggataatgaatctgcatttggaacgtttgttagctctagtttttatttcaaacaagtagctactttcttaaggaagtacgccaaacggaggaaatatcaagtataagccatcttatcactatgaacatgtggagcacttcaaacaatcagcaactttgataatgaaaaagggtgggtacatacgatttcataatttgaactaaaagaaaggagatattctcagtgaataatggttttcttatcttttaaaatgttaactaaaagtttggtcctttatgtatcccagaacaccgatagagttacacttacaatatttagctggagaacaattaagtaatggctacctacaatgtttcaagacagacaagtgctttgccactataatgtttgacagaaagagaatatctggcagggaatatgctaaacaaagaaaactgagttgacaaacacctgttgctaaaagtaatctcttactgagtgttaccatgagataatcgtcaggattgttgtcaattacaaatccatagaggtatagtagttcctgcaagtaaacaaaactatgtcatttcatcagcaactatatttcagtaatcataaacggtatgaatatttgatgacatttaatcattttgtagtttctcggaacaaaagactgcagcgctgcagcttcttttcgttgactattgagtctcaaagtcatctatcagttagaagccccaaagtaagattattttatacttcagaacattagcaagtgtgtttaatgcaaatccataaggaactaaaggatatgtgaatccatgaagaaatcaaatcaaaccaggcccagtgatgaaacaaagggggccatagagctccaagaagttcatcaccgtcatatgtccttcctcttcttttcttttttttttaaaaaaaaagaatggccagggtgacggcactaatgaagctttcctggattgtttgtctgaagtgcaaccaatatctaaatgcacaaatcaaaagaatcttcttgtgggtagttctattttggctatatatcaataatgcccgtatcagtatatagagaaatcgtgacagagaagtcagaatgagtatacacgaaaatatgaaacagtgacatcaatccaagtcacacaataacaagtacgataaaactaagagcaacaacttgagaaaaataacacacttgcttataaactagtcagactagatctgcacatatgtaactatgtgagtaatacctcatttcctttgttgccataatttatgcagatctctgtttcagccttcacaaagcttttatcagctagagggagatacaaaaataaacagtcataaattggaactataatcttatatcaaaatatttgattaaaggaaagatcatgaggttctcttatcaaaaggaaactggagctacttatgtacctagtacaaggtacattgaagaaggacatccagtaacatgtcccatggaatcaacttcccatgttgccagcgcctttacatctgaaaaatatgatatacctatgtaagactgaaaataacatgttttttcaatgagtatttattttcagtacaacaattttttttatgtaaatccttgcaaattcgcctacagttttttttttgtcaaaagttgaatatagaatgatctgccaactagatatttcgtctatactacataattcataaacttttattagaactcttactatgattacaaaagtcgattccagggacaaggccctcaacccaaattgactctgtattacttgatttaggattatcattgccactgatattcttagctgtaatggcagtcccagttccctggaaacaaacagttagcatgttaaaatttggaacaagaagatatgggtgaacaaattaattgaagtattgagatgttaaaaacaaatacaatttggcataattataaacaatgatttgtcagataagttggatctatattcacgagattggcaaagtatatgatgagtcctcaaaagtatatggcgtttccttgaggacaaattgtagcatgtcacaagtatattttgtttaagataattgtagattactgctgtaattaacaaaaccacaacttataatataaaagtcatttccctgtttccgtgttataatatccagttatgcaactagtttgttcaacagaaacatattcttgcccccattcagtttctttttttttttttgtggcacataccttgagaccactatatgccttcagtaacagaatttctctgttggtatgaaaaattttcagggccaagaaaggtcctatgcgatgttcctctctcttgacaacaaaattccattcaaggtcctatgctactctttcatgacaagaaaaagtcatgtaaccaatgtttaacctctttttcacttttcagataggttgtacatgagcaaaaaagaaacctaaatgaccacatataatcgaggggaaaaaattaagccacacacaataagtaaataaaacaattgagaagaacctctgaagctaggatctgcggtcagaaaaaatgcaattaacctgaggggcactgagactagaatcaccacaatcatcaccaatgttggcccgcttttcgtctagtgattccggaaaaacataaaaacgaggcaatggtatattcaatgctcgagtccagaatattgagtttgccctgccatagagtcgtgctgctgagttacataaaacaaagaaagcagggaactgaaccagcaactatgtgaaggaccctgcatcatatgtgtatattgcatttttcatttgttgacataaaactgttgttccaagatatttattgaaggagctgcaaatcaaagccatcacccaattaagtacaattttcttatgaatgagctaatttccaccttgatggcttgaaaattgtaatagtagcaaaggttagttgatgctaggtacaaaaacatccccaccattttgtaaactaatgcctaatttgtccaaaaaaaaattagcacactgaatcttttgcacacgaaattaacatgatatgccatgtcaatactatgaaactacagtatcagtaaggcttatattattccccccaaaaaaatgtaagccttataatatgacattatcactgcaaatgcaaagcataattatacataccaaaggaagtcttcgaaccgcacttcaattgagctgcaaacaatattttgatagtattactgttaaataaaacgaatttctttgtcagtaaacatatgatagggagtcatgagaattagccatattggtatatcattgccatactagacagtaaaaatcacaaactcggtaggtgggcatacagatgtataacagaacaatatttgagtgatattgcttgtggattcatgggttttaagtacgcacagaatcaataaacaaaaatcatgctggatacactctacttagcactagaagccttcacaagaaaatattcatttaatagggttggctgaaaagaatattcagatcaaaatatttcaaaggtacacaaagcccagtatacagtgcattaaaatgatttctaacgtatttataagttaaacctatgccatgtcaacaaaattcataaatgttctgtaaaataaaagtagcaatttatctcatagtgcagcattgccatcttggtgattctcatttctataaaattaaataaaaacataggcgctatcccagatgacaacaaatggtgcactcatacacatgaagatatggaacatgcgttaccccaaatcactttatatgagaagctattcttcatatcatactttggggtgcaatccccatgtatcgcagaaccccagtacagaagtgtatactaaaatgtaaaagaaactatgcatgtgtgcttgatacagaaatatagtgataaagttgcagcagcgctggaaaatgatgcgaaatcagtacaaaccttcctgattcatcgacgtttaagagctccccaaccagacctttaaccttattatcgaataaggtttgcaatgacttcctctgaaacaaaattgcagcatgttcgtttaaacgaatttgctcttggctccccaaaatatccccaaggaactgaaagaaaaggtttgcactactgatgaacctgcatcacggttgcccggtgaagtgtggtcccttccaactcagcaagctcatcttcggtgaaccaaatggagcttccgaaggtgcttggaagcatatccaaatacctagagaaattaccaaaattcaatcactgatcaagttgtttaacatggagagatgtggattgcgaccatacggcttccagagggagctagggcggagtcgctcgaccatgaggaagagcatgacgaggaggcggtcgtcgacgccaccttcctcgaagagcgcgcggcaccgcggcccgacgagcgggtcctgcagcacccgcatcggagtgatggcgagatcgagcggcaccaccatcaccacctctgcaacgagacacagccaacgcgcgagtcagcgcggaggacgagctcctaaaacctccgagagaagaggtggaatagcaaatgttaccgtcggtggcgccggcctcggcggcggtggagaagacgccgtagccctcgcggccgcagcggcggatcgtgcagccgcggaggtcggcgccgttggcctgcggagaggagccaggggtttagggatttggcgtgcacgcgagtagaaggggatgtgcaggagggacgaggagcaacctggagccattggaggaaggagtctagcttggcgtcgccgggtactgctgctgcggcggcggcggcagccatggtgttcgacgggcggcgccggcgcgggcgaagtggaagaagcggtggagcggcatcgaggaagacgacgacttggctgggccgtgggctgggtcagcgaccaggcccaaaggcccataggatcacaaatttgtagatactggaagactggaagaggggacttgatcataaattggtaatcacttgatccaaatatatcatctcttgagccatattttttctttgctttatagtagcaaatacgtcatctctatccaataatcactatattattcgatcatcttttcataatgaggtatttgaaatgtttcttgagctaattacatgggggtcaacttcggtttaagtttgtctgcaagcattcaagagagagcatggcaccaagctgatgttgatggatggtattagtgataagtagtgacaagtgcacaaaggagaccaaaaataaggaacacattcaacaaacagaaagcaagcacactactcggtaatctactatagcattatatatcatcaggtccacgttacattctaccactcacactctcatctcatctcatcactcatctcactcttatctttcagcttgcatcgcaggtgcaaggaggaaggcaagagactagcgaagcactctcacagccacaggacacatggtgaattgcacagataaacaaaatgctagcacaccagcgaagcccggagcgagtgcgtcgtcgacaggttggtgcaggacgcccaccgtatcaccgactcggcgaccgccacatccaggtgctcgcgctcgccggcgccgatggtgtggttcctcctgctgttcatgccgatggcgcgcgacgggttcgcccttacggcggccctcaggacctccgctgtcctcggagccgaggacgagacgagggccaccaccgtcgcgtcgcagtgagctttctcgcccaaggcgtcaccatcaggcgacgactcaggctcgccgggttcttggccgcagaagaaggagaagctcggcatggaagcgaccggggacgggaacacggcgttgcagggttcgcagacgccaccgaaggagaaccccgagagcgcgcacgacggagcattctcagcgacaaatgcagagaacgatgatctgcaggcgaatgtgggggagcacgcttcttcagacatgctttggcaggcgaccgggccaccggtgttgaagctcacatcgcggctgcatgacgccagcggcgtcgagaacgaacatgagccggcgtcctctcctctgagattgatctcatggcaatgtccacaagaatcttgggattggtcggcatgatcttgtatccaggaatgctctgtgtaacaacagttgtttagattactccacatggcaagcattacaaaaaaatggggaaaggaatcattagcagctgatctgtacagtaaggtccgggaatgatgcaatgacaaccaaacaaaagattccacgaaggatgacagaatgaaccagcacaactaaaggaatggctacaatagacaaaaggtgatgaagtgccaagaaattttaaagttcatctgtaccacagtggatctaccagaacatgaccctacaacaaactgtgatgcaacccagctttttcccccagccgtgcaagtttaaattagaccaccaacttaagctggcactaactcagtacttagcagccaagttttgttaatttattcaatatgtaaagtaaacaaggctaacctcatcaggaaaattttgatcaatttcgatttacaattccagttacatgcatgtattaatagtcagtgagcattttccatcttaaaaaaaaaaaggcagttccaagttctcaatatgatgctagtgatgtagaacaaggacaggaaattgaaagtgtgtggtttctgaaaagattgaggccgtgtctcacctaggacctgcttggctgtgagcctctgtcgaggatcgcgccgcagcatctcggttattagctccttcgctgaatcggaaaccttgtcccagggatcagaaggaaaccgcagctcagtcgacctgatacattcgaaaatctttgatttggttttcccccaaaatggggggatgccactcaggaggatgtaaagtatcacacccgcgctccatacatcggcagcctcattgtacccaccggcgagcacctcgggcgcaatgtaaaatggactacccaccatgccactcaagctccgacctgacaaaaccgaaacccaattcagcttcgaaacaccagccttgacagagagcagccacgaaattgctcaagaattcccaattataccaggctggatgtaggttgcgaggccgaaatcggcgagcttgatcggcgaagaaggcgatttgctgacaaggaggatgttctcgggcttgaggtcccggtgcacgatccccttgctatggcaatgcgccacgacctccatgaggtagcggaagagcgcggcggcctcgtgctcggagaagcagccgcgctcctcgaggcggtggaagagctccccgccggcgcagagctccatgaccaggtgcacggacgcctcgtcctcgtacacggccttgaggtcaacgacgttggggtggcccgagaggcgcgccatgacctcgatctcgagcttgacccccctcacgtcgtcgggggacacgaggcggtccttggcgatggacttgcaggcgagcgcctcgccggtgaccatgtcggagcacgaccggatcacgccgaactggccccacccgagctggggccccagcgcgtagcgatcctcgaggcacgacacgtgcgccgcctccagtatggcgccgcgtagccccgccgccttgtacgagttgtacttggcgtcgccgccgccgccagcggcggccatcgcccggaggtcccacacgctggaatcagacgagattctccgctgaaatctctcaccgactccccccccccccccccccacctcagtgcatcatccttgcttcttcggccactgaatctgggcacgaacacaaaccgagcagagaaaatccaaagctttttagcgctctcgaaaccccaaaatcgcgggcttttccatacaaatccccaccgagatcattccccggaaaaaaaaacaaaacgaataaaaccgcgtggattcaggagatggggggagcgccgcgaaattcaaaattcccaccagggagagaacccgcagaccacgcggccgccgcaccggaggaggaacccctcctcctcctcctcctcctccggtgagagagcgctccccacgagcaagtctccccgcgactcgagcccgcgcagatcgagcacccacccacccttgctgctcgacgcagaagccaaaaccaaaaccgcccgacaaaacgtccgacagcacgtagcggaggggggagagtcgacttacccgcgcgcgctggctgctccggcggccgagcggagtcgccggcggcgaggtcagcctccggcagcgcgaggcatccgggtggggcgagagagagagagagaggggtgagggtattcgttggtggggggagggggaagcctttgctttttgataggtggtaggagaaagaaatgagcatccaataacaaggccattaattaattaattaaatcattgttcatcttaaccctaggttttattttaaattgctctaggtttggctttggagtttaccttagagacttgttgctcttgtttgcttttgttactaactggagcagtagcagggtttcccaacggttaccgcggtaaccgtgaaaaaccgtacaaaaccatgcaaaatttatcaaaattttaatttattttttaaatttatttgaatttaaggaggttaccgcagtatttatattaccgtaccctcgcggtaagcccggtaaccgcgcggttaccggcggtaagtcgaaccctgagcagtagtactctactcatccctccgcataaaaattgtagactacgaatctggacataataatcttaggatggagtaagacgatttattaggataagattttgataaacaattgttctactaatatgttggttgtttatatagtaacaaattacgatcataagcaaatacttttaaatgtagatataataacatcaattttatgttggttggttaaatgattgttctaacagagtgaatagtatttgttgttgactctagaagaaaaaaatgattttcgccagactggttagttaggaagaggtatgaacgatgatgtatgagactttgaattgttctaatgtgtttggttggtttgaattaggtgcagcagttgtggtaaggtcttgtctttttttcgaagtacaaattatgcgtttcgggatttgttttttttttttttgggggggggggggtacagaccgttagacaccaatacagatgcagtctgtacttcgagtattttttttccctgcgaccgtattagcacataggagtagtataaggtactagtatgtcaatgcatgtaaagttgttaaagactgaagaaaatgagatgtgcaatttgacccggtagtttgagatacactcaagtgtagtgacactctttctacaactcacgcaaaaacataggtgaaccttcacaaatcagtaaggatatgcaagcagctagcgcatcctggtacaaatcactcaaagttattcattctataaaaaaaataatcttatgtttataaaaaattccttctgttttttccaatgtcgacccaattatatgtcgcaaaaggagtcccaaaaaactgcaaatgcaaagtaggacagaagcaaaagaaaaaccagaaagaaagtaaacacaaaaagggcccaatctcctaaaaatttgttgtttagttaatgtggtgatcatgccgatgtgtgatggttgccctctttgctggattggtttaaggagcactacaagttgtgcctctagtggggctacaaataattgttcttaagcaatgccatttgcatgcctttatttttttttttgcttattattttttgtccttgttctttctgttttgcaagtgattgatcaggggaaagaaagatctaatgcaatgttgtgtggttggctggcctaccagagtgggaaagcgacaggagggcgaaagagagatgcactgcatttaatttgcttccttctggtttcaacgggttcgtttgcttgcgtccatttcggaggtggaaaaatgaattagcacattccctagtcagaccagctagccgtagccaaaaattaaaatttgaaacttaaatttgagttgattcttaaaagttgctaagtacacatatcttaaagatttacgcataaattatttttgttgctaatcatgcttaaccaattaagattttttttaacggtcagacccgttgctgatattttatataaagaagaaggtgccccattttaagaggtaagtgggactaacctagtgctcagttaattagagaaagtgagcaaaaaccacaactgcaacaccacaccaatatatagctaacttaagctaccgcgacaaaacccaacacaaggcaattaagatcaaggatagagtaacctaacaaggataatgttgaagtgcatctacatatgcgtgagtatatacgacagttcaaaggaagaaccatgaaaagttgaatttgatgaatgtgtcgtttatggatgggatatgagccgttagccaaattaactccacaacatggctactaatacaagcaagaagagaacatatatggaacaaacaaatgatagcgacaacactaggtcttattcatgaaagaaacggcatatatagcatactcaaaaaggagaggaatcatgcaaagtttcaacgtagcactagtgttttcaagccggagaacaattctggtggtgggctgcaggatgatggtgtctctaagatcctggacgttggtgagtgttggtcggggtccaaagtggagcaacaccatcattatctcctaaaccgttttttgattaagaaattaaagatagagaggctcaatgcaatgcaaggaatctggaccctggaattatatggccagtgtggttgcaatttgcattgcattttgcactaggtgaaccactagccgaagcttcccacacgagctggtagctagctttgcccaaaaggttagcccggattctttgttgctccaaatcaaggaggctttccgtgtgcacggaaaaaaaaaaaagctagtaatgggtacgcgtgtgtgtgagagagagttattgtttatgcccgtttgttaaagctactccatcggataatgtgtgtatctttcttcgtgctctcatggatggattcgtatcctctggcttgacgtagcaatgtcactacgtgacattatttctatctaaaccatccgtttgaaatcaacggataatatatttgagcggtaacatgtgttttgttgataacattccgttaaagccgtatcgatttggcgtattcaatgggattatgctctttttagaaacttgttgcataaaaaaaaactcataactcaacttagggcttcttcggaatacgggaattttataggattttcagagaaaacagtttaattcctccaaaatttctatgaaaatcctacaaaccgaatagatccttagtattgaagtgtgaaaaaaaagagaatttcaccacaaaatttaccacacattgtttcatcaatggaaaatgaaatataccgtttgggatacctaggacgacattcatgctaacttatcatatgctttactttgcaaatactatgtcgatctcgtgcaggatatatttcagcaggtaacatgttttcttttttaatacactttgttggtgtgtggatcgagcgtatttgataagggcattgtttagttttccccatattctcaactttccatcacatcatatcacaacaaaaactttcctacacacataaaattccaactttttttccaaactcctaactttcttcaaacttccaacttttttcagaaactaaacacacccaagattattctccttctataaattctctgtccaaaacctcatgacactagtttgtcctaggtttaactttggcaaatgatatgtgaatgcaatgctctaactaaagagtttgtaccttgtactctaaacaaaccatttctcgtttggtagagtagacgacaacagctcagaggtatccgtacaatcatcagctccgctagccacgaaaccacaccgtacgttgaccactcatctgtcgccacctggcgcttagctggtctagctgtctgtgaacacgcagtgggccccacctgtcagatcctcggagtaagtgtgtaatgaatgatcttcgctggaatgtcaacggtggggagtaagtagatgatcacggtcggttgtggctgccacgtgatgtgattagatggagctgagatgctgatgtgtgtgattagtgggtaggattagtttgttcatcactttttgaaaaaaaaaaaacacaccgtaagttgtggaatggatccgttggccttggcctttgggccgttgacctactgcatctgactttcctatcactcattttttttattttttttcacatgtttacttttgtttttggaaggttttatactcccgttctaaacaaatcaatctatccagatttgctgtattaagttttatcccattaccatcatgattgatttattttgaaggacaattttactatcattgagaatgtgtcaggaagtatcatactttctaatgtaaaatttgatgcatccaggtactacagctactatgtactttgaggtaaaaaaaatataaaatataggtatctcgagataatttttaaaggattatacaatttctctattttgaaacagagggagtacgtgccttgtgcttagtaggtcatgcttatgtcatcaacatgcatgcatacagctcggcccaggcggcaaggcctatctggagttgagatgtgaagcccaaagtcatatcaccccttctttgctgtttgaaattaggcctgcttatcatgggctgaaattcttcggccacttcatttttcttcactttgcaggcccaacgattggaagcttctaactagagattttggcccgtttgtgaaacgagaaccaccgtcacatcttacgaaaacgctaatccgcgacaagtcgcgcggagcggcggacggcgcgtgtacggtactcttttttttttgtttttttctgttttcttccagcgcgtgtacggtttcttggttttcgttttttctgttttcttccgtatttttggtttctttttctttgttttcgttttttgttttcttccgtatttttggtttcttttggtttctttttcttttttatcgttttcagtttttttcggtttttataaagtttatatacgtgtatataaagtttgtatacgtgtacataaagtttatatgcatgtatataaactttatatacgtgtatttttttatttttatatgtacgtatacaaagtttgtatacacatatataaagtttatacacaggtatacaaagtttgtatacgtgtacataaagtttgtatatgtgtatacgaatatacgtgatgttttttttagtttttttgatttttttaatatgtacgtatacaaagtttgtacacgttatataaagtctgtatatatcatatataaagtttatacacgttgtatacaaagtttgtacacatcatatataaagtttgtatgtgtgtatttttttatacataaaaaatatacatataaaattatatatttttttatagtagtatactagtagtagtactagtaatagtagtataagtagtagttatagtactatagtagtagactactagctaatatagtagtactgtagtactagtggtggtggtcgcgcgccgggggg

SEQ ID NO: 7673 - DNA, 7002 bp, Oryza sativa
cgcgtggcgagctctccagccttggacctgggaaggggaagaagaggtgcctgaagtcctcgtctcgggtccccgcacgcaccggtttccctagtgcttcggcgacggacggtgagggcgactgtagggcaggggcggcaacaatggcgcggtggtggcgacgagggaaaacgaatgagggagatggggcgactgctgttttataggcgcggggtggggcatcgaggagaaggaactgacattggggcggtcaaggggagcgagctggcggtcgtgctcggagctagcggccaaacagcagtggaggtgcggtggctgaggttggaaaaagagaaaaagaagggggaaagaggagcttgaccatgccgtttcggggagggagagaagcgggagcgagagctctggctcctggttttggacgggtgcgggtggagcggcttgggcacgcgctgcagagctccatggaacgccatggataggtaggtaggtcaatcgatggacatacatatagttggatttgagaaaccgatagttagttcgagtaggttgatagagcgataggtagataggtcgatggatagatagatagatgggtagatggttagataggttagataagcggatagatcgatcgatggacagggaaggattcagggagggatttgacattctccgaatccggagaagtattggccaggaattcaaggaccggattgaattcccgtgtttgatttccgaagttgaatgggaattggaatcttcgggtggaggattttgatggcgatgagagggaataacaggatttcaattgagatgcagggcatgacttagactcgcactcaaagaaagaaaattttcgcaattaggattttctcaaactagtttttaacgtctcacgaaaagcggagcgttacactctctctcccccactcacttttctctcccacctctcccctcctctcccatttttccactcctcacatcccgacggtgggctcgagttggcgacgacgggagcgggagagcagtggtgggctcgtgcgggcgcggcagatcctgtgggagcgcgacggcgggtgcagcgacggcaacggcgaatccggcggtatggagggcgacgacggctgccttggcaaggtcgggggatggcgatgccaatgaggagaggcggtaaatgggattgttggaattttttttcacgatttttattttcgtgtgcggactacataagcaccggcacacaaaaatccgattttcccgtgtgggtgcgtcacccacatggaaaaatgggttttgaccgcatgcaaaaatgttttttttatgtagtgttcctaaatacttcttcatgtgattttgaggatagattgctacctaatgatttaattatgataagaaactatggagaatactagcgagagagaggttaggagatggataaggtcacacaggcgttcaagtcaagttggagacccaactcatatcaagttcgagtctacctcggctccaagagtagtctgtgctaaaaacatcgcctaggtcatgttcggactccattttagacgttctacctatgtatggaaaactaacaagaccacctttccgatgggtttggtcttccttcgaagtcattggggatcgtcaaaacaagtggtgtccagaatctgtccgagtgctgtgtcaccatctttttgtaccgttgggccatgtatcgtgttggagtccaacagggacgcatccaggggtttttgatcgaccgtagaacctatatattcagtagttgttgtcgagttagggttgggttttgcttagattatttttgcaattgcagtttcaccgttcatcggtttgtgaaaccccgacatcaagttcttaatcaatcctctacatttgtgttgcaatattcttattcttgcttgtgtcttcgattcgcacgcaaggatagccttctcggcgaggtcaatcgggtttggcatggttaataaccagaggagacgtggtgctgctattacatggttcatattatgttaatcgaaagtcggatcgtgtgtgccaagattttgccaattcgatagatctctacttgacggaagattgggcaccccattatcattataaacttttcccaaattactttttgaacaaaggatagaaacaccattgaatctatgaaattcctttacaatattttttgctgatccatgtggaaattttggaggaaagtcacgacgccgcccggttcaacctcctgaaaaatgttttcctttgactttattaatttcttgattcctgcatctatctgcggtctatgtatcatgtatttttcttgtattttgtacttctttgtttttttcttattcatatattttatccctgtgttcgacatgggcaattcttgataaaaaaaatgcatatgaattttctttgaagcaattctacagaggactttgaaagcctcatgctagatcaattcctcaagaacattgtggagaaatgttattcctatgctatgaattttatttaaaatggttgtctatatccacgtagatgcatgtagaaactggtgggtttttaatccaagcagttttaatccacgagttttcttccaagcagttatacaaattaaattactcgcatataagaattatttttcattgtattcccctagtctttctcacaagccacaaaatgcttcaacccaaaattgggtgatccgatcccctctaaatcgacatgggctgtttgcatgttgatccatcatgaataatcacattctaaaccattcgcggttataaacaaccctacttcgtttttgaaaacaacacatccaaattaatcgaaaaaaaaatccaatcatacaataatgtgtttttcctataccccatttatgacacaggcgagttgaaagtagaacccgcctgtgtaaacattggccaagggatggaccaatgggccacctgtgaagaactaacttagaacacacaaacacatagatctacaacaaattatgaattatatcgagcaaaacctctgccccttagttggtcgagcaaaacaaagcccctctctattcttcccaattgagctggggtgtgagagggaacgtgcatatatattatggacctagttttcccgattgagctgttggttatgtaatagatccaacacctgtaagctcataaatatagccgtgccagggctacttcataccggttcataactaatattggcatatataagtcgtgcaagactattcaaggcccttatatatgtggaagaggttatggaatcgaatccctcacatgtatgtgatctgtgatttttttttctttcctcgcttgcatgaaacttaaagcaaatctaatagtttaaaattacgtgaaagttatatataaattacaatgtaattgtattataattgtactatatttacatctattaagtttttaagaggaaatttgtagataaatatgtaacaaaatgttacaccgttattagctcatgggcaccaaaaaaatcttgtggttatgtcatccgcagaaggctccatcgtcgtgtgtctttgatgtttgtaccaatcaattaaactagatgattcccgcgtgtgtttttctacgagatatataaataaatatatgttaaatgttgtataatcatgaatagaatggagtgaaatattttaaaaatgatttgaagataataattactatgatgtggtatgtttgcatgctagcttttagaattaataataaatactatgcttacctattgaattttagatgtttagtgggtcgtaactttatagaacgtagaacatatagataaccggtatcctaattaagttcaagttcaacatgtcatcaagagtatatatatattcattaaggtacgtggaattatacttcctccatttctgaatagataatgttgttaacttttagacgtatatttgactattcatcttatctaaaaaatttattgtatccatctcatagaaaacaaacttagtactagaaagcgtcgatatagtctatactagttatttatgggagtgtgagctagtatgtaattataatttattttgttgtgagctttttatcgctaaaagcactttacacatgatttatttcttagatatttgcgaatggttaaatgtgtatgaaaagtttacatagtcagctattgaaaacggaggaattatgggcttgtttagatcattgatagaatttttcaccctgtcacatcgaatgtttggatgtatgtatggagtattaaatataaaaaaactaattacacagattacgtgtaaattgcgagacggatcttttaagcctaattgctccatgatttgataatgtggtgctatagtaaacattttctaataacagactaattaggcttaataaattcgtttcgctgtttataagaggaatctgtaatttatcctgttattagtctatatttaatacttcaaatatgtgtctgtatactcgatgcgacacgccaaaactttacaccacttactccctcggtaagaaaaaactcaaacctatgactgattatgtcatatcacattcctaggttaatttttttttaacgaagtgagtatgtttttacgctgacttctaaaaagtgagacgcctgcgtacggcctgacggtagtacaagtactcgatagaaccgtcgatcgtaaattattgaagagtgaagaaaaaccccgtgcactgcaattaattgtcgtgcatccctccctgccattgcacgttgccacagcagatggtccggtcggtccacctcccctccattggtgaatgacaagggcacgttggtgggtgaagtgaactgagtttatcgtaattatttgagggcctaaaaagaataataaaatttcacttgaaaattaatgattttgatttaagaaaagttttaaaaggaaattctaatgaacaaacttttttttaaaaaagtatattatttagaagcttaaaaatggtgactccgataatacgctagctagctattcccttaaaaaatgccctattatttgatgttcaacttgaagcatgcaagatatgcgggccgggcccaccaaggcgtgctaggaagaaaaagcatacaggtctggttccactgcagtaatgcagaagttcactaatagtgaacctttacattactgaggggatctggattttaagcgcactttattacattagataatatactcctccgtttcattttaaacgtagctattagttttcatgtccaaatttcatcgtctattttatttaaaattcttttatgattattattgttgttgttattagatgataaaatatgaatatatatttttttaaaaaaaaattaataagacagacgattaaaattggacacgaaaacttattgttgtgtttaaaatagggcggagggagtatatcgcaaaccgatctatcgtcggcggaaccagaatcagccgtacagataagtggcgctggtcctggtgacacgtaaacgaatatcgtggagaggcacatccatgggccatgccacgtaccgtcccgtacatgcatgtgcacctctggcgacattgtgggcacctcctggctcagaaacggaacatgctatactcgatcgatgacagttaataacgtgtggggggaagaaacgtgttacctctaattttaaatagtgaatttttactctctaaacctgttcatctatgttacccatgtttctaaactcttaaaatatatttagagtaatttttgttgaaacccttattttcataatcaattatgactttaccttttttttccttctatatagccatatttacttttagaggcaattgtgtctctgcccttgctttacatctcaattgtgattttacccatactttttagggtttgtgattttgcccatgctttttttaaacagggtagctgcctgcccctactctgttaactgatggtaacggtattaaatgtgtggtgaatggacgagtatacccctgacatgttttggcttgcacaggatacatgtttcaagttaattttgagcaaatttcatatgggaaataaatgttcacaaattttgtaaaagttgatagaacacaatattttggataattttgatagaactttcgcaataatttgaacacagtttataaacgatgtcagaacaatatttttgacaaaattttgacagaaattcatcaataatttggacacaaattatagaagataacagcacactatcaaggacaaaatttcagcaataatttctgctcgctgcttgctagctcgctgcaagcacacttcctgctcgttgcttgctagctcgctggctgcggggccaccggccgtggcgtctccctgcgcgtgcaacaccgcggggccgcgccgacacgccgacagagccgcgccgctcctttccgacgctcctcagtcgcggggccgccggccgccgcgcctccctgcgcttgcaatccgcggggccgccgtgccgacggaaccgccgctccgcagggccgccgcgccgccgcgtcgacggagccgctgctcctcggggccaccgcgccgcgcctgcccacgcccgactccaccgcgcgctggcccgagccgccgctcctccctgccgcgcgccgccgccgcttgcaacccaacaagctaggtttttcgattggatcggggacagcaaggtttggggatttggttgtttcattgaagcaagggtagaatagtcattcacaaattataatagcattttctttgggtgtagctatatttatggggccatatttttcatgaaaaaatagtcggcatgtatttacattgtaagtccctaaattacatatgtaattttagtgtatttataatgtaagtctaagtactaaaattacatatgtaaattcgaaaattacatatgtaaattcgaaaattacatactaattacatatgtaagtggggtgtaaatgaggtgtaactactgtgtaagtggctgaaaaaa

SEQ ID NO: 7674 - DNA, 7489 bp, Oryza sativa
cagtttttatatatcgtatcaaccgccaccgctctactcctttataggcctgttacttgaattatctcatcatgtgttttaaggtgatcttttctttcaatagtatttattttttttcacgaattttagttatttataaattgtattcctaattgaaatatttcctattttttttcaaatttcagaatttatttttttcagattttaattaataccatatagtgttcttttaatattttttttaattttagttgtttcaaaattgtattcctacttaaactctcttttagtttttctaattttggatattattttatttttattttgaatattaatcaatctcgtattgggttcttatatagattcttctttcaatattgcttatattaaatttcgaattttaattaattttaaattgtatttctacttgaactcttcttttaattttgctaatttcggattttatttttatttttattccgaatattaattaatctcgtattgggttcttatatggacccttctctcaatattccttatttttaattcatattgaaatttatataaatattcatattgtattttatgtacgtgttagttattaattatttttaatatcaacttttagttatttctaaattatattcctatatggactctagactcgtctttcaatattttttttaaattccatatttccgttatctgtaaattgtatttctatatagactctaggctcttattgcaatattatttatttttaattctgaatttttattatttctaattgtatttctatgtggactctaaactcgtctttcaatattctttaatttttaatttcgaatttcagttacttctaaattgtattcctatattgattttagactcttcttcccatgttttttttaatttcgaattttagttatttgtaaattgtatttttatacaaactctaaactctacttttaattttattatgtttattccgaattttagttagttttaaaacttttattatgtttatttcgaattttagttagttttaaattcctatatggattctatactctacttctaatattccttatttttaattccgattttcagttatttctaaattatatttctatatagactctgtttttttttctccgattaatatgagaatttctagaccgtgggagcgaacatggagacttttttttatttctttaataagttaatagattaggtgcacgaaccgattgccgcatgagatttttgaggttgtgtgcgagctgacaactctgttctgtcatgtaagcgcgttgctcgagtggaccaaacccaccacacattctcaaacccgttagccagagatcaaaatctaacataccctgcatcttaaaatggtttttgttaaaatatacaaggagaaattgaagaattgcggtattatttcagtacagcacgtaaatagtaagaccccttcccactttatatgttgtgcgcaatccgactgggctgggccggagataaatgtgcaattgatggctgatttggcccaaggatagcattatcaacaggaataagttcatatgagatctcttaacttgttagcgaatccgattttcgtccttcaaccggaaaaccggatacaacaattcctcagctgtcaaaaccggtgcaaaataagtccaaggaggtttggatggcgattacagttgatgtagctgctatgtggttaattttactcggtcatcctctaacgtggcattgacatgacgcttacgtggcaatttgatttggaaaataataaaaaccctgggcccacatgtcagtacccaaggggggtgggcgaagcatgcaggggcagcaggcgagagcggcggtggtagacgagagtggtggcggcgaacgagagcggcggcagcagctgctggcgccccgtcgccacccaactccggtgacgcctgccccctgctccgcttcgtgaggagatccacattgacctgctccgcttcccggggcggcgcgaacactacacgagcgtcggccgcgcgtgcccaccattttgcgcgtcatcccctccgcctctcgccgccagcgatgtcatcgtgccagccacctctcttccctctcccacgacaacgacgacatggggccagataaatggaggagcgcgaccggcatcctctcccccctctcccacgacgaccacggtgacatcgacgagaaggcgctggggcagcagggggatgacaccgatgagcaccctgatcccggtgctgccttgtcgccccgccacccctgcctgcttcgcctgccacacgctcgctcgtcgtgctcgcccgctgcccctgcttgcttcgcccgtcgtgcgcttgcccgccgccgccgccatatacatgtgggccccgcatactttattttttttttatttttctgactgggatgccacgtcagcgaaatcaggtgtctatactcttatagacctaaattggacgcttttatacagtctagggatgaagatttttgatattgaggataagggatgtaaaaaaaaaaactcggtgtaaagttgagggacggacttattccccgtaaaatatgaacatgttaggctcgatttaatctcagcccagcccatgtaagttttacagattggccgtctgatttgacgtgattttcgatgcaggcatcatcggcgggcggtggctcaagtactggacggaggccggcgcggtgctctcctccgtcgggttgttcgaagcgcagctgagcagcggcgcgttccagctcctcggcatggcggagctgggcctcctcccctccgtcttcgcccgccgcggccccggacgatccgccaccccgtgggtcgccgtcgccgcctccgccgccgtctcggtcgccgtctccttcctcggcttcgacgacgtcgtcgccaccgccaacctgctctacagcctcggcgcgctgctcgagttcgccgccttcctccggctccgcgcgagggaggagagcccctcctcgctcaagcgcccctaccgcgtcccgctgccgctccccgcgctcgccgccatgtgcctcgtgccgtcggcgttcctggcgtacgtggtcgccgtcgccgggtggagggtctccgccgtcgccgccgcgctcacggccctcggcgtcggctggcacggcgccatgagggtgtgcaggtccaggaagtggctcaggttcaacaccgcggttgccgccgaccatcgtctgcaactacaagatgctcctcctcctcctgctggtagagtctgaactctgaacccgttttggcagatttcgtcttgcgaaaagatgaaacacggtaagaaactcgaaatatttgctagtagaagactaattacaagctatactagtacaagactaattacatggttggatgaagctctaaagttggcgttttcatatttgttcctctaattaatcaccgtgtacgattgtggttcattatcagagacgcggtttaaattgaacggtctgtctctctcaaatctgaaatggtcacatttgtagtgaagtggacatccatgaaatggcgacaaggaggcggacatgatcatattcatatccacgtactaacccagctcctcttttgtggcacacgcggctccacactacaaacctccgttccgcgccacaaactgcaaccaccacacatgctccatcgcccgtagtcatcctacaaaccaatagacaccgcgcgcgcggaacgccatcgctgccacatctcatggacgacgtgtggccgtggctggccggcctggccggcgaggagccgccgccgccgcaggccgttgtcgcccttgccgccttcgctgacggcaccacgtccattgtcctgcaggccgaccacgtcgcattggctgaaggtgatgaggaagagaagactctagtagatttctctctcgccttgaacagcaccaatggcggcgcagcgcgcgtgctgtggacgtcgggtcgatttgaggccgcctccggtgtcgcgttgcagcggcagctgctggcgaggctgctcgacgaggtgatcacgctctcgccgtccgtctcttgcttgagcggaaacctcggactcggagtcggcggcgcaccgaagtcgaagttggacgaggagatcgtcgccggcatcgggaatgattctgccgcctcattcttctcgctgactctccttctgcgcctcttctggctgtgcgccaccgaggcacccgccgacaccgggtttctcttcttccaagctctcggcgccgacatccagcgcgctctcgtggactgccgcccagcgctcgccctgttcctggcctccctcggcccggacgtcgaggagcggttcatgcggtcgctcggctacacgctcgccaagctgtgcttgctacgggagatgcaagcggatgcggatcagccggcgccggcggcgacacggcgcccgcgcgcgctccccgcggtgtgcctgtcgtacgccaccgaggtgcacgggctgtgggttctgagaggatacgcgccggtgctcgccatgccccgtgtcacctgcgcggcatcgacgacggcgcccatcacggcgctgccgcacgaggcgccggaggagccggcgctgaggtacggcctggtgcaccagcagctggaggtcgtggcgcagctggagtacgccgtgcgcgctcgccgcggcgagaggttcatgaccgtcgccgtgcgcgtcgacaacgtccgggtacgcgtcgcgcggctcgggttccggagggacgacgcggacgctgacgccgacggtggcgacgctcacgacgacgccatggacggcgagcgccatttcccgtcccgtctccgcctctgggtcggccctaggttcggcgcgtcgtacgcgaccggcccgagcctcggccggtcgacggggaacccggagcaggacgtcgagacgacgcgcaccgtcaagggcgccttcgccgccgccggcgccacgaagctagccaacggcggcgtccctccgaggatcaaggccaagacgcggtcgtcggcccgggcacgcaaccggagctggcggtgggagcaggaggcggagggcagcgccggcgtgttcgagggcgtgctgtgcgacccggccaccggcacggagatctcggcgtggcgcggcgacaacaacaacaacaatggcggcgccggtgacccgcgcaacgggatgcggcggcggtacggcgggccgggcagggcgttcagcaagatgcgggggctggtggtggccggcgacgagctgcccgaggaggtgacgtggagggtggggagggaggcggaggggagaacgctgccgtggcgcgtggggctcaaggcctggttgacctaccttcccaaccaggtgaggagccaccatttcgagacgaggtgcgtcgagtgggcacacgaggtcgacctcccgcttgccgccgttaatggcgacgagaggtaaaaaaaaaaaaagaaaatctctctttatatcacctatgaacacatactagccaaaagaaatgaaatgatcttatgcacgtattgtgtatatgaaatgaacagctaaaataagaggttaagaatctaaattcagatgctgtccatttgcaccgatttttctttttttttcttttttttttcgcagggcatttgcaccgactttaagatagatcatcttaatacctgatcggagaccaaatcgtaatggatgcaaaactatttctataagggcacaactattataccgccgtaatggtataaccccccatttcaaatgctcatgcgtccactcactctcccactccatgcgagcacgcaactcccgacacgtgagcgcctgacacacgccatatgcatccattatgtgtcaagccatcttgatatgtatttatcgggctgaacctactagtcaagtttggttggttctagagaccaaagggtgggaggtttcgactccattcggctgggctagttcggttgttccatctagctcttttctcattatcaagttctcaccacacatatattcatagtcttgaccagtacatgtctatgatacttaattgatgcttaaaagtatcatcacatatataccttccaaatggtactcgtgtcgagcgatactagtcggcatcagacatcatcccctgatacatatcgataccaagactatactaatcagcactaggtccgataacgtttagtaccactctttgtaccctctattggtaccaggccggtattaggggcctgtttggtagagctctaactcctaaatttatctccaggagttgggtctaaagtggagttgtagagctacctaaacctaactccatctctctagttcattttgtgagagacctccacccaagcccactcccattttaggtggagctgaaactgtttggctgagctccagctccagaagaggtggagctggagttggagctgtgacaaacaggccctaggtctaatacccatcgatgctacacatggtactcctgatacccatcggtactaagctaataccgatcggtactaggtagagtatattggtcagtacaaacttgttacccttattagtaccatgtcgatatcgggtctgatactcgtcgataccagagttactactcctgatacccgtcggtacctatgtgataccaattggacccagtctaataccaatcaatacaagacttagtagccctgatacccggtgatatcagactaatacatgtacgtataaggtttgatacatatgtactagcctaatatttgtacgatattaggtcctatatcttaggacaaagatatgaacctgggatcggaaataatatgtatataccaattgaaaaaaaagaagaaatgaactctatatagcaaaagaagtgaagaaaaatgttcacttttacacttgacaccacttaagaaaagagtatataaattaaaaagtactagctataataagttggcaagaaggtcactaagctcagtcttatcgcatgattagggtaatggttttattttttccgacatctttctcttttcttctcattttgttttgccgccccaacatctgcagtgaacagttagacagccatagagtaggctgatcgatagttgcacgttctgacacatgtcatctgtaccgaaccacgtgcaaagttactaaccatatatagacttgtgtacccacgaagtctgtatgcaagaaggaatataattccataagctcatgtagtttcttacattaaacttttacagtcagtctaaaagcaagtttaataatattgtcaactaatatctttaaaagttaacacatatcatctacagccaacctaatagtatgttcactcatcaatagttagttgcaggcccggccacaggagaggagggggagggggttgagctatgccaccgcacagggcccacaaagtgaaggggcccaaccccatatatgctgtatataatagcccatagaaattaggaagcctat

SEQ ID NO: 7675 - DNA, 11520 bp, Oryza sativa
cattgtaaactaatatgttaatggggacatgcaaaatcacctccatattgtagtatttgcagaaatatatcttttgttcacacatttatcttttgatatgtggcagatgatggaggttgagctcaagaagctggaggatactatcaactctatccatgaagaaatgttttatcttcgcgccaggtatggcttgcaatgataaaacatttctttgtgaaattcaatatgatctcttaaatcattattatccgtgtttcatttctctagggaggaggagatgcaggaactgaacaggagaacaaactcaaggatggcttggcttggtttcttctcactagctatctgcctgtcagtggcggggttgcagttgtggcatctgaagaacttctttgagagaaagaagcttctataattctgactcagaacatttaggcataaaattgtgtgatttctctttttatgcttaccaggcgtaaatttcctgcaagggacagatgttagcatagttgaggaacatttcttttcagtttcctagaccaacttaaatagatgtaaaatgcaaagacgacaccaatttttgtttccttgcttgcaaagtatgttgttttcatggttcaaaagacaacgttctatttttttgttcttggcctggcctcactgctctaaccaaatacttcatctgcagttggttactgctgattatggtaagtttagaaccaatgttgttgtgatttgtgataacacattcataatattttatatttctaacactaatgccttgtacttcctatggttatatgttttttctttaggcttgaagcatgagtcatttttgcctgctagatgcgcccaaagactgattatcatgtcaggttctgtgactgaaaagggcaaaggtatacactgaactttctattagctgttgcatttgcccttttttggccttcagaaacaagtgccgccttctcacctttccatgaaaagcgcacttacttatgaccatatcaataccaaagtttggcttacgattatgtggggttttttttttttgaagaaacaactatcactacgaagcaacaggccagatgtgtggacgttcggttagatggccaaactaataaatcatgattacaaaacgaagaggaacgtacatagattcttgttttattaactagctagccacctatacactcaagggtctgaaggctcttcaatagcttattggagaagacatcccttgggagaatctaaattaacgcataaaaaaatagaaaagtaacagagaacaccagcctgaaccctgttaaacagactgcagtggtccatctgagacaatagcaatgcataaacccgtgcaacatagaagtgatgatccaaggcagtgaagttatcttgcttgattgattgtcgttgtatttttgtggggacaaatcttttagttttagatcatgcagtccaatgcttatggcacgtttctgggtagcagtttccacattttatgcgaccaatgttaatacactagtagtatacttgtgaagtgagttttactctaattcttgcactttcagatttctctataaaactattccaggcctgttctagctgatagacaacagatgaaactaagtttatgacaattatttgaggatacaaatgaatgagttgactatcagaaatttgataagttgattttatttttttctaagaaatgttgatgaagaatgtttttttttgaaaaaaaaactgtttaggagattaggaaacgtgtccacgataatccataatatgtattgtcattagaatgcccgtaatacttgcattttgacaatatgttggttggcactaggtagtcagcttgtatctggcaaatccgaccaacagtatgttatgcaaaagttttttttgtttgttattatcaacatttgtttgtaaatccaactggtgtgtgccagtgttaaaacgttatagtcatgcgtggtattttgaagaggaatgaactgacgaagttccactgttattttatcgagaaaccgtttttttttcttgcaattatcaggcatctgcagctgtatggctcttgaattttgacttatctgcaacttaacgaatctaattgcagcaactggtttataaatgtctcgttgctggtcagaataatcaggcagctgacgtatctgtatggctgtatcagaggtgttagtccacttgacgcttgctcattttgcaagtactagtaggggctgtaggacaagtcaaagaaagcctggtagataaaagaggttaccgccaaatatttcaactcaaatcgaaagcaacttgatggaagcactgcatgaagattttcaacgagatgtctaaattattgcaaaatgacgaaggcatcaacaacgacagattcacagttaaaacataagtacatgtcacagcgttaacataggttgaaatggagctgtaacaagctgattagacccattaggtttgcgttattatgcagcatcaagttactttaggaactttgctataatttcgtaagaaatactaattccccctgttaaaaaaacatcttttttttactatgaatatggatgctttgggatgatactttgcttgcatgctgcagcattcaacgaaaagtctgaacatgcaggcagcaatgtttctacatgcctttctttctctgaaatattcggcaaagataatatatctgctaagaaatataaaagagtcacaatatttttaggccatgtttaagctactcctaaaatgtcctcactagctgaagacactcgtagggaaactcagctcgcaatgtaggatacccctagatgggctcctcaaaatctgaagtaacttaatagagacactccaacccataataggtattccaatacacaaagccccatatttatttttactaccctacccctaatctctctctctcccaccccctcttctctttttcttcgccaccatcctcgcctttccctctcgctgccgccgctcgcctctcccgtcgccggcggccgcgaggatgacgaggagggccgcctctcccgtcgccggcttccaccgccgcccctctctctctctctcacgtcgctgcccatcgccgtccttcccagcatcctctgccttgcaccgtcgccggttgggggcactagatccggtgctgtagtgggcaatgcggatccgtcttcgctgtcacctctctcttctctctctctctcattgccacgccgccggtgaggggcaagaaggggaggcataggggaaggaggtgggggacagggcaccgggtcgccccattgtgtacccccaatggagtagctcaggaaaagtgagctgaggagcccagagccacccgtcccctgtgtaggggtcacgctcgcgcctccctcctaggggacgacccgacgacggaagttggatgtcatttgcgaggctactctctaggggcacgcgttgctgatggcctaagttcccacacaaaaattttataccctgtcacatcgaacgtttgaacacctacatgaagtattaaatataggctaaaaaataactaattgcgcagattgcagctaatttgcgagacgaatcttttaagcctaattgcttcatgatttgacaatgtgatgctacagtaaatatttgctaatgatggattaattaggcttaataaatttgtctcgttatttactgacagattttgtaattagtttttttattagtgtccgaacacccccatgcgacatcatatataatacctgatgtgacacgacaaaactttacactccgtatctaaacacccccttattttatacgcaacatagattttgaaagcacgagagatgaatataaaaatcagtggccaaatgataggctgctagcgatatgcgtggcctatttctttttagaatcttcatagcttcccgagatatcagcacatgctcatgctcttagtcactctagagtctattactatacgctccctccatctctaaatataagtgattttggttggatgtgacacatatggagggagcagttactactaagttaaaaagaacaaacatatatacaaacctattttttatgagatggagagggtactctttctgttccaaaataattcaacttaagataaaatatgatctatcctaaaacaacaaatttgtattatcttagaatatgttattttgggatggaggaaatagttatccttgcgatctactccctccatctaaaaagggcaacctgcaaaaagatgtgaaacaatatagtacgatgaatctggatatagaggttcagagttattatactatattgtgtcatatcctctcatagtcctttttttagatggatggagcatattatagtgatatagtcatcccagttggctataattggaagtgattaatctggtcaaatcaaataaaagagaatatcccgtcttaaaaataacaagtcattttgaacttctcgagacccattttagaattttgactacctagttcagtataatcattatcataaaaaagttatttagtttgttcttattttttgcataagtgtaatattatgaaagctcttgttaggataaagttgaatatatcattttcatatacccaaaaagatattttgaatggtttttatggttaaaattaactctttttgaatgttcgtatttcaagcaacttgtttttgagagcgggggtatgttacttatttatttgtcatatcggatctagcccaaggaaaactttccttttatattggatcaatcacaaaaaaagcgaaacgtcgaactgaacgcaaatagtgtttctcctttcccttttcttcggtttgactacaggagtgataaaagcatatcggtccaaaatatctttcctacaatcatatttgtctcgcacaacagccaaaacatagcaaaattctaattttcattaccatgttcatatagaaaggcaatgtcgaaagcttcagataccaacgatacatttgaaaagtttaaaagttggattgaaacactcaatttttattttggtacaaagtgacagagcgagagacaaaaattactcgcacatctgaaatgtgaccaattcgatagattgctgcaccattttcatataaaattcgaactaaagcagtttgcacgcaccaaacacatgactagttgactactagcaatcactgcccactcatacataatcccggcaatggcggccgaggcgaccaacccctccacctcgcctcaccaacctcctccacgactccggggaactcgaatcccgccccggatagtcgccgccgagatcgatccatggcggccgaggaagcccaccgcctcgccgacgccagcgccaccgcgccgcccaagaacgccgccgccgtcgatggcgtcgccgtggcggcgccggcggccggcggcgggcatgggagggcgccggggaacaagctgtcgctggtgccgctgatattcttgatcttcttcgaggtcgccggcgggccgtacggcgcggagccggcggtgcagtcggcggggcccctgttcgcgctgctcggcttcctcgtcttccccttcatctgggccgtcccggagtcgctcgtcaccgccgagctcgccacggcgatgcccgggaacggcgggttcgtgctctgggcggaccgcgcgttcgggcccttcgccggttcgctcatgggcacgtggaagtacgtctccggcgcgatcaacggcgccgcgttcccggcgctgtgcgccgactacgtcgcgcgcgtcgccccggccgtgtcgggcggcggcgcccgcgtcgccgccatcgtcgccttcaacgtcgcgatctcggtgctcaactacacgggcctcagcatcgtcgggtggaccgccgtggcgctcggcgtcgcgtcgctgtccccgttcgcgctcatgttcggcgccgcgctccccaagatccggccgcgccggtggcgcgccacggcggcggacaaggactggaagctcttcttcaacacgctcttctggaacctcaactactgggacagcgcgagcaccatggccggcgaggtggagcggcccgggaggacgttcccgcgggcgctgctctccgccgtcgccatgaccacgctcggctacctgctgccgctcttggccgccacgggcgccatcgacgcggcgcccgaggactggggcaacggcttcttcgccgacgccgcaggtaaattcttccgatcaccaacaacgccatcgaatcgaatccagtaatcagatcacgttcttgcataatcacaaacacctagcacgcgcgccacgccgagattcttgattgattgatttatttattactttttgctcttttccattgacattggtacacgattccatcgaacgtgtggaccatggaaaacaaaaaagatttttttttctttttgcggggaaatcaatcttttttagtgttgttgtgattgtcatgagccatggcaagttaacaacgtgggaaagaggagaccaagcaattaggcagaaaggaacaattagatgatgatattattgtcgtcgaagaaaatctctataaagtcaattccccttagaacaatatggcaatatctttacagtactgtcagtacagctacctctccaagaacagtacaaaagattatgtgtcagtgtcaatgacatatactcctgtttagagctagtcaaatcctataaattaattcatatatcttactgtattatcttaatttggtgttccatttggacaatgataatgatgcccaacatttctaccattcttcagctgcacagatgaaattaattacgcgctgcatgttccataaaaagaatacaacaaagaatacaacataaatagtagattgtaacgacgcataattaccttatacctctctctttctcagaatttaaggcctgatcaaacttgacaatagtctccaaaactaatatttttttcgcatgtactacctctatttcaaaatatctgttgttttagattatttagtaaagattaatgcttaaaaggaaatgaccatagcgccccctattaaatgatgtatgatggggagtgtgtcggtagtttagagtaggatagagaaaattttcaattagaggtaactaatgtaacaaaaggtacttttaagtgacaaagctttttgacaaaatttaaatcctaaagcgtcaatattttggtacggaggaattactacactgtctataggaacagagtcatagctataagaaagtatattcaaatgtcaatcccgaatccaataataccgttgtcaacaagtaaaatttaatttacatcaaactaattgtcagtaaaatattatattgtgatgaggaggagtgagtattttccaagcttcacacaacaatcgatttacgcggcgcattaatttaacgatctctgcatctgcattgcactactgtggatggttgatcattttgattgatcactttctctgcaaacgcatgaacacgtacgcaggcatgatcgccgggggttggctcaagtactggatcgaggtgggcgccgtgctctccaccatcggcctctactcggcgacgctgagcagcgccgcgttccagctcctcggcatggcggacctgggcctcctcccgcgcgccttcgcgctccgggcgccggtgttcgacacgccctgggtcggcatcctcgccaccgccgccatcaccctcgccatgtcgttcaccagcttcgacaccatcgtcgcctccgccaacttcctctacagcctcggcatgctgctcgagttcgccgccttcgtccgcctccgcgccaggctccccgccatgcccaggccctacgccgtgccgctccggggcctgcccgccgccgccgccctctgcgccgtcccctcggcgttcctcgtcttcgtcatggccatcgccgggtggaaggtgtacgccatcagcgccgtcttcaccgccgccggcgtcgcggtgtactacctcatggacctctgcaaggccagagggtggctcacgttcagcgccgctgccgcagaccgcggaggcagcggcggcgacgcgatgatgtaccggcgtcaggggagcacggcgagcgaggtcgtctgatgaggggatcgatcgtcgtcgacgccattgattccggcgttgcattgcaagctgtatatgctttccgatgtttgtttatctgtgtgtgtgtgcgcgcttctttccttgtgcagaagagcataggaattgagtgatttgtaacagtcttaattagtcgtagatgctgatcaaatcaagaaatgggttgcatattactttcaaattagcaaattgtacattcatgaaagtggtagaactaaagaagcatacataagctcaaagagaaattctcgacctcactaaaatcctattgaaaacccaccaggatttcaatcctattaaaggaaaatgagcaattctaaggcacaaatctaatgaaccaatggtagcatcttgtccctgattgcaagaaatcatggacaagctcaaaatcgcggcgaacatggttagcacttagtagctagtacgaaacacctagaaaaactttgaaagaaatacaatcttggctaaccgaatgcacacttttggagaaggtgaggagccatacctacatgggcgcgacatggcttgaacaggaggacaacacagcagcatgccgacggcgtgatgattcgatgatggcacgcatgggcgtcacaggacacagcttaggaagaagaaatggtgtgtgccgtctcaggtcatcatggagtagtacatgatgtttgctttgctaggggtatttgagaagagtgtgttttcttgtcttgaactgttgatgttgggggagaaactgtatttgtcggatctgctacagtactagtactcctactcttactccgtaggccggtacatttctgttgggtggaaatgggaggaagacttccggacccatcatttcgcttattcgcggaataagccaagcggcacatttgcaagcgaaaaataatttgtgaataaaatttttatatttgtagctatgcttatctctgaagtcgatatccggcgtcttgtcttggcgcatgttggcttgtatgttgatattgtatcttgatctattgtttcatgtcccctctcctcctagggggccttatatttatactcataggtatccccttgttcaagtagaactagggaaaccaatatggatacaatccgagtagtccttgtcgtttccatgtagaactctattcatccttccttatgcggaactcctcctatatccgaaggttgtttccgtataagacatggtatgtggtgggtcctgccaagatttagtcaactactataaggtatgtggtatccataacattgacaatgtgttcttagcgatccaaaagaaaatgctgaaaaataagcttcgatgaaaaaaaaaacctcaaaatcagctccaaatgtaacattgaaaattcaaatttggctgataagcataagcataagtaaaaatatgaggcccttcctctctgttctcataaaaaccggtactcggtaggagggatgcagcggttgataagaaaagtaaaatgtgtttgaaactcacaacgcgggaaaagatgtagtgcaaactacatatatagtggaaacatgaaaactaccattagaacgtaaaatggatgttcaatattcgtccacgtatgagtaaaatttttactcctgataatgtggacgaatatcagacgttcatttgatccaacgatagttttcagattcccactacatatgtagtttccaccctatattttccccttactacgcagcaaacatgtgacatagaggaaatccaaaatcagaaaatggaaatgctaacgcatttagaaatgattagactcatttcttagacacgcaaacaataataagagagtaaagcacgagagctgtcttgtttgtttgtgtaggccgaaattcaggcccacccatttgtatgccagaattgggcccatcaagacgaggccaaggttagctagtgggttgggctggtgtgggatgcttccaggtgatatttataaggcaataagttcatattgattcccttaactagtaattgaatctgattcgtatcctataccggatatctcgatcctcaactattaaaacggctacaatttgaccccatcgataattttagagggtggttttgccaacgtggctcctacgtagtgattttgatctagtcttcgtggtgcatggtggtggtttttttttcctttcctagctaatgcctattaagaatcaccgcaccatctggtgttagtcgtcgtaaaaaaaaaaaccggtagattctcgttagcgaacttgtaccagaactgctccgtccgtgtgaagcgcaggtcgggggcgtcaaagaagaatcggcatgagctcgatctcaaagcagaaaaatcgccatgcctgcgccgtctccacgcactcgaacgtcaccgacgaccccggcagccgatccacgaatggccgccagaggcaccacgtacgagtcgtacgacaacacacccttcgaagctcccccaggaggacgaacacaattagaagtataatagtataatagtgagttataagcctactataagtttacgtggatgagagaggtaacaaaaaaaatcaagagtgtaatggctctcatgcaagagctagcttaacacaaactccaagacaatacattaaatgtataagtgagagatagagagaggaaaagaaaaattgtagccgaccttataactaatctattatatatgttggctttaaaatggactaatagtatgaagtgagctctactaccatctttgctcttagctgcaccgggttcctggaaggacctgatcacggagttgatggaaggacctcttgttggttcttttctccaacaagagagagttggatgaagattaagatttttgtggcacgcttttcaaactgataaacggtacgtttcgttctatatgaaagttgctctaaaatatcatattaatttattttttaagtttgtaataattaaaactcaatcaatcatacgctaataccacctcgttttgcgtaaaaaacttaatattcatcttcatcttcagaagaaaagaacaccactatatatactatatgtgtcggttcttaatctaaaaccatcacctatattttaagaataggtgataataatttaaaaaaaaccagtatctaaacggaaagaaatatagctgtcggttccagccccaaaccaacatctataatatattataggtgttatttttcttaaaaaacagcacctatacgaaaccgagccgagccaagccaaggagagggatcattttccacccgcccccgcagctcgaccgtatggttttatccgcatcttagcgctctctctcccttcccttttttcagagagtagcatagcgctgtccctttccgtccttctcttctccttcttctcttctggcaaggtgtccacggcggtggccaag

SEQ ID NO: 7676 - DNA, 4525 bp, Oryza sativa
ttgtacaataaacagtgtgggggtatggagaggtcttctttctcttgtgggccttaccttcaccttttgcattcacacattggcatatataaatactagagttagggaataaaagagggtttggggatagagggacttgaaccctgacttagaaagtcgacggattttccttttaccagaaatttcattgttgtcagtattgacatgtagaatgggactctctctttatcctcgtccgattaatccgcttttaaaaagatttcaaaaactatgatttgaaggatttgattactcaatattcgattggaatggattttataacaccaactaaaaattatcacaaaaaattctaggaaaattcatacatgtactttcaatagtattacatctacgtgcaaagtcgcatcttcaaattcattctacatagagaataacaaaaaagataaaattctgacaaaattgcaaccttaaaactgtcagattttttgtttttttttgttacggctaaaatataatgaattttactttaagattttaaccctaggtgtaatacaattgaaagtatgtgtatgattttttctagattttttggtgacattttttagttggtgtgcacgtgtgtacacgtgagggcctgtgtgcataggatatgttgccacatatatatatatatatatatatatatatatatatatatatatatatatatatatatatatatatatatatacacacacacacatacaaagctactacctactgattcctaggcccatacaaatttatatttgtatcggtatatgcggaatgtgtgaaaaataaaattaccttgtgatggaagcaatagtaaaattaagtagaagatatatacctgctattaaaaatactatcttattccccaaatgtttgacggtagttaaccaacgaaaaaaacagagatagtattttttgctcatccatgtcaaaaaaacgaagccaatatctatactacattaaatgtgggcagtggtgatgccagtgaatcttccgtcaccaccactcttactagcgtgtaggctttcacgctgttggtggtgttggtgtttcatcctgaaacaacataagctttgtgtttcttggtctggctaatttagtaagcatctaaaaattgatggcaaaagacagccggaattgtagattcttaaggctttgaaatgaatgccaaaattatcctttaagatttggtggtcatgcacgggcaaattagctacaagtataaacaaacaatataaaacccgtctcctctcctctactgttgcctctttcccagtttgtgctctctcctctcctcactccgccttatccccaaaaccctatcgatcccatcccctttcctcctcacccatggcggccacgctcttctccaccgccctctccccgcacctcctccccctcccctccacctcctccaaccccgcctcatcctccctctccttcctctccaagccgctgctccccgccctcgccgtcgcgggatggccgcggaggaggaccagccccttcgtgccggtggccgtggccgtgtcggaggaggtcgagacggaggaggacgaggaggaggaggaggagggctccgggggcgaggagttctccgacgacctgagggtcttcgtcggcaacctgcccttcagcgtcgacagcgcccagctcgccggcctcttcgagcaggccggctccgtcgagatggtcgaggtcaccaccccattcgtctcgccttactaagtactcctatcacaccaccttcgtcgagtcgctcgctggtgtgtccctgtctttgtgaaaccagaaatggaccgctggtcgctggtgaagtggtgatgaatgattgtgtctagttgcttcatattacagttcacgacaaattcattctgttgttaatttagcttaaaccgcgatacaattgggttgcatatggtagtgtgggcatattctcgttcttttaagaaaaaaaaacttatttcgggtgctcattgtgaggttgtatttggagatgattaaggatgcgataaggttgccattatttaaggttgttaaatttggtgtgctggcgctcatgctattaattctgtgactggcgaaagatttaggattgcatttttctggttaattgctcaattttaagagtagtactcggctttggttgatttttcctatattgtatcatgctaaactgcattgttgcaggtcatctatgataagctgactggaaggagtcgtgggtttgggtttgtgacaatgtctagtgttgaagaagttgaggcagctgtcgagcaattcaatggctatgtgagtatatgcttccatacttctaagtcattatttttgctccatgttggtatatgggctggctaaaaatatattgcataaagtgcgctcctatttcatctctttggtttgcatgctgtggcttgcattctttcaagataactgtagctgaggttgctcgatatgaacctgcttgcttgttttaatccttgtttgcttttagcttattcatgactagaaaacaaactttaatttactcttttctggcatgttgctggacatatgttgtgttatatcctatacaacatcattgaattgtgcttaactaatttgctgatttcatttcttaaaacagatacttgatgggagatctttgagggttaactcagggccaccaccaccaagggagcaatcatcgcagagagcacccaggggtgaggccaacagggtctatgtaggtaacctttcttggggtgttgacaatgcagctctcgcaaacctattcagtggggaaggggaggtcttggaagccaaggtcatctatgacagggagagtggcaggtcaaggggatttggttttgtcacgtatggttccgctgaagaggttgagaatgcagtttcaaatcttgatggcgctgtgagttttcactaagtctggctggtttcttattctcatatgtctttcagcatcattgttcttttagtgtgtgctaaaacaagcctattttctttgttgtgcaggacatggatggcagacagatccgagttacagtagcagaatcgaaaccacctaggagacaatattgaaattcgtttagatgccctgaagcctatggttagtccagatatgaatcatactatcgtcatgattgttctatagcatcgatggaattctagtcgtaacttccaccatatggttcaaaagattggtttggtgatgagatatatatcattttgttttaactttttgaacccacttttttttgttatgtatggcttgttccttgaattatagagtaaagtgcacggccggtctctaaacttgtgctattcaggtctcataatttgacaaagtgtgtcattccggtccaaaactgtcataatcctttcgagatcctggcgctgacatgatataccacatactaagcaccaacatggtatcatcagtaactacgcagtatgtccacatctgtatttctagattgacctgcccttccaacttggcatctcattgaatctgctcagtatcttgagcggatagaccaggttgggctgatcttgttttattttgggaacaatttcgattgatggggctctgacgggaccaaatatacttggactttttttttaccagtatacgttgtacgactccattttccaataaaaaaaaaggtgaatagcctatgaagtttcgcttcgagctcaatttagttgttgatgtttcaaaccgtccaaaaaaagtcctccaaatttattatttgggttaatatagtccttagaaaaaaaaagccacgaaagcatatcaagtcatccttgtatgtagcggtatgaataaaatgactattctacccttatataccatatagaaaaaaaaagacaaacagaaaaaataacaggccagcccagtcccaacattgttaatttacatgatcgctgcagcaatcgtaagtgataattataaaacgatcatatacgtgtgaaacatttatcttcttttatcttctttcttttttatatggtatataagggtagaatggtcattttgttcataccgctgcatgcgaggatgacttagcatgctcacatggctttttttttttggtcaaaggactatattaacccaaatgattaatttggaggacttgtttggacgatttgaaacctcaagaactaaactgagcccaaagcgaaacttcagtgaccatgttagttattcacccttaaaaaaaaggaataagttcacttggtgactctcaaaagtgattgtaatctaatccgtgaccctaaaccacagaaccggatatcttgacccccaaactatggaaatcggtacaatttgactccctcggcggttttagagggcggtttcgctgatgtggcgctgacgtggcggtattgaccgggtcttttttacacgtggcgttgacgtggcgcttaggtggcatttcaattaaaaagttatacgtgggacccatttgtcattcacatacacaattgtggg

SEQ ID NO: 7677 - DNA, 2262 bp, Oryza sativa
acagtaatcatccgttaatcatagattaatatacctggttagattcgtctcgtaaaatagcctaggggttatggaattgattttgtcagtaatttacgtttaatactcctaaataataagatttcggagggctatttaatagcccgaaggatccaaacaaggcccatgtcactaagcataaaccataaagctccaagaagatattatgcaagacactgtaacaccaatacttttcagggcttaaatgatgcttaacatgagtgctaaacgtattaattaaagaccatttcttttcattccttagctggttgttgttgttgtcacttcatgagtgtccacttcactacaaatgtgaccgtacgagagagacagttcaatttaaaccgcgtctctgataatgaacctcaatcatatggggtgatgagaagaagcacgcgtttcttctctgcacgtatatgtgatgattggccaagagaggcctggcctcgatcgatccttttttatttttaacgaaatcggcaagctactaattttcattgaatagagaagtgaaaattatacaaaaagtaagtaattaaaagttttgaggcctcggccctagcggccaaaaaaggttacactttcagccatgcggcaaggtgtctcgtgcccgcgaggctccacgtttttgcttcttccttttatcttggagagtatatttaaggccgacatctctttgtgttggaagatcctctggttcctctcattccaaatttcccatccgaccaacaaggttagcatatgtagtgcttttttcagcgcttctcttgtattaaccgtggcctcccaccactcatgtaccatcgaggccggctcccaaagcgacgggcttagatggtcgcagtccatccatcgtgcaatctcctcccagattcttctcatgtatctacatccttctagtaggcgaagggccgtctcctgagtctgacaatagagtgggcatgtggagccatttggccatcctctggttgttagtctgtctgagatccaaactctgttttggaggaccaactagacaaatgtcttgcacttgcgtggcgcctggcctcgatcgatcgaataaagaagacatgatgttattcaaagcgtcatgggtgccatttcagagacactggtagctagttttttttatcagtagttaggcctaccacgggaagggtattgggtaacccatatccatacctaattttatctgtctccatctaaaaaaaatatgacccatacctaaattaagtgggtattacccaatggtatgggtaacccaatggataagagaagagacatatgtgggctccacatgtagaaatggatcaaaatttgtacaaagttgctctttaatataataaatcatccctccaaattccagtcaaatttgataagattttgtaatgtgagttcgagtttaaaaattttaggtccgaattttacaccatagcaaatgggtacggatgaagtgggtaaaatgggtaatatcttccccatattcaaaatttaaattggtaattcttttacccataccctacccaaataaaatgtgtatgggtatggggatgggtactgaatacccagtggcaggctgatctgtatagtgcgtgtcacctgcttggtgttccatgcctccatggtaatgtgttgccgtttcatgagtgttcacttcgctacaaatgtgaccctattggagataaaaagagagcccttcctttctttttttccccaggctagaatggaaagatgctgcttgattgattcttctaaaccatcctgttcatgcttgcgcaaatcagaaaatgtcacttcagagcttcatccaaccctgtatacaggggtgaagacagctatagaaggctaaagctgctggatcgtttttacgatgagatcggcaatgatgacttatgacgagtttaagtagtgctgccgcaagattttgtctgctcttcgtgctggtttttttttttgccaatttttattcgattataagcgtatcgttgtaaagtttttcgacccggtttccctcgtaacctcataaactgagaaattcattgtccttttaggacttttcttcagagaaaaaaaaattgatcagcatgcatagatatatgctagtctttgcactaccaagaaaggcacgcacaagccagcattatacgtgccggaatagcgaaaaaaaaggggatcctctagagtcgaatgcgggcataaagctgagatagcaatcaagccgcg

SEQ ID NO: 7678 - DNA, 4700 bp, Oryza sativa
  unsure (1)..(4700): unsure at all n locations
cacaagccagcattatacgtgccggaatagcgaaaaccgacgcctagtattttctcaccttcataggctgaaaataaaaaaaaccaatacctttaaacgactataggtactagttcttgagaaaaaccaacacctatactataggtgtcagtgtaaaaaaaccaacatctttaatatattataggtgttggttaattaaaaaccgacactaaaaaaaccgaaccattccggatctaactctttttagcgcggaagccaagaggggggggggggcttatccactcaccccctcctctcggccgtctctctctctctctctctctccagctctcgagctctcctcccctctctaccagttccctctcttgtcctgccccctcctctctcgcctccttcgccatcggcggatcccggagagtcgatggcattggcgggtcccgtgggccggatctgacgggcctttacccttttccctttcatccctaagcttctctcgcgggcagatccagcaaaggcagcggcgatggcggtttcgatagttttctaaccctctccctttccccttctacccctaatcttttcccacggtagcgatgatggcatcggtgctcccacggccggatctagcggtggcgcttccgacagatggatccgacggtcctctaccccctcctcctccgtccncaagcttttcccgcaactgcagagatggcatcagtgctcccgtgggtggatccgacggaggtgtttccggcgggcagatccggtagcggatccggatctgccccaagcttctcctgtagcggatccggtggcggtggcaatgccgacggctcccgtgggcggatccagcttgattgttgttgtgttgttgcgatgatgttgttgttgtgttgctgtgatactgaccgatggattgattttggggggcgaagtagggggaatgtgctcggtgatgatgtattgagcatttttttttcatcccggaaaccttaaaggtactggcacctttgaggagactcaatggtgccgccttctaagtgtaggttgggaaatccgacacctattgccgcttcccaactggcaccaaaggtcttttctgcagtagtgttgacacttcgttcttcaacatgcctcttatacatgtacatggtgatgagtgacaatccttgcatagatttgaattggcagtgatttaccttgtatttgaatacatgttccatataacattgtgataccacctgagattgaatgactcaacagaatgattagattgatagaaatgtggagtacatatataagcgtaatccttccattatccacttacagcaagaaatatcgggaggatcggctaagcaaaacacgggtacatgccatatacaagtgaaacactaccattttcttccatttttcatgttttgcaagatgaactgtgccaaaaatgggttcagagttcagactctgtccgccgcaggaggatcatcttgtagttgcagatgagggccggcagcaacgacggtgttaaacccgagccacttcttggacctgcacaccctcatgacgccgtgccatcccacgccaagggcggtgagcccagcggcgatggcggagaccctccacccggcgacggcgatcacgtacgccaggaacgccgacggcacgaggcacatggcggcgagcgccgggagcgggagcgggacacggtaggggcgcttgagcgccgcagcgtgcctcccgcggcagcggagccagaggaaggcggcgaactcgagcagcgtgccgaggctgtagagcaggttggcggtggcgacgacgtcgtcgaagccgaggaaggagacggcgaccgagacggcggcggaggcggcgacggcgacccacggggtggcggatcgtccggggccgcggcgggcgaagacggaggggaggaggcccagctccgccatgccgaggagctggaacgcgccgctgctcagctgcgcttcgaacaacccgacggaggagagcaccgcgccggcctccgtccagtacttgagccaccgcccgccgatgatgcctgcataaaataaatctcttagaaatcagggttttaaatttagaaattgctatttctgctgggggcaccgaaattttagaaattttaaatttttttggccgaaattatttaaaattttgactgattttgaatgaatttgaataatatttggtcaaattctcaaaaatatgcagaaaaacaaaaaattccatgcgagatatgagcttgctggtgggggggggggatttcagaaattttgaaacgaaatttcaaaccctacttgaaataaggttgtcgtatgttctgtaaaaacttctttgggcaatgcgtgtcaccctgtccatattcgttgacgctggatttgaaacacgttgggtggagtcatgtacagatgattacaccaccacactgatgcttcttttaaagcacgatattagtttgaataatttgtccttaatcttttgtgtagaaagagttacaaaagtggaacacgataaatcttcatattaggataaacttgaatatctatttgtttatatgcaaaacctgatcaagttaaattgtggtagttacacacgaaactgctattcggtgaccagtcgtgcgcgcctctctccgcgcgactggacacgtgtcacgtgcggagaggggcgccggacagcgcgccgcgcgggaggagctccgtgttttcccttttttttttcttttcggtttctctttttttttctttcgtatttttttcggtttcgtttttctttttttctttccgtatttttttcgtttttaatacgtatgtatgcaaactttgtatacgtaaaaatataaactttgtatacgcatgtataaagtttgtatacacgtatgcaagctttgtatatgcgtatataaggtttgtatatatgtatacaaactttgtatatgtgtattattttgggttttatatgtacatatacaattttatatacatgtatacaaagtttgtatacacatatataaagtttgtgtacatatattttttttaggttttttatacatacgtatacaaattttgtatacacgtacataaagtttatatgcatatatataaagtttatatacacatattttttaggttttttaatgtgtatatatttttttatagtagtagtactaatagtagtaataatagactagtagtagtaatagattagtagtaaaaggtactagcagtagtcgtgtgcggccccaggcgcgcgattagtcgcacattaggcgcccccagttacacatccttaataatgttcttttatgattgaggttatttatgagaggtagtaatcaagaaaagaatttatgatgcatgtataaataaaaaaaacgtactacctctattctaaaacatagcaatatattggatatatctaagtgctataaatcttaacatatcgatccatgtttagatttattagttttataatattagaatatatcatatctatatttagaatagagacagtaatatactgctagctttatatcatccgaccatgatctatatttatgcttacttttgtctgttttggtagctgtgtgcttgtttgtttcataaccgatctaggcattggttttgcttcggcatgttggtgttgttgctgatcttattgttctcttgccttggcttttgcgataccggaacagacaaggcattgtaagtagctttggtagagcggaacagatatgcaactgccccttgagatttctcaaaactcactagcagcttcgtcactgctataacccattttgttcagacagaggtgctgtgtgtgggtcaaggatatgtgtattacaatatcaaaattgatcctaaatgcctgtacaatgatagatgctactactctgttttctattattaagaatattttgtttcattagaaaaaaactttaattaacaatatatttaccaataatataatttatgtgatacaaaagcataattataagtaagtacttctgaatataaatccatctatctaataggggatacaaatttgtaaatttgtcacctaaaatcgcacattgataataattctaaaattgcagtagtatgcaatgtgtaattttactccttttaactataattttgttgtcatatttagctttacattatttttatttaggtttgaatattttttatataatttgtaaagtttatgaattgtaaatttatttcatatattgttatgtttaaatatgttattcaacctttttagaagaaaaaaaaggaagaagcaatgagaatcactgattaccatcaaaggtagaaaaaagtgacaaaaatctagacgtacgctcccaatgtaataagatcaattttacgccataaaaattatatcataataaagtagtgttgtcctaaccaaaacaaagtatggcatacagttttcaatgaaggatgtactatattaggtttttttttttttgaagttatatagagcgaaaagaatagaggatcgatcggctcactatagtggagaaactttgaggggagacatattacaacgaaatagagggtgacacatgctttaatttgcactggtactaccatctttcttgaatcaggcaagtaatcgattttccttttcctagttctttacatagcaaatttttttaacaatggacaattacatat

SEQ ID NO: 7679 - DNA, 2523 bp, Oryza sativa
agactggaggctcttgttcaacacgctcttgtggaacctcaactactgggacagcgcgagcaccatggccggcgaggtggagcggccggagcggacgttcccgcgggcgctcgcggtggcggtggtgctcatcgccgtcagctacctgctgccgctcatggcggcgatcggcgccacggacgcgccgccggagacgtgggagaacggctacttggccgacgcagcaggtacatggttatcaaacagtgctctctcaatggcattataacgacggccagcatgacagcttagaaactcttttcaaacatacaagcaagcattggaaaatgaaaagtacctcaacaaaatgaagatgcaacactagagcatacagataatttgtcaaacaagagaaaagatatatttatttattgccattttaatttgagataaattaacataaataaaaacatccccgcaaaaaaaaacataaagaaaaacaaagggaatataaagacagtaacagaagaagtttgcctcgcggtcacctaaagcctgcgccctgtggcctgtgacatcccgtctccataggagctgaggattatactgacccctttcggtataacgaatcggataatcatttgctcagattcgtggtactgggagaaaacatatcttttactaggtcagaaaccaatgatccaagaatatccaaaatgaatgctctagtgtaatgctcaatttgccttttttcattgcattatctggcatcaacttgaactgatcccgtaatttttttaagctgatggagtagttagaacatgtcatcatcccgtaacttccaagtcaccatcagctgcctttcgcttttttttgcttcatcacatgttttactggagtaattccttgtaaggtctcaatttcatcaatcgatggaccctctgacttgcctatgataggctcaacttaaattgataagcccatagacaactcacatcttgcaggacgccatcattctactaatgctccaattagaaatctgtctatactcattccaaccatctgagcaacttgataaaatctaagcctcttcaatagctgctcacataaataatagtatggaatgtcaacatggtgatacctgacacttgcaccatcattatcctacatacatagggtaaaaattagtcaatcattctttttttggaaacaagtatatgaaacaagctaacgacaacttacattttcccaaactattgagattttgtactggcagtggggcatccacagcagtgcactgaaatgttctgaaacacttttttcagtttgctgaactaaagtttgatctccatctaataagcctagctctccatcagttcttgcagctgaccaacgagcatctccaacagtctctccaaatctaactctctaaatgtctatttggccaactctccatctaatttggcaagtcaaactcattgtttactccaacagcctcctcattcatcctctctattatgagtctatgacaataggacccacatgtcaatctctacaactcttttttcttcttcatctttctccccttctctccaaactccaaaccccctcccctctcccctctgctgccatccgcctccgccaccggcgctcgggctccatcctcatctgccgccgccgcgagtcggcgacggcaaggcggcggaaggcgaggggcaaacggcggagatgtggatcttgtaggggatcccggcgtccttgagtggcttggccaggtcgtcggccttggacacggtgaaggcgttgaagtcgtcctccatcttgcgggccgcggcctcggcgtcgtccttggcggacggcgggttgcccatctgcccgccctcgccgctctggctccgcccgctattgcagctctggccgagcttgggctccatcaccatccgcctgccatcgccgctccggctctgcccccatcagccgctgcttcggcaccatccccatctgccgccgctacttggctgagctcccgtgcttgtgcgagaagagagagagggaggggagagaaagcgagagagaacgtgggtcccactagatgagtggatggccagccggcttgactggctagatttggctagcgggaactcagatttggccaaccagatggcttggcccttcggttggagagcctgttggagcacgatttttatttttttagaattgctaaaatttaacttggccagccatttggccattctattagagttgctctcccatctagagtagtcctcatcttactacttgtcttaaaaaaaattaatagagcatgtccaacaatttacaattggtatatttttttctgcaactaaaaaataaggattgtacgatgattggtcctaaagtaaaactaattcattttttccagattatgtgcacactattgtctccttaatcatcttgttatgttgacaaaacaggaattgaacagacaaatcttctattatatactaaaagttcattaaattttctataaacgctctcaaactg

SEQ ID NO: 7680 - DNA, 15400 bp, Oryza sativa
  unsure (1)..(15400): unsure at all n locations
ataagtgttaagcctaacatgatcaccttaatacggaatccttaggttactgaccgttgtttgaagccattgatgcgattctccctgttcttgtcggtgtagaggtagtagtggtagcagtagcagtgtgagcaccggcttgatcccgaaggggtcgccgccgatcacttgcggggtagcggcggccttctggtcgccacctacgctgtcccggaaacaccacacgttctccctccagcgctcaattgatcggataggtttttgggattttcggggaaaagaaggtcgtgaagagatcgtcatctcaccatgacaccggcctcccctattagtatggcgctgagggagatcgggggtaatccaaaatatggaaagatttggcgctaccgatcaatgcgcataatcacgtaattatggaaattgaatcgcgttaatcccgtaggcaccgggtggaaaacggccatccgagatttcctctcgattttcatgccgagagataaactttcctaacacatatagcatcaaactaggttgtgtttagatcaggggtttggcgtatcacatcaaatatacgggcacgcatttgaagtattaaacatggtctaataataaaagaaattatagaatccgcctataaactgtgagacgaaattattaagcctaattaatctatcattagaaaatatttactgtaacactacattatcagcttaaaacattcatctcgcaatttacatgcaatctgtgcaataagttattttctcatttatatttaatactctatgaatgtgtccaaatattcgatgtgacaaggtataatttttttccagggatctcaacagacccctaatatatgtcgtgctcttggagcgatataatggttctcaacggcagcgccgggccccggctgggaatagcaccgcccagcatctcctcgtctggctggataagaccattcccaacccaagacattaaacatagtttccataaactccacattatcaagtactaaacgctactcttctaatgcaaacaccattattccacacttaaatttaatgctacttatcacacatgatgccttggatgttgtgtagaaatcatgtctcatgcaagacatgatttccttctctttcctcatttattcacttgtcatatcatttttcattctaggtggcagcttatttaatgttatggacaccatcctagtcattgggttgggaatgatctaatagtactagctcagtgcagtgaattgaagtaaccgtacgaactatagctagtacactgatgtctgaacgtggtgatttgtttcaaaattttgctgatattcttcggaattgttatgttcatcaatgttcgtaaaaaaatcatttggtataaaatatctttaaaaaaatcaagttgctaactgcatgagcaaaatgagagaaaattgcacgattactgatgaataaatataggggcaaatgtgcaatagcaagtaagggtataaatgtctttttgccaacaactggacaccatcaacttaaccatccaaagtaggagtaaaatttgacttattccaaacaaatgggggaaaacaaaaatcccaaaaaaacaggagcaaaaccacaattgaatgtgaaaataggggtaagaacaaaattgcccccattatatttttatgtcctcgaactaattagagtgtcataagtattccatattgccatgaccactccacgatcctatgtggcgcttaagtgacatgctacatagacactaaagtgacattccatgtaaacattctggtctcaaattttttttcatctcctccacatttcccttgtcttcttttcttttttctctttttcccacacgaataggaaggaagaagaggagataaaagataaaacaaaatgagtcaatgttcatgtttatctgccatgcgagaggatcctaaatgggtcattgtaatttgggactggaataacacactctcaaaaggttggggacttaaaaaacaatttggacccttcaaatcaatgaatttagggagaaattttataggattcaaatcatataacctcttcgatacaaaggaccggaactttccaaatcctacgaaattactaaggaatggctcattacatatattacatatagattttggagaaaacttagcaaaaacttcaacctcttgaaaaatttcctgagtctattctctcgtcctattcctgtggacaaatcaaacaacgattcatgtgtttttctatattttataatcatttgttttgcacttgtattcctattaaaattatgtgttttttctatttcttcctatttttaatcctgcatttcaaaggagccctcaatgttcgaggacctagacaacacaggcgaacaagtttagggactgttagtgtaatttactttatcgaatatatacgccacctagttggctttttaaagattaggtttaataattcattttattagaaaactatgtgagcataatttattttgttttttttctaaaaccatcattatttattttgtatttatttgttttatcataataggtattttaagtatgccttacttttttcatatttacgccaactttttaataagataaatgattaaacaaattgtttccaaaagttaacagtgtcatactctctattttgatttgaaaataagttgattatttctacctcttaaatatcatcaacccctaaattaaatttttttattttttcaatactttctaattgtccacctatcaatactattttctattaatgaaggatattgtcggagggtaaaactcctttagcgggaagcgtgaacttccccattggagattcggccagagagctagtgagcggaaacaaggcaatggatagaaaaacgagggatgcaagctttattcattgttcgatctccttctgaactttttagagtgaaagcgattatgtgattggagtacagtgagcttgatctgatagccagccaaaaacatttcttctactatagctactctttacaatttgaaaaaaaaagtgtttatcaccaaaaaaataactatgcattacaaccgactcataataatacatgataagagtaaattctttttatgctttcaaactttagtctgtaatacataattttattttaaaatggtattaatagttttcttataatcatccatatcagtggatttagaacaacaaataattgttatgttagcgtcttttttttttcaccacgaagattcaattcacctataataacctcaattaacttggtggctttatgctcccacccactcgctaccactttttttcctttgactgagtgtaacgcacgggcatctttttatactataacatatagatttttcatatctgtatgtcctccgtatgtacgaaagtgatcacgcgatcggtagcgttttcgtggcgatacggcataagtggtgtagatttaaatgtccaaaaactcggcacgatttaaattcagatcgcctcgttaaggtcagatcgtattggccgaccaggttatggttataaaaacacgaatgaagagaacactagcaactaagtaagctcgcatgagtgagctcaccatggaccaagaaatccaactgaaccagaggccatcgccgcagcgacagcaacaagcacaagaacatggcggcgccaccgcaccggcgccggcgccggcgacgccacaagatgatgaacagcaagggcaccaagcagctgtcgccaggcatggctgcggcggcgcgacagccgaacgccaccaccagaccaagctcacgctactcccgctcgtcttcttcatctacttcgaggtggccggcggcccgtacggcgccgagcaggccgtgagcgcggcgggcccgctgttcgcgctgctcggcttcctcgccttccccttcgcgtggggcgtcccggtgtcgctcgtcaccgcagagctcgccgccgcgctcccggggaacggcggcttcgtcgtctgggccgaccgcgccttcggcccgctcgccggctccctgctcggcacgtggaagtacctcagctgcgtcatcaacctcgccgcgttcccggccctcgtcgccgactacctcggccgcgtcgccccggcggtcgccgtcccgggaagcagggcgcgcacgggcacggtgctcggcatgaccgtcttcctctccttcctcaacttgggcggcctaagcattgtcgggtggggcgcggtggccctggggttcgtgtcgctggcgccgttcgtgctgatgacggcgatggcggcgccgaggacgcggccgcggcggtgggcggcgcgggtgcaggtgaaggggaagagagactggaggctcttcttcaacacgctcttctggaacctcaactactgggacagcgcgagcaccatggccggcgaggtggagcggccggagcggacgttcccgcgggcgctcgcggtggcggtggtgctcatcgccgtcagctacctgctgccgctcatggcggcggtcggcgccacggacgcgccgccggaggcgtgggagaacggctacttggctgacgcagcaggtacgtagtacgtgtgtacgtatatacgctgacgcgattacgatattgatgatgtcacagcttcttttatcaacaaacaaaacacacatgatgtctccggcagatcgccgtaccggtaattgtcgccgttgtttattactttatgagttatttactcatcatatgaaaaagatccaaccttacattttcttggtggaagaagtggccattattttctcaattattattatattattatacaaaaattgatgatgttttcgtctaaattttaatacatcatttacatttgagttggttatacgttgctcttatctaattcgacacgagtcagaataactattatacaccccgtcatagcccaacccctcctcgaccctctcagtccaacccaaccggctcacaccatcccgtcaccccatcccacacgcttccacttaaagctgggcgcgttactccccgatcggggtcctttttctctttttttttctttttctttttctcccaatacaaaagacactataattttttaaaaagtatcaatacaaaatgtttttaatattacttaaaatatgtgttcatatatttaaaaaaaatttggcacacgaagtaaacagagccttaatttcctggatagtctgccacaacaggctagccttaacgttggcactgtcagtttccaggataaccggcgtctgaatccattctgctgctagccgaagcccgtttctgcacgcaaacgcttctgcttcctcggcccactgacaactgcgatacatattccatgaagtcaggagcacgtcacccatatgatcgcgaatgacaatgccagttcaatcattcatctattcggctcttcagcgttccattcaattctcaatcttataaaaaaaagaaaggaaaaacaccactctcgacaagatgggttagagcatcaccaatgtatatgtcaaagtgatccatatagatgagacctatataaattgtttttccctatagcaatctccacagtgtatatagatacaaggtatcaatagaagaagagagaggagtagagatagataatataatttattccatatgggtagtccatatgcatatgggtatcttttgttattttttccatatggactagttgcacaatggttatagatggctgaataaaatattctattgcttatgaactacttttacaccacattgtggatgcccttacagcgacgaagcttgtgaggaatctcaagggaccagctacaagtattccactctaccaaaactacaattcactgtacgttgtgtttcccttcaaactttcaacttgtttgtcatataaaatgtttcgacagtacatacatggagcattaaatgtagacgaaaaaaaaaaccaattgtacagtttgcatgtaaattgcgagatgaattttttaagactaattacgccatgatttgataatgtggtgctacagtgaatatttgctaatgatagactaattaggtgtaaatatttgctaatgatggactaattaggattaataaattcgtctcactgttcacacacgaaatctgtaattcgatggttcgaatatgtgtttccattatccatacagtatacagtagcagtatatcgcaaatatcaaggcaacaccacagtagagggcaacaaccaacgagtcaatgccaaaatgggtaaagaacaaacagtaaattctactagcacggaactattccttctgttctgaagcgaccctatttgacgctgtatgttagactttttaaaatacttttgaccgttcgtcttattaaaaacttttacgaatattattaaaaaaaacttgaatagtagtagtatatttaacaatgaatcaatgattggaaaagaattaataattacttaatttttttaaaataagatgaatggtcaaacatgtttaaaaaaatcaacagcgtcaaatatttagggacgaagggagtaaatcataaggagtaggggtatatatttttgcatgaccttaaataacatactttgaacattcatttatttcatattatgtcatcgataactataaaattagtatcacataaaagtatttttaaaaatattaatctaatgatataatatacataatacttgactagatattattagtataactagctaggtgggccgcgcaattgcgcgtctagtacccaaataaaatcatatatttttcagtatgattttacttaaaatttattaaatagatatctcgttctcttaagactttaaaagaccaaaccttatcatcctcgtatttctaattatatagtttttaaaagtcacatcagctgctatgctaccccttacttcagtcatatccttctttatttgcttgctcgatctaccactatttctattcattctctttgaaacctttaaaaattggatcatatagttcttagagtttattgtctcattggtttcgtttttataatttttagaaatcccgtcaaacactgcaattatactcctctatgacccatccactgtcttttctctttattgtcattaggattttaaattttgaacataattatcattcgggtttatttttttactttctagaagtcccgccaaaccgtcagcgactttgccattgtactcctttatggcttgtccgctgcctcccttatttattgtcattaagattttaaaatcgaacatgattatcattagattttttttttactttttagaagttctggacctttaaaaattggaccttgtagtttgtagagattatgatcttattgggttttattttttataatttttagaagtctcgtcaaacgatgccactatacccgcctactgtttattgtcattgggattctaaaaatcgaacataactatcgttggaattcatttttttttattttatagaagtcccccaaccgtcggctgttctactactcctatacaccccgcccgctgcttctcttttttattatcattgagattttaaaaatcgaatatggttatcaatgaggtttatttttttactttctagaagtcccgacaactgccttacccatttgcttcacgacttgcctatcgttcctccttttaatcgtcattaggattctatttgatgttttattaacagtttttatatatcgtatcaaccgccaccgctctactctttataggcctgttacttgaattatctcatcatgtgttttaggtgatcttttctttcaatagtatttattttttttcacgaattttagttatttataaattgtattcctaattgaaatatttcctattttttttcaaatttcagaatttatttttttcagattttaattaataccatatagtgttcttttaatattttttttaattttagttgtttcaaaattgtattcctacttaaactctcttttagtttttctaattttggatattattttatttttattttgaatattaatcaatctcgtattgggttcttatatagattcttctttcaatattgcttatattaaatttcgaattttaattaattttaaattgtatttctacttgaactcttcttttaattttgctaatttcggattttatttttatttttattccgaatattaattaatctcgtattgggttcttatatggacccttctctcaatattccttatttttaattcatattgaaatttatataaatattcatattgtattttatgtacgtgttagttattaattatttttaatatcaacttttagttatttctaaattatattcctatatggactctagactcgtctttcaatattttttttaaattccatatttccgttatctgtaaattgtatttctatatagactctaggctcttattgcaatattatttatttttaattctgaatttttattatttctaattgtatttctatgtggactctaaactcgtctttcaatattctttaatttttaatttcgaatttcagttacttctaaattgtattcctatattgattttagactcttcttcccatgttttttttaatttcgaattttagttatttgtaaattgtatttttatacaaactctaaactctacttttaattttattatgtttattccgaattttagttagttttaaaacttttattatgtttatttcgaattttagttagttttaaattcctatatggattctatactctacttctaatattccttatttttaattatgaatttctataatctcttaattgtatttatatatggactttatactctacttctaatatttcttatttttaattccgaatttatattatttcttaattgtattctatacagactttatactctacttataatatttcttatttttaattccgaatttctattatttcttaattgtatttttatatggactctagtctcctcttttaatattccttatttttaattccgattttcagttatttctaaattatatttctatatagactctgtttttttttctccgattaatatgagaatttctagaccgtgggagcgaacatggagacttttttttatttctttaataagttaatagattaggtgcacgaaccgattgccgcatgagatttttgaggttgtgtgcgagctgacaactctgttctgtcatgtaagcgcgttgctcgagtggaccaaacccaccacacattctcaaacccgttagccagagatcaaaatctaacataccctgcatcttaaaatggtttttgttaaaatatacaaggagaaattgaagaattgcggtattatttcagtacagcacgtaaatagtaagaccccttcccactttatatgttgtgcgcaatccgactgggctgggccggagataaatgtgcaattgatggctgatttggcccaaggatagcattatcaacaggaataagttcatatgagatctcttaacttgttagcgaatccgattttcgtccttcaaccggaaaaccggatacaacaattcctcagctgtcaaaaccggtgcaaaataagtccaaggaggtttggatggcgattacagttgatgtagctgctatgtggttaattttactcggtcatcctctaacgtggcattgacatgacgcttacgtggcaatttgatttggaaaataataaaaaccctgggcccacatgtcagtacccaaggggggtgggcgaagcatgcangggcagcaggcgagagcggcggtggtagacgagagtggtggcggcgaacgagagcggcggcagcagctgctggcgccccgtcgccacccaactccggtgacgcctgccccctgctccgcttcgtgaggagatccacattgacctgctccgcttcccggggcggcgcgaacactacacgagcgtcggccgcgcgtgcccaccattttgcgcgtcatcccctccgcctctcgccgccagcgatgtcatcgtgccagccacctctcttccctctcccacgacaacgacgacatggggccagataaatggaggagcgcgaccggcatcctctccccccctctcccacgacgaccacggtgacatcgacgagaaggcgctggggcagcagggggatgacaccgatgagcaccctgatcccggtgctgccttgtcgccccgccacccctgcctgcttcgcctgccacacgctcgctcgtcgtgctcgcccgctgcccctgcttgcttcgcccgtcgtgcgcttgcccgccgccgccgccatatacatgtgggccccgcatactttattttttttttatttttctgactgggatgccacgtcagcgaaatcaggtgtctatactcttatagacctaaattggacgcttttatacagtctagggatgaagatttttgatattgaggataagggatgtaaaaaaaaaaactcggtgtaaagttgagggacggacttattccccgtaaaatatgaacatgttaggctcgatttaatctcagcccagcccatgtaagttttacagattggccgtctgatttgacgtgattttcgatgcaggcatcatcggcgggcggtggctcaagtactggacggaggccggcgcggtgctctcctccgtcgggttgttcgaagcgcagctgagcagcggcgcgttccagctcctcggcatggcggagctgggcctcctcccctccgtcttcgcccgccgcggccccggacgatccgccaccccgtgggtcgccgtcgccgcctccgccgccgtctcggtcgccgtctccttcctcggcttcgacgacgtcgtcgccaccgccaacctgctctacagcctcggcgcgctgctcgagttcgccgccttcctccggctccgcgcgagggaggagagcccctcctcgctcaagcgcccctaccgcgtcccgctgccgctccccgcgctcgccgccatgtgcctcgtgccgtcggcgttcctggcgtacgtggtcgccgtcgccgggtggagggtctccgccgtcgccgccgcgctcacggccctcggcgtcggctggcacggcgccatgagggtgtgcaggtccaggaagtggctcaggttcaacaccgcggttgccgccgaccatcgtctgcaactacaagatgctcctcctcctcctgctggtagagtctgaactctgaacccgttttggcagatttcgtcttgcgaaaagatgaaacacggtaagaaactcgaaatatttgctagtagaagactaattacaagctatactagtacaagactaattacatggttggatgaagctctaaagttggcgttttcatatttgttcctctaattaatcaccgtgtacgattgtggttcattatcagagacgcggtttaaattgaacggtctgtctctctcaaatctgaaatggtcacatttgtagtgaagtggacatccatgaaatggcgacaaggaggcggacatgatcatattcatatccacgtactaacccagctcctcttttgtggcacacgcggctccacactacaaacctccgttccgcgccacaaactgcaaccaccacacatgctccatcgcccgtagtcatcctacaaaccaatagacaccgcgcgcgcggaacgccatcgctgccacatctcatggacgacgtgtggccgtggctggccggcctggccggcgaggagccgccgccgccgcaggccgttgtcgcccttgccgccttcgctgacggcaccacgtccattgtcctgcaggccgaccacgtcgcattggctgaaggtgatgaggaagagaagactctagtagatttctctctcgccttgaacagcaccaatggcggcgcagcgcgcgtgctgtggacgtcgggtcgatttgaggccgcctccggtgtcgcgttgcagcggcagctgctggcgaggctgctcgacgaggtgatcacgctctcgccgtccgtctcttgcttgagcggaaacctcggactcggagtcggcggcgcaccgaagtcgaagttggacgaggagatcgtcgccggcatcgggaatgattctgccgcctcattcttctcgctgactctccttctgcgcctcttctggctgtgcgccaccgaggcacccgccgacaccgggtttctcttcttccaagctctcggcgccgacatccagcgcgctctcgtggactgccgcccagcgctcgccctgttcctggcctccctcggcccggacgtcgaggagcggttcatgcggtcgctcggctacatgctcgccaagctgtgcttgctacgggagatgcaagcggatgcggatcagccggcgccggcggcgacacggcgcccgcgcgcgctccccgcggcgtgcctgtcgtacgccaccgaggtgcacgggctgtgggttctgagaggatacgcgccggtgctcgccatgccccgtgtcacctgcgcggcatcgacgacggcgcccatcacggcgctgccgcacgaggcgccggaggagccggcgctgaggtacggcctggtgcaccagcagctggaggtcgtggcgcagctggagtacgccgtgcgcgctcgccgcggcgagaggttcatgaccgtcgccgtgcgcgtcgacaacgtccgggtacgcgtcgcgcggctcgggttccggagggacgacgcggacgctgacgccgacggtggcgacgctcacgacgacgccatggacggcgagcgccatttcccgtcccgtctccgcctctgggtcggccctaggttcggcgcgtcgtacgcgaccggcccgagcctcggccggtcgacggggaacccggagcaggacgtcgagacgacgcgcaccgtcaagggcgccttcgccgccgccggcgccacgaagctagccaacggcggcgtccctccgaggatcaaggccaagacgcggtcgtcggcccgggcacgcaaccggagctggcggtgggagcaggaggcggagggcagcgccggcgtgttcgagggcgtgctgtgcgacccggccaccggcacggagatctcggcgtggcgcggcgacaacaacaacaacaatggcggcgccggtgacccgcgcaacgggatgcggcggcggtacggcgggccgggcagggcgttcagcaagatgcgggggctggtggtggccggcgacgagctgcccgaggaggtgacgtggagggtggggagggaggcggaggggagaacgctgccgtggcgcgtggggctcaaggcctggttgacctaccttcccaaccaggtgaggagccaccatttcgagacgaggtgcgtcgagtgggcacacgaggtcgacctcccgcttgccgccgttaatggcgacgagaggtaaaaaaaaaaaaagaaaatctctctttatatcacctatgaacacatactagccaaaagaaatgaaatgatcttatgcacgtattgtgtatatgaaatgaacagctaaaataagaggttaagaatctaaattcagatgctgtccatttgcaccgatttttctttttttttcttttttttttcgcagggcatttgcaccgactttaagatagatcatcttaatacctgatcggagaccaaatcgtaatggatgcaaaactatttctataagggcacaactattataccgccgtaatggtataaccccccatttcaaatgctcatgcgtccactcactctcccactccatgcgagcacgcaactcccgacacgtgagcgcctgacacacgccatatgcatccattatgtgtcaagccatcttgatatgtatttatcgggctgaacctactagtcaagtttggttggttctagagaccaaagggtgggaggtttcgactccattcggctgggctagttcggttgttccatctagctcttttctcattatcaagttctcaccacacatatattcatagtcttgaccagtacatgtctatgatacttaattgatgcttaaaagtatcatcacatatataccttccaaatggtactcgtgtcgagcgatactagtcggcatcagacatcatcccctgatacatatcgataccaagactatactaatcagcactaggtccgataacgtttagtaccactctttgtaccctctattggtaccaggccggtattaggggcctgtttggtagagctctaactcctaaatttatctccaggagttgggtctaaagtggagttgtagagctacctaaacctaactccatctctctagttcattttgtgagagacctccacccaagcccactcccattttaggtggagctgaaactgtttggctgagctccagctccagaagaggtggagctggagttggagctgtgacaaacaggccctaggtctaatacccatcgatgctacacatggtactcctgatacccatcggtactaagctaataccgatcggtactaggtagagtatattggtcagtacaaacttgttacccttattagtaccatgtcgatatcgggtctgatactcgtcgataccagagttactactcctgatacccgtcggtacctatgtgataccaattggtaccaagtctaataccaatcaatacaagacttagtagccctgatacccgttgatatcagactaatacatgtaggtataaggtttgatacatatgtactagcctaatatttgtacgatattaggtcctatatcttaggacaaagatatgaacctccatcggaaataatatgtatataccaattgaaaaaaaagaagaaatgaactctatatagcaaaagaagtgaagaaaaatgttcacttttacacttgacaccacttaagaaaagagtatataaattaaaaagtactagctataataagttggcaagaaggtcactaagctcagtcttatcgcatgattagggtaatggttttattttttcatacatctttctcttttcttctcattttgttttgccgccccaacatctgcagtgaacagttagacagccatagagtaggctgatcgatagttgcacgttctgacacatgtcatctgtaccgaaccacgtgcaaagttactaaccatatatagacttgtgtacccacgaagtctgtatgcaagaaggaatataattccataagctcatgtagtttcttacattaaacttttacagtcagtctaaaagcaagtttaataatattagagcaagtttaataatattgtcaactaatatctttaaaagttaacacatatcatctacagccaacctaatagtatgttcactcatacaatagttagttgcaggcccggccacaggagaggagggggagggggttgagatatgccaccgcacagggcccacaaagtgaaggggcccaa

SEQ ID NO: 7681 - DNA, 4642 bp, Oryza sativa
ttctgaccactcaggtcatccatctgccacgtaggctgattctggtgacaattcccaatccacaacaacttttcataaagcacaggcaaacagatctacgtaacgggaaccacctcacatccgcccatgaccgtgggcacggctgttagaatagttagttaacctctgcagaggggcacactttacccacaagatacgaacttacttcgaacacccgtctgtatcggaggttcgcaacaaagcctttcccaagccgacccagggttacctcatgccacatagaaggatcaaatcctcacataaatataggccatttagttttcacaaatcaaactccaaccacctcgatcggtaatctggcaagcttcgcgttcttgccttaccaggaacccgggttggctccaaccgaccccacccccgcgttcccaactattggcatgcgaggtttccctgaaccgactagttacttagctagggtgtcccataccaccttgtggttgcactttgttatgcttgatgagtttcccacaggaatcgatccttatatgcgaatacgggacaacgccacgcaggcacaacccccgtatcgcgagttttcataattcatttattttcaaacacaccgaatacggggcgactgctgttttataggcgcggggtggggcgtcgaggagaaggaaccggcattggggcgatcaaggggagcgagctggcggttgtgctcggagctagcggccaaacggcagtggaggtgcggtggctgaggttggaaaaagagaaaaagaagggggaaagaggagcttgatcatgtcgtttcggggagggagagaagcgggagcgagagctctggctcccggttttggacgggcgcgggtggagcggcttgggcacgcgctgcagagctcgcggcaggcagcggggctgagcggcagggcggcatgggcggttgcgcggcgcaggcggccagggcggacgcggcggcgaccgggcagtcggccgcgcgcgagcgcgcgcgcgaaggtgagttcaaacggcggtggcgggagggagtttgacaagagggagggagagagaaacagagagaacgagcgacgctccctctcgactccgacagcgtgcaacgcacgtggtgggggaagagatgatgggctgggaggggagatgggccgtgggaggaaatccggtccacaaaacttgagggaggtaaaatagacttttccagagaatttgatttggagaatttgagtaggattttggaattgcaaaccttgaaattttaatttggtgaaatgtgaggaagccaaggatgggattcaaagcgggatttatatatatttcttttgaaatatatttgtatctagcgactccggggattatttgagagggattccaaaggaagggaaaatcaatattcgaagatggatcaaagggagatagcgatggaacgccatggataggtaggtaggtcaatcgatggacatacatatagttggatttgagaaactgatagttagatcgagtaggtagatagagcgataggtagataggtcgatggatagatagatagatgggtagatggttagataggttagataagcggatagatcgattgatggacatcgagggattcaaggacggatttgacattctccgaatccggagaagtattggcaaggaattcaaggacgggattgaattccggtgtttgatttcggaagttgaatcggaattggaatcttcaggtggaggattttgatggcgatgagagggaataacaggatttgaattgagatccagggcatgacttagactcacactcaaagaacgaaaattttcgcaattaggattttctcaaactagtttttaacgtctcacgaaaagcggagcgttacagatccaccccccttacaagaatcttgaccccaagatttgaaggtggaccacacacacgaaaccaaaaaggggatcttcagacttcatctcagcttcaactctgttggtctttcttcatctcatggttgcacactagccacaaaacgatctggtactctcactcacttaacatgcttcatcttactgtgggtttgtttcttcctgcggattctgttcttcagcttgctcgagattcataacttttccttttgtttccacttgcacatggttcagatgactttgtccaacaggcggtgaggttagcgagacagatccactgtttggtgactttgagctttttggtccgggtacgctagggaggctcgctgttggttgaacttgctttgacttgactttctgagggcagtaccatgaatagtgtcccatctcatggcagatgaaacattcgactcctgccttatgaccacgtcttttcggaggtggagggcatgacacggagttacttccttcaaggcttttactgttgatcactgtggtttgctgactagattctgacattgtcgagcgagacgtagaaccgaaaccattggaatactgaaatactctctgatagtactgtgctggcgagtttgttttttttgacacaaaccttcttttgcttgaatctctaaggatattactttgcgtctcttctattcttgcatctcttattctgcatcttctagtaacaaggacttatcgaccatttgctgaaacatcgagaagtcgtgagccaaaagtttcactcgcagtttcgcatccattccttttaaaaatcttctgatcttctttttatcagtgtctgcatcttctagggcatatcgggccaatctgttgaagcgactcaaatactcgttgataccagaggatccttgcctgatatttgcaaattcttccttcttcaaatcaattatgctttcaaggatgtgtgctgagcgaaagacttatgcaaattctgcccagacgatggtaccagcatctgtatggttagcacaatagttatcccaccaatctgcggtaggtcctctcaactgatgagcagcgtaaagggtcttctcatacggagtacactgtaccagatttaatctcctttccacatctttgatccaatcgtcaccttcaataggctcagttgtttgagagaactccggcggacgtgatgtcaagaaatcattcagttttgatcgcccattatcttgaaccatatggggttgacgctcttgtgtgtgttgttgttgcatagcaattatattctgaatcattccttgtaatatctgagtttgcatggctaggatttggtgaaggtccatgggtgggggttgattacctcttgcattattaactgattcggaagcaaccgtatgatcactctcagcttcttgctcatctgcttggttaactggttgatcgggaatctctgactgaactggctcttcttcaaaaccaaagcgattaggagcacgggtttgacgggtagaacgacgagccatctacttcaaagcgactgagatctgaccgaaccagaaatgggataagaaaaggaggaaaacaaaaacactagatcaaaacgtttttcgaaatcgcagaagacataggtggtgtattccagccggtaacccaactggtctaacacctgaacacgggctaccaaacaaaactcacacacgcactagttcaccacaactcctaccgagcgggtgacggagctagggttgcctaccaacaagggcttaactaagacgcctagaggcttgagcacacctttcttcaactgggcgtgaagacaggtttactctaggataacatgtcaaaacaaacgactagcttctacttttggacacaaaaacatttttcgcaaaactagagctaaaggggacaacgacaccttagctttcacaaatagtttttgtactcaattaatgccatcctattcaggggtttcgatcctagggccaactaatgctctgataccatctctgtcacaccccgatccggcaccgccgtacaacggcacctgacaggagcgtgtcgtaggaaaaacggcgtgaaccgcttcctacgaaaccgcgattacagtaccagtcccaggacatagtgctggtacccacggtgacaaatatgaatcattgcaatccttaaaataaataaatgacttatttaccttaacttaggttgtagctcagaacagcccgagaatgcaaccgacgacgcggacgaggaaaacaccaacagcagcagcagcagcggaaccaacggactaacacccaacaccacaggcgacggctgggaaccaggacgaaaccctaatcttcacttcacatcatcttcacttcacgacggaggaactatatatatatttatatagagaaagggtgagtactttcgtactcagcaagtcacgggaattaggtgtttaatgcaagcttggaagagaggtaaggttgttttacaaatcctttgtttgaaatcatttagaaatcactaagtgatttatttctttctaagtttgggtcgaaaaggagacttgcgtcttgattcgacttaagagatgcttttcaacaactcaattggtaatgtattgacctcccgggtcaaatcattacttcccggctcccagagccatttcacttgattaagcggctcccagagcctttttcattttctcggactcctagagtccagctgcccagcagcacaacaatccgcttcc

SEQ ID NO: 7682 - DNA, 3171 bp, Oryza sativa
tgttccgactaccaacaggacaacaggcaagcaaaagtacacaacacaacggtggattttcagcatttcaaaaataatttctgaacatagccattttgagaggaaaaaacagagacacaaacttaattggaactaaagactagataatgggaactaatgaagaaacttattcgcaattctcagctggaatatcaaagttctccacgtgatgcagaggcaaacaagatcagatagatgaactctcatgatgaggatgcaatcaggtgcttagatcttgtcaagcgcctgaacaacgtcattcttcaaatcctcaaaatcctccactccaatgctgaacctgatcaagttgtccttgattccatagatttctctctgctcctttgaatccctgtaatgattcataactcagcaacatgttctttttgattgattgattatctgaatgtgacaaaatatgaacagtccataccagtaagacatgatggcaggctgatcaataatgctctcacagcccccaaatgatggggcatgatagggtatcttaacagaatcaataaatctcctagtagcatcaaagtctccagcaacctgcacagacaaggtattttagaaatttaaatgggtggtgttatatccacaggtgagatgagaattaaagagaagaaagtacctcaaaactaatgacaccaccaaagccggtcatctgactcttggcaatgtgatgttctgggtgacttggcagaccaggatagtagacacgtgcaatctaaggataggaaataagagactcagaaaaaacaacacaacaaaaagaactactcgtagcttcatagcttgtacaacaaatgaaaagtgcagagtttgcaaacctttggatgttcctctaaaaattgggccatccgcattgcagtattattctgacattgtacacggagatgcagtgtcttcatgcctcgaagaatcaagtaggcagcattctggtatcataatggcatgaaaagttaagagacaagagaccagaatattcatcaacagtataacatacagaaatagaatgcaaagacattcacaacttcaattcaaatcgctttcagacattcacagctgcagatcatctattatagtgtgttatctatttctgtacaattgacgattttaattacagaattacctaacaagggctatcactacctctagtcaatgcaaacgagagagatattttaccagcccaaactcaccggatttagaacaccaccaactacatggtgatagatgcggactttggaaactagctcatctctgccactgatgcagcctccaataacctaaaaaacaaaatattcttgtcaaggcaatctatatgtgtaatgagtacaggaagtttggtccaaacacttacatcattgtgcccagcaatgtactttgttgctgaatggataactaagtcagcacctagagttagtgccttctgattgattggggatgcaaaggtactatcaatacaaagcaatgctcccttgctatggcacatttttgagacaagatcaatgtcgatgcatctcagaaatggattagtaggagtctcggtgaagaatagggatacctgagtagaggtcacggataaatttttggttaataaataggcatatgatagcattagaggaaaaggaaatagtacaaagatcacactcacattattattatccagtgcattttggagagcatccatgtcagcaggtctaataacggtcatctggacacaaaattgtgtcataagataagcaacaaattgtaaacatttatgtataaacaaatggaacaaagatcataggcatattccaaacaccgtattctgcagaacataaatatttaatatgcacttccaagatactggaaatttgaaagcaactatgaaatcattatacatttttggcttctacaaattgatggaaagccaatctcaaatagtaactgcagaatcaagtgtgtgcacacgcacgcacgcaaaaagtaccggtataattataaatgcctctatctggctctcacaggaatctgtacagattactaaagtagcaatgattgagtggtggtggacaaaagaatgcgagttatgttggattagtttattatacaacataaaattgaacttagaaagatgacaggtaattgctgtgccaattaacacaggaaatagtagcctccatgtccaaatataatattttaagtagatcataaaatttaaaatttgtaagccttctgctactatagaacaatgacaagtcacatcaactacaagaaaaactccattgaaagttacatatgcattactgcaaacaagaataataagatcagattaccgtaattcccctcttaggtagttcagtctccatgtaaattctcgtcttgcggtaacaatcagtggtggtcacaacgtgcccacctgctggaacaagcgcgctgagcatagccacacttgcatacatcccggatgccacaaagacagtggactcggctttctccagtgcactgaaacatcgaagtagagcaatcaaaatcccatccactaaaaccaacacagcatcaagcattcccacttccaattagcagaaccattcatttcaagaagaaaatattacaccagcaacaaaggggaaacatcacctcatcttcttctccaatgcctcagtggtcgggttaccatacctcccatactcgaagctagcatgcctcccctcctgagagaagaggaaatttttaacatttgcaaaaagggcatctaccaaatcgatttgtaggagtaattgcaaccccccaactatttacgaaagatcgccaatcatttctaaccttgaagtcaatgagctcctgcgagttgttgaaccagtaggccgaggtgttcactactggcgtggtgatcgcgtctgtggcgatccttctgcccagcctctcgccttcgataggtatatcaaaagcacgaaatggatcagaaaaaaaccgaagcagcggggggaaggcgatagatctgagaggggattgatcgtgattacccgcgtggacggcgaggctggcgtctgaaccgagcagggcctgctcggccaatgcggcggcggacggctggccgagcttggcgttggggatggcgccaacctcggccgtggcctccgccgc

SEQ ID NO: 7683 - DNA, 5552 bp, Oryza sativa
agcacttcttgttgagcccacttttatgcatgcttagatcttatacgggattgactatatatcagtcaactaaaattttaataaccctgtatctaccgtgagccgttggatcgacacctaacaaattcatgatatacatggtttatcttctccaatgagacatgttatattttttttcatcttcttacttcgaatgaacttccatgaaaccatgactcaccggtgtcatctagcctacctcatctccggcggctcacttcacctaatacataggtacctccctccgcctcatggtcactccatttcgctcaacccctgcgactagctaatctaccaaaactatgtactgctgccacctagctgcaccacccgactaccacacatcaccgaccgcccgaaccaccactcccctccccgaccatccctctaagcttcagaacacccctctccccggcccatagccacactcacactaaccctcatcccgaatcctaatctagcgatgccgacatcctctcatcatatactaacgtttacattgtaatgaaagtggaatgatggggacattggtgttgttgttattagtgaaaaaaaagagagataaaagccggaggagagttgaagaaaaggtagaatacaactcacaatgatcggattttagtccaatggtaaatacaaggtgacactgtgaatagtttactgtgatacaaatttataacttattaaaaatgccatgatttatcttccattatagggcaacattttcgagtttttattctaataattctatttcaaatttattctagcgagatggcttattgtaagggtcagcgaattgctcttctatctgttcagtttgctttaggcttgatgatttgatccttaatccttcttccgaggccatttatactcgaagaaataatcatggaatcctttgatatagttttggtcgaggtcgagtaggtcatcaggattttgccaaagttgattttttttaattcagaatcctatcctcgttatacgtatgtgggtgaggatcctctaccataatgccactgccattacggccagtgatgcgtggatcccaccgtcctattgccccacatgtcaatctctacgtacacatattgggtatgatatatgtggactagcacatccatacatctatggaatatctcatactcccttcgtctcataatataagtatttttggagttagaaacgattattaagaaagcatgtagaattaaatgaatgagggttgtgattagataagaagtgaggtagatggaaaaattgaatagcggagggttgtgactagttgtgaagagaatattggtaaataaattgttatattttgaaataaattctaaaagagttgttatattttgggacggagggagtattatacagtacaccgacaaccatttgaagacaaaaaaaaatactggtgtggaaatggtttgaacatatttttttcagacttttttttcccgctggacatagaggagcaagttcgccgcacatatcctaaccagaaagagaaaaaaaaaagatcggacggtcgctccagcagcaagatagattgtgcgtcgacatgcatgattcatggcaatgatagtgaaccccagaatttagtacagccggagatcgatgagctcacaaccttatctcatctaatcatgatttgattttttgattagttagttttagtggccaccgcgtcggctcgcaggacaggacaaggacggacagtgctgagcaaaatggcagctgcctataaaccaactgcggcagattgtttacgacgcattacatttgttagcccatccatttaattatactattattatcgaacgcacacactgcacgcacccatccttttgctgcgatccgccaatggccaccaccaaatttgcaagattctgcagatcttgtcgctaccagggccaggatgtatgtttctttaagaagggtattatttcctcgacatttacatccaactggatatatacaatcatttaaattgagaactttgtttaaccaaatatgaaattcgctcctataaattaggaacctagtcccgcaaacaatctaatctgaaattcactcctatgaagatttaaactcagaatcttatgatgctattcagatcactgcaaccaatagattacatgctctttttgcattgttactgctgctgctgcttattgccaatcattttatttggtggagaagaggaggacggatcggatttctctccttatctccacttgcagtactcaaaagaaagtctgatgaagcgtttgcgagtgtgtgtgtatgtgttggtagtgtttgtctggatcttgagacagaaatgcttttgcatgatcgatatggcgtcggtttcggcagcactgttgaggcacgaacggcttcgtttctccgagaaaagtcgttctggatttcagtgggtactaggctgctttctggcgacgtgatttgtcgtctccaattatccagagagagagagagagagagagagagaaagcaagtagaggtcatgtttgctcttccgaattgttcttgttgctgttccgcggctgcacgagagcttgacgcctcaacgaccaccttgttctcatgatcctcccattcatctttgattttaaaattttaaggagtgactacactacatatgcaggtggttggtagtcagtttttaaaattttgaaaaagttaaaaaaaatccaaagctcttgacttctagttttctgaattgcttgagaaagctagatattttgaaaaaaaaatttgcaggtgcgagaagttagtttagtggttgtgacctaagtagtacctcaagatactgagttcaaatctttatataaaagaattttagattaggttgtttgagggacaaaattcccaatttaaaaagaccgcatacatctgttttgatgcaaaagttgggtaaaaaaataccattctctaaaaagagaagttaaaaccaaagctttcatatccaaattctgcaaatcaagttcaaatagggttcaaagttgcgaaaggacctgtaacctagtggttacaagagtctcagtagcatctgaggtcctaggttcgactccccgtgaaagcggatttttcaagatttaacgacgttgtgctttaataaaaaaaatagggttcaaagttaaatccactaacacttcgggatttgactgaacagatggaccgccggccaaacgaacaaacccaccactcccactgtcccacgcaacgaactgaagctcatgcgatcaaaaattcaaggaataagtccacatagactcccttaaaagtgacccaaatctaatatgtaaccctcaaccgcaaaaccggataggataggatgactcccgaactactgaaatcagtgcaatttgactccctcagtggttttgctgatgtggtgctgacgtggaaatattgacctagttttcgtcacacgtggcgcttacgtggcattacaattaaaaaaatatatgtgggacccatctgtgattcacacaaaaatatattgtggtccccactgacatgtgaggcccacatgtcatcctctctctctctttcttcctcctccctctctcccccttttctctccaccttctctctcgtggagcaatagacgggcaggggtagcgacagcgggcgggagctggagcggcggcggccggcaatgaccggagcggcagcggcggcaggcgggctcgacgaagcgggacttgagcttggtgagcgacgaccggcggtggagtagcgcggcaacgacagcggacgcaatcccgtcgcgccgcggccgcccatgcgacaagaggaacgccgtgccgggggagaaaggggagggaggagaaagagatgcggatgcaggggagtgggtgggtcttcctcgccggccgaccggtcaagggcgtcgagggctccgccttcgtccatggcgcttggattagggcgcggcggactccctcaaatataggtcaagctgcagtttcactaattcacaacttccaccgcctctacctcgccacgagcacgagccaccaccacccctcgccgacatcgcttcgtcctcgtcacaggagccgttggcttcgtcggctgccacgcaactgccgccctgcaaatcacaacactactaaaatctgaactctgaattcctgaatgcccagttgtttggtcttcacaaatgctcctatatatacaagacaattactaccgcaagaacacagaattagatcggttttgcagtagcacacacaatgatccaaggaaaatggattaacatcaatggcagtcgttttcagcacgcggaactcaggaggcagatcggcaaggcgatcgtcgtcgtgagtagtctgaagctctgaaacgaactaatcgacgagcggcacatacaggagaagataatcggtggagagagatctcatgagctgttgctatcgcattcaagcgccatgaccagtacgccgttgctatcggttttggggaggctttgcaacctccggcaacggcgtcgtcggcgtcaacagcggtggcggcgcagtcggaaatcctcctcggggtggcgctcccggacgacatcgccttcctggctggaggtggagcacggcgatgggatcggggcggccaccgcttcagctcccgccggctgccaccactccggcccccgcccgccgccgctccagcctgtgctccccgcagccggccgagagaaaggaagaggggaggaagaagaaagagagagaggatgacatgtggggcccactgacatgtgggccccacaatttttatgtgtgaatgataaacgggtcccacgtatacgtttttaattcaaatgccaccaaagcgccacatcaaccccacagattaggtcaacaatgtcacgtcagcgaaaccaccctccaaaaccaccaagggagtcaaattgtaccggtttcaatagttcgagggtcaggatatccggttttgcagtttaggatcatggattagattcgggtcatttttaagggagtaaaagtggacttgttccaaaattcaaaatggacagttttttttaggaataagttcacttggtgaccctcaaaagtgattgaaatttaatccgtaaccctaaaccataaaaccggatatcttaacccccaaactatggaaatcggtgcaatttgactccctcagcggttttggaggtcggtttcgctgacgtggcggtattgaccgggtcttctttacacgtggtgttgacgtggcatttagctggcatttagaattaaaaaatatgtgtgggacccatttgtcaatgacacagaaaatagattgtgggacccacatgtcccttctctctcccctccctcagttccctctctctcctcgtcgttccctctctctctcccgcagcaggcggagacggaggtgcggcgacctgcgagcggcggcggcacccgggctgagctccaccacggcgaagacggaggagaccacagcggcagcggcgggaggcacacgcggcggggtacagcgagctcggccca

SEQ ID NO: 7684 - DNA, 25174 bp, Oryza sativa
ggcccacccaaccgtacggcactgtggcgacccccggatgtgccgtgagttcgcaatcaacgagtcctcctgcgtaataattcacgatgtaatttggacagaacaagcaaagctgcacgtactccattcgtcccgtataaatcaaatctactaggacagtacagcactccctccgtcctaaaataaatatattttacattgttcatatttatatatgtttgactatttgttttattgataatcttttataattaatatttttattgttattagataataaaacatgaatggtactttatgcgtgactactttttctaatttttcaaataagatgaacggtccaacgttggacacagataccaacggctgcacttattttgggacagaggtagtactaagagcaactttaatagtatatctaacaaccgggctccaaatcatttgtagtcattttataggcaattcatacaatagttacctattaacatatactggaccatttataagttttacctgtcaaacacacatgcattttagagtccatgctaaagttggctataaatctgtagccctctactcttttctctccttttttacctcctcaaaatatgtttataactggcttataagctgctaccgtcagcagcgcgacatgcacaataaaacatgtattgtggtgcacggtgaatggcaattaattaagccgatgactgctgccgtaccccccaccctcccgactaaaaaacctaaactagaatttggatggatgataatctaatacaacgaattcgacatgtataatccaaatccaaatcctaggttagttttttttaatggagttttttttaattggacatctagctagggatgaaaacggtcggaaacgatacattattttattatttttttcgaaaacggacgaaaacggtcgggaaattttcatacttatgaattcatctatttagtgtcaatttcaatgccacgctgacagaaattaaaaacactaaattttgaaaacgataaccatcgctaaaaatattattattattatatagttttacggaaacggtgtatatacggtccgaaaatttttataccgttttcaccctgcagccttgatgttaccagtcacttgacttaatggctggcaggcaggcttatcacttgagtcgacgtacagccccatgatcaacagttcaaccttagtactccaaagaagtttattttgacttctttatgtaaatctaaaataatttttatttttatcaattattacatgagagtttgtaaaaataaaaaataaatatattgagagtagataaagtagaaaataattatattgagatttatccaatttaatataatcattataactaaatactctatgtcctattaaaaaacaacttccggggatgaacctggataagcatttatccagatccatccctacaagttttttttcattttttttcttggacggagggtgtaactcagaggattatattttgctcaaagaaatatgcatgtttcaatagcaaaatttcggttactaaaaatcaaaattcggttttttgcaatcatggaggttggagacttaaaaaaaaccctgtaaaacaaggcaactaagagagattttgctttaatttaagctcgcaacaagcagccaaagaataatggcactagcaggtacctctcctaggccaaaataagttgatttgtatattagttaaagtttatctagctcaattggttgtttgtcagatttcttgtggtgaaaccagtccaaatagatgcaagacctaaacttgataagagtgttcgttaattagttttttcagtagtcactattacataacatctaataagggacatctcatatatgacttataggtgtcagttgggagacataaccgacatcaatgttacttaagaggcccgcatataaaaatctattttcgcaaatagacctctaaatacacctgtatacaaaaacaagcctattttcgtagacggaacttttaagcagccacatgagaaaatgcattttcacatgcaggcctctcaaagccccacctacaagtctgacctttgtcctctcttccctctccactctcagcgccttcaaaatgtttaagtctcatccttatctcctcaccttctctccctcacctttaatttttccgtagtcttatttcctctctctctctctctctgtcacactccaatccggcaccgccgtacaacggcacctgacaggagcgtgtcgtaggaaaaacggcgcgaaccgcttcctacgaaaccgcaattatagtaccagtcccaggacatagtgctggtacccacggtgacaaatatgaatcattgcaatccttaaaataaataaaggacttatttaccttaacttatgttgtagcttagaacagcccgagaatgcaaccgacgatgcggacgaggaaaacaccaacagcagcagcagcagcggaaccaacggactaacacccaacaccacaggcgatggctgggaaccaggacgaaaccctaatcttcacttcacgatggaggaactatatatatatatatatatatatatatatatatatatatatatatatatatttatatagagcaagggtgagtactttcgtactcagcaagtcacgggaatcaggtgtttaatgcaagcttggaagagaggcaagattgttttacaaatcctttgtttgaaatcattttgaaatcactaagtgatttatttctttctaagtttgggtcgaaaaggagacttgcgtctcgattcgacttaagagatgctgttcaacaactcaattggtaatgtattgacctcccgggtcaaatcattacttcctggctcccagagccatttcacttgattaagcggctcccagagcctttttcattttctcggactcccagagtccagctgcccagcagcacaacaatccgcttccactcgggaagcctaatctatgatgcccgcaaacattccgaatcacacagattcgtttctgaccactcaggtcatccatctgccatgtaggctgattctggtgacgattcccaatccacaacaacttttcataaagcacaggcaaacaaatctacgcaacggaaaccacctcacatccgcccatgaccgtgggcacggctgttcgaacagttagttaacctctgcagaggggtacactttacccacaagatacgaacttattccgaacacccgtcggtatcggaggttcgcaacaaagcctttcccaagccgacccagggttacctcatgccacatagaagcatcaaatcctcacataaatataggccattttagttttcacaaatcaaactccaaccacctcgatcggtaatctggcaagcttcgcgttcttgccttaccaggaacccgggttggctccaaccgaccccgccccggcgttcccaactattggcatgcgaggtttccctgaaccgactagttacttagctagggtgtcccataccaccttgtggttgcactttgttatacttgatgagtttcccacaggaatcggtccttatatgcgaatacgggacaacgccatgcaggcaccacccccacatcgcgagttttcataattcatttatttttaaacacaccgacaccacatgtcgggttttcaaggcttctcaaacccatttcccaatttttcgacagtcaacggtgtatgtgggatatttggtatacgcgctcagagagcacggatacggaagtaccacaagggtggagcggcaaggaatcagggtagtacaatctacaggaattagtgcgactactgggtaggtccgtcggtttggcacgcaaaccgaggccaagcaaattaagtgtgtgattctaataatgcaagttacaaacaaaataataatgattttccaattatatgagcaattggtcaaagggtgacttgccttgctcaagatcttcacgaagcttcatgaatctacgagaaatccctgatcgacgaaaatccggtaaccgcggctatacgcaaacagtcaaaacctaaatgaaagactaaaagaaagaccctatttagactaattaatagtgccattaaatagatctcaattttacaggagtactggaagttgacggagtcaatcggagctacggattgagagatatgaattttggaagctcgaatgggattttctggactaggaaatgatttatctgaattttctggaatgaaaggaatggtttatggaatttatagaaataatattctcaagaatattattgacagtcactgacgtgcggggccaagggaaatgatttatggagcaaaggaaaaaggaattgatttatgaaaaagggaaaaaggatttattaaatcctttttggaaaagaaaagaaggatggatgtgatttagacttgggccgagcgaagggggcggggcccaggacatttgcggcgcggctgaggaaagtgggccggcgcacgggtgaggcggtccaaggccgggcgcggcccgcgtgagagggagccgaccgggcggaccgcggtccaccacgcgggatccggggcgggcccgcttgtcagcggctcggctcaccgatggcggggtgcatgcgagcgggacgctagggttagggggaggggcgcggtgcgcggtggacgcgggtgcggcgggcccacgcgcagcctctcggctcgcggtggaccgcgcgcgcgcgagcgggagtggagggaggcggctgaccggggtcagcccgacccaatccacgccgaggtggcgccaacgtggcgccttcgtggctgccatgcgggccggcgagaggaggaagacgaggccggccggaaaatggacggcgggcggcggccgacttcaccggaagcactacgcggcgattcgatcgagagggagtttaccgtacaagggggagcacggcaggggatgagccaacggctcggattcttcgaaaaggggccggcgacgacgaatcgcggcggcgcacgccggcggcaagaaaagggggaaacggcggaggggcgatgaggattcaattcaaggaggtgggagcatctccggggttcaaggagcccatttccggcgtcggatggggtggaagagcaccgaggagggccagcgacgagcggcggcctccgggagcgggcggcaacggcggcgaggccatgccgggcggcggcggggctaggggcagcgtctacgtgcgttcgagagtctagctgagctaccacgcgagccaaggaggggcgagggcgagcgagaaaaaggaacgggaggaaggcactaccgagccgggcgggcagtgatgggcggtcgacggcgcgtggcgagctctccagccttggacctgggaaggggaagaagaggtgcctggagtcctcgtctcgcgtccccgcacgcaccggtttccctagtgcttcggcgacggacggtgagggcgactgtagggcaggggcggcaacaatggcgcggtggtggcgacgagggaaaacgaatgagggagatggggcgactgctgttttataggcgcggggtggggcatcgaggagaaggaactgacattggggcggtcaaggggagcgagctggcggtcgtgctcggagctagcggccaaacagcagtggaggtgcggtggctgaggttggaaaaagagaaaaagaagggggaaagaggagcttgaccatgccgtttcggggagggagagaagcgggagcgagagctctggctcctggttttggacgggtgcgggtggagcggcttgggcacgcgctgcagagctccatggaacgccatggataggtaggtaggtcaatcgatggacatacatatagttggatttgagaaaccgatagttagttcgagtaggttgatagagcgataggtagataggtcgatggatagatagatagatgggtagatggttagataggttagataagcggatagatcgatcgatggacagggaaggattcaaggacggatttgacattctcggaatccggagaagtattggcaaggaattcaaggacaggattgaattccggtgtttgatttcggaagttgaatcggaattggaatcttcaggtggaggattttgatggcgatgagagggaacaacaggatttgaattgagatccagggcatgacttagactcacactcaaagaacgaaaattttcgcaattaggattttctcaaactagtttttaacgtctcacgaaaagcggagcgttacagatccaccccccttacaagaatcttgaccccaagatttgaaggtggaccacacacacgaaaccaaaaaggggatcttcagacttcatctcagcttcatactctgttggtctttcttcatctcatggttgcacactagccacaaaacgatctggtactctcactcacttaacatgcttcatcttactgtgggtttgtttcttcctgcggattctgttcttcagcttgctcgagattcataacttttccttttgtttccacttgcacatggttcagatgactttgtccaacaggcggtgaggttagcgagacagatccactgtttggtgactttgagctttttggtccgggtacgctagggaggctcgctgttggttgaacttgctttgacttgactttctgagggcagtaccatgaatagtgtcccatctcatggcagatgaaacattcgactcctgccttatgaccacgtcttttcggaggtggagggcatgacacggagttacttccttcaaggcttttactgttgatcactgtggtttgctgactagattctgacattgtcgagcgagacgtagaaccgaaaccattggaatactgaaatactctctgatagtactgtgctggcgagtttgttttttttgacacaaaccttcttttgcttgaatctctaaggatattactttgcgtctcttctattcttgcatctcttattctgcatcttctagtaacaaggacttatcgaccatttgctgaaacatcgagaagtcgtgagccaaaagtttcactcgcagtttcgcatccattccttttaaaaatcttctgatcttctttttatcagtgtctgcatcttctagggcatatcgggccaatctgttgaagcgactcaaatactcgttgataccagaggatccttgcctgatatttgcaaattcttccttcttcaaatcaattatgctttcaaggatgtgtgctgagcgaaagacttatgcaaattctgcccagacgatggtaccagcatctgtatggttagcacaatagttatcccaccaatctgcggtaggtcctctcaactgatgagcagcgtaaagggtcttctcatacggagtacactgtaccagatttaatctcctttccacatctttgatccaatcgtcaccttcaataggctcagttgtttgagagaactccggcggacgtgatgtcaagaaatcattcagttttgatcgcccattatcttgaaccatatggggttgacgctcttgtgtgtgttgttgttgcatagcaattatattctgaatcattccttgtaatatctgagtttgcatggctaggatttggtgaaggtccatgggtgggggttgattacctcttgcattattaactgattcggaagcaaccgtatgatcactctcagcttcttgctcatctgcttggttaactggttgatcgggaatctctgactgaactggctcttcttcaaaaccaaagcgattaggagcacgggtttgacgggtagaacgacgagccatctacttcaaagcgactgagatctgaccgaaccagaaatgggataagaaaaggaggaaaacaaaaacactagatcaaaacgtttttcgaaatcgcagaagacataggtggtgtattccagccggtaacccaactggtctaacacctgaacacgggctaccaaacaaaactcacacacgcactagttcaccacaactcctaccgagcgggtgacggagctagggttgcctaccaacaagggcttaactaagacgcctagaggcttgagcacacctttcttcaactgggcgtgaagacaggtttactctaggataacatgtcaaaacaaacgactagcttctacttttggacacaaaaacatttttcgcaaaactagagctaaaggggacaacgacaccttagctttcacaaatagtttttgtactcaattaatgccatcctattcaggggtttcgatcctagggccaactaatgctctgataccatctctgtcacaccccgatccggcaccgccgtacaacggcacctgacaggagcgtgtcgtaggaaaaacggcgtgaaccgcttcctacgaaaccgcgattacagtaccagtcccaggacatagtgctggtacccacggtgacaaatatgaatcattgcaatccttaaaataaataaatgacttatttaccttaacttaggttgtagctcagaacagcccgagaatgcaaccgacgacgcggacgaggaaaacaccaacagcagcagcagcagcggaaccaacggactaacacccaacaccacaggcgacggctgggaaccaggacgaaaccctaatcttcacttcacatcatcttcacttcacgacggaggaactatatatatatttatatagagaaagggtgagtactttcgtactcagcaagtcacgggaattaggtgtttaatgcaagcttggaagagaggtaaggttgttttacaaatcctttgtttgaaatcatttagaaatcactaagtgatttatttctttctaagtttgggtcgaaaaggagacttgcgtcttgattcgacttaagagatgcttttcaacaactcaattggtaatgtattgacctcccgggtcaaatcattacttcccggctcccagagccatttcacttgattaagcggctcccagagcctttttcattttctcggactcctagagtccagctgcccagcagcacaacaatccgcttccactcgggaagcctaatctatgatgcccccaaacatcctgaatcacacagattcgtttctgaccactcaggtcatccatctgccacgtaggctgattctggtgacaattcccaatccacaacaacttttcataaagcacaggcaaacagatctacgtaacgggaaccacctcacatccgcccatgaccgtgggcacggctgttagaatagttagttaacctctgcagaggggcacactttacccacaagatacgaacttacttcgaacacccgtctgtatcggaggttcgcaacaaagcctttcccaagccgacccagggttacctcatgccacatagaaggatcaaatcctcacataaatataggccatttagttttcacaaatcaaactccaaccacctcgatcggtaatctggcaagcttcgcgttcttgccttaccaggaacccgggttggctccaaccgaccccacccccgcgttcccaactattggcatgcgaggtttccctgaaccgactagttacttagctagggtgtcccataccaccttgtggttgcactttgttatgcttgatgagtttcccacaggaatcgatccttatatgcgaatacgggacaacgccacgcaggcacaacccccgtatcgcgagttttcataattcatttattttcaaacacaccgaatacggggcgactgctgttttataggcgcggggtggggcgtcgaggagaaggaaccggcattggggcgatcaaggggagcgagctggcggttgtgctcggagctagcggccaaacggcagtggaggtgcggtggctgaggttggaaaaagagaaaaagaagggggaaagaggagcttgatcatgtcgtttcggggagggagagaagcgggagcgagagctctggctcccggttttggacgggcgcgggtggagcggcttgggcacgcgctgcagagctcgcggcaggcagcggggctgagcggcagggcggcatgggcggctgcgcggcgcagccggccagggcggacgcggcggcgaccgggcagtcgaccgcgcgcgagcgcgcgcgcgaaggcgagttcaaacggcggtggcgggagggagttcgacaagagggagggagagagaaacagagagaacgagcgacgctccctctcgactccgacagcgtgcaacgcacgtggtgggggaagagatgatgggctgggaggggagatgggccgtgggaggaaatccggtccacaaaacttgagggaggtaaaatagacttttccagagaatttgatttggagaatttgagtaggattttggaattgcaaaccttgaaattttaatttggtgaaatgtgaggaagccaaggatgggattcaaagcgggatttatatatatttcttttgaaatatatttgtatctagcgactccggggattatttgagagggattccaaaggaagggaaaatcaatattcgaagatggatcaaagggagatagcgatggaacgccatggataggtaggtaggtcaatcgatggacatacatatagttggatttgagaaactgatagttagatcgagtaggtagatagagcgataggtagataggtcgatggatagatagatagatgggtagatggttagataggttagataagcggatagatcgattgatggacatcgagggattcaaggacggatttgacattctccgaatccggagaagtattggcaaggaattcaaggacgggattgaattccggtgtttgatttcggaagttgaatcggaattggaatcttcaggtggaggattttgatggcgatgagagggaataacaggatttgaattgagatccagggcatgacttagactcacactcaaagaacgaaaattttcgcaattaggattttctcaaactagtttttaacgtctcacgaaaagcggagcgttacactctctctcccccactcacttttctctcccacctctcccctcctctcccatttttccactcctcacatcccgacggtgggctcgagttggcgacgacgggagcgggagagcagtggtgggctcgtgcgggcgcggcagatcctgtgggagcgcgacggcgggtgcagcgacggcaacggcgaatccggcggtatggagggcgacgacggctgccttggcaaggtcgggggatggcgatgccaatgaggagaggcggtaaatgggattgttggaattttttttcacgatttttattttcgtgtgcggactacataagcaccggcacacaaaaatccgattttcccgtgtgggtgcgtcacccacatggaaaaatgggttttgaccgcatgcaaaaatgttttttttatgtagtgttcctaaatacttcttcatgtgattttgaggatagattgctacctaatgatttaattatgataagaaactatggagaatactagcgagagagaggttaggagatggataaggtcacacaggcgttcaagtcaagttggagacccaactcatatcaagttcgagtctacctcggctccaagagtagtctgtgctaaaaacatcgcctaggtcatgttcggactccattttagacgttctacctatgtatggaaaactaacaagaccacctttccgatgggtttggtcttccttcgaagtcattggggatcgtcaaaacaagtggtgtccagaatctgtccgagtgctgtgtcaccatctttttgtaccgttgggccatgtatcgtgttggagtccaacagggacgcatccaggggtttttgatcgaccgtagaacctatatattcagtagttgttgtcgagttagggttgggttttgcttagattatttttgcaattgcagtttcaccgttcatcggtttgtgaaaccccgacatcaagttcttaatcaatcctctacatttgtgttgcaatattcttattcttgcttgtgtcttcgattcgcacgcaaggatagccttctcggcgaggtcaatcgggtttggcatggttaataaccagaggagacgtggtgctgctattacatggttcatattatgttaatcgaaagtcggatcgtgtgtgccaagattttgccaattcgatagatctctacttgacggaagattgggcaccccattatcattataaacttttcccaaattactttttgaacaaaggatagaaacaccattgaatctatgaaattcctttacaatattttttgctgatccatgtggaaattttggaggaaagtcacgaggccgcccggttcaacctcctgaaaaatgttttcctttgactttattaatttcttgattcctgcatctatctgcggtctatgtatcatgtatttttcttgtattttgtacttctttgtttttttcttattcatatattttatccctgtgttcgacatgggcaattcttgataaaaaaaatgcatatgaattttctttgaagcaattctacagaggactttgaaagcctcatgctagatcaattcctcaagaacattgtggagaaatgttattcctatgctatgaattttatttaaaatggttgtctatatccacgtagatgcatgtagaaactggtgggtttttaatccaagcagttttaatccacgagttttcttccaagcagttatacaaattaaattactcgcatataagaattatttttcattgtattcccctagtctttctcacaagccacaaaatgcttcaacccaaaattgggtgatccgatcccctctaaatcgacatgggctgtttgcatgttgatccatcatgaataatcacattctaaaccattcgcggttataaacaaccctacttcgtttttgaaaacaacacatccaaattaatcgaaaaaaaaatccaatcatacaataatgtgtttttcctataccccatttatgacacaggcgagttgaaagtagaacccgcctgtgtaaacattggccaagggatggaccaatgggccacctgtgaagaactaacttagaacacacaaacacatagatctacaacaaattatgaattatatcgagcaaaacctctgccccttagttggtcgagcaaaaacaaagcccctctctattcttcccaattgagctggggtgtgagagggaacgtgcatatatattatggacctagttttcccgattgagctgttggttatgtaatagatccaacacctgtaagctcataaatatagccgtgccagggctacttcataccggttcataactaatattggcatatataagtcgtgcaagactattcaaggcccttatatatgtggaagaggttatggaatcgaatccctcacatgtatgtgatctgtgatttttttttctttcctcgcttgcatgaaacttaaagcaaatctaatagtttaaaattacgtgaaagttatatataaattacaatgtaattgtattataattgtactatatttacatctattaagtttttaagaggaaatttgtagataaatatgtaacaaaatgttacaccgttattagctcatgggcaccaaaaaaatcttgtggttatgtcatccgcagaaggctccatcgtcgtgtgtctttgatgtttgtaccaatcaattaaactagatgattcccgcgtgtgtttttctacgagatatataaataaatatatgttaaatgttgtataatcatgaatagaattggagtgaaatattttaaaaatgatttgaagataataattactatgatgtggtatgtttgcatgctagcttttagaattaataataaatactatgcttacctattgaattttagatgtttagtgggtcgtaactttatagaacgtagaacatatagataaccggtatcctaattaagttcaagttcaacatgtcatcaagagtatatatatattcattaaggtacgtggaattatacttcctccatttctgaatagataatgttgttaacttttagacgtatatttgactattcatcttatctaaaaaatttattgtatccatctcatagaaaacaaacttagtactagaaagcgtcgatatagtctatactagttatttatgggagtgtgagctagtatgtaattataatttattttgttgtgagctttttatcgctaaaagcactttacacatgatttatttcttagatatttgcgaatggttaaatgtgtatgaaaagtttacatagtcagctattgaaaacggaggaattatgggcttgtttagatcattgatagaatttttcaccctgtcacatcgaatgtttggatgtatgtatggagtattaaatataaaaaaactaattacacagattacgtgtaaattgcgagacggatcttttaagcctaattgctccatgatttgataatgtggtgctatagtaaacattttctaataacagactaattaggcttaataaattcgtttcgctgtttataagaggaatctgtaatttatcctgttattagtctatatttaatacttcaaatatgtgtctgtatactcgatgcgacacgccaaaactttacaccacttactccctcggtaagaaaaaactcaaacctatgactgattatgtcatatcacattcctaggttaatttttttttaacgaagtgagtatgtttttacgctgacttctaaaaagtgagacgcctgcgtacggcctgacggtagtacaagtactcgatagaaccgtcgatcgtaaattattgaagagtgaagaaaaaccccgtgcactgcaattaattgtcgtgcatccctccctgccattgcacgttgccacagcagatggtccggtcggtccacctcccctccattggtgaatgacaagggcacgttggtgggtgaagtgaactgagtttatcgtaattatttgagggcataaaaagataaattaaatatcacttgaaaattaatgattttgatttaagaaaagttttaaaaggaaattctaatgaacaaacttttttttaaaaaagtatattatttagaagcttaaaaatggtgactccgataatacgctagctagctattcccttaaaaaatgccctattatttgatgttcaacttgaagcatgcaagatatgcgggccgggcccaccaaggcgtgctaggaagaaaaagcatacaggtctggttccactgcagtaatgcagaagttcactaatagtgaacctttacattactgaggggatctggattttaagcgcactttattacattagataatatactcctccgtttcattttaaacgtagctattagttttcatgtccaaatttcatcgtctattttatttaaaattcttttatgattattattgttgttgttattagatgataaaatatgaatatatatttttttaaaaaaaaattaataagacagacgattaaaattggacacgaaaacttattgttgtgtttaaaatagggcggagggagtatatcgcaaaccgatctatcgtcggcggaaccagaatcagccgtacagataagtggcgctggtcctggtgacacgtaaacgaatatcgtggagaggcacatccatgggccatgccacgtaccgtcccgtacatgcatgtgcacctctggcgacattgtgggcacctcctggctcagaaacggaacatgctatactcgatcgatgacaattaataacgtgtggggggaagaaacgtgttacctctaattttaaatagtgaatttttactctctaaacctgttcatctatgttacccatgtttctaaactcttaaaatatatttagagtaatttttgttgaaacccttattttcataatcaattatgactttaccttttttttccttctatatagccatatttacttttagaggcaattgtgtctctgcccttgctttacatctcaattgtgattttacccatactttttagggtttgtgattttgcccatgctttttttaaacagggtagctgcctgcccctactctgttaactgatggtaacggtattaaatgtgtggtgaatggacgagtatacccctgacatgttttggcttgcacaggatacatgtttcaagttaattttgagcaaatttcatatgggaaataaatgttcacaaattttgtaaaagttgatagaacacaatattttggataattttgatagaactttcgcaataatttgaacacagtttataaacgatgtcagaacaatatttttgacaaaattttgacagaaattcatcaataatttggacacaaattatagaagataacagcacactatcaaggacaaaatttcagcaataatttctgctcgctgcttgctagctcgctgcaagcacacttcctgctcgttgcttgctagctcgctggctgcggggccaccggccgtggcgtctccctgcgcgtgcaacaccgcggggccgcgccgacacgccgacagagccgcgccgctcctttccgacgctcctcagtcgcggggccgccggccgccgcgcctccctgcgcttgcaatccgcggggccgccgtgccgacggaaccgccgctccgcagggccgccgcgccgccgcgtcgacggagccgctgctcctcggggccaccgcgccgcgcctgcccacgcccgactccaccgcgcgctggcccgagccgccgctcctccctgccgcgcgccgccgccgcttgcaacccaacaagctaggtttttcgattggatcggggacagcaaggtttggggatttggttgtttcattgaagcaagggtagaatagtcattcacaaattataatagcattttctttgggtgtagctatatttatggggccatatttttcatgaaaaaatagtcggcatgtatttacattgtaagtccctaaattacatatgtaattttagtgtatttataatgtaagtctaagtactaaaattacatatgtaaattcgaaaattacatatgtaaattcgaaaattacatactaattacatatgtaagtggggtgtaaatgaggtgtaactactgtgtaagtggctgaaaaaaaatcgattgtagcatatggcgccatatttctagcaactccgttttctttcatcgtttaattcggaaatcctgggcccatgaaactaccatccaaactaggggcagacggctgcttcgtttcaaaaaagctggggcaaaatcacaaaccctaaaatataggggtaaaatcataattgagatgtaaagtaagggcagaaaccaaattgacccttacttttattattgacgaaagcaagtgaacccggaatagttgagcgaaagaaataggtcttttgtaaatcttgagttacccttctatccttgctggtggaaggaaggagaggagctcctggatggaccacatatataccgatgtttctccatccaacagcaacagcggcagtgatgactcgggcaggcggcggcagcgctagctgcatgtggcgagctgtagtaggcggctgtagcgacctcgccaagggagatagatctaggcaaggtcactacatgcttactggaatactccgtattgtagaaattgcgatctactaagatataagtgctaagcctaacatgatcaccctaatgcggaatccttaggttactgaccgttgtttgaagctattgatgctgttctccctgttcttgtcggtgtagaggtagtagtggtagcagtagcagtgttgcaccggcttgatccccaaggggtcaccggcgatcacttgcggggtagcggcggccttccggtgccacctacactgtcccggaactaccacacgttctccctccagcgctcaattgattggatagggtttttgggattttcggggagaagaaggtcgtgaagagatcgtcatctcaccacgacaccagcctcccctattagtatggcgctgagggagatcgggggcaatccaaaatatagaaagatttggcgctaccgatcaatgcgcgtaatcacgtaattatggaaattgaatcgcgttaatcccgtaggcaccaggtggaaaacggccatccgagatttcctctcgatttccatgccgagagataaactttcctaacattctccccctgatcttgaggctaatgagtttattcttagaaaaatagatttactaaggcaacgcatcagggtagttatcatatcctaccaagactccggtacctatagttcactataaaacttcgaaagaactctatctaatcttaatgggagttagttaggactaagactaatgcctctatttctaggatcttagtcttaatcaaaggcaatcagttattcccatgccggctacatgatctttaaataaattgggaggtaagcctttggtgagcggatccgcgagcattgacttagtgctaatatgctcaatcttaatggtttgatcctggattctatctttcacaacatgatacttaatgtcgatgtgtttggcagcaccactcgacttgttgttacttgaatagaataccgcagctttattatcgtagtataatgtaattggtttagaaatgctgtcgaccactcttaaacccgggataagattcttaagccatacggcctgccccgttgcttcataacatgccaaaaattcagcctgcattgtcgacgatgtagtcaaggtttgtttagagcttttccatgaaatagctccatttgcgagagtgaatacataacctgatgtggatttcttagtgtctacacatcccgcaaagtctgcgtctgaataacctaggacttcaagttcttcagacttcttatatgtgagcatgtaatccttagtgccttggaaataacgcaagacttttttaacagccttccagtggtctaatcctggattggactgaaatctgctaagcatcccggtaacaaatgctaagtctggacgcgtacagacttcagcatacataaggcttccgacagctgaagcgtatggtaccattttcatctgatctgattctaatttatttttcgggctttgaaataatccgaatttatcacccttgactattggagcaggtgttgcagagcacttactcatattatatctttttagtactctgctaatgtatgatttctgagataaccccagtactcctttagacctatctcggtgtatttcaatgcctaaaacataagatgcctcaccaagatccttcatatcaaaattagatgacaaaaattctttagtctgatgcaacatattaatgtcgctgcttgctaacagtatgtcatccacatagagtactagtattataaattttccacccttagtcttaatgtaaatgcaattatccacctcattctccttaaatccgaatctcttaattatttcatcgaatttaaggtaccattgccttgacgcttgtttaagttcatagatagatttcttaagtttgcaagccaaatggtccttgccttccataacaaaaccctcgggttctgccatgtatacatcctcatgcaattcaccattaagaaatgcagtctttacatccatctgatggagctctaaatcataatgagcaacaagcgccatgacaattctaaatgagtctttcttagagacgggagaaaaggtttcattgtaatctattccctctctttgtgaaaaacccttcgctacaagccttgccttgaacctttcgattttccctttggagtcaagcttagttttgtagacccacttacagcctactgttttggatcctttaggaatttctactaagtcccagactccattatgactcatagattttaattcatcgtccataacttcaagccatttggatgaatgttcactcgttattgcttctttgaatgaggtaggatcatccaccttcccaatattttcacctaaataaacatcataataatttggaatggcagatctcctctcccgttgtgatcttctaagtggttcattttcgatcactgacggttgagaaggttcttctataatttcttcattttgtgcctcagaagtctgttgagtgtcattatttaattcattattattttcaacagagtcggtatcaccagaattttcatctggtgctaccacggtctgagtcacaggtacaacatgaggtaccaaatttattggaatattattctcttggatttccggtgtaacattagcccgaatttcctcaagattaatttctcttggacttcagctgatcttcactatgtttctgggacaatctctatctcgatttccatctcgattcctcctccacatctgatccttggattaccaaatttggtcgttaacactttcctgtgagctccccaagacttcattattttctaagcatacgacgtgtcttgtttccacaaatttagtgacacggtccgggcaataaaatcggtaccccttagatgtctcagggtatccgataaaatggcagcttacagtcttaggatctaatttctttagttgtggattaaatattcttgcctcagcacgacaaccccacacacgtaaataatttaatgtcggttttcttccggtccataattcataaggtgttttgggtaccgacttacttgaaactcgattgagtatgtgtgcagctgttttaagtgcctctatccataaattcacagacaaagtagaatgtctaagcatactccgtaccatgtccataagtgtacgattgcgacgctcagccactccattttgttgtggttctctaggcatggaatattgggcaattattccatgtatatgaaggtattgggcaaatggaccagaactttgcccataaggagtatgtctcccataaaattctcctcctcgatatgatctcactaccttaatttttgcattatgctgattttcaacctcagctttgaatatttaaacttatcgagtgattcagatctatctataatggggaaaacatatccataacgggagaaatcatctgtgaaggtaatgaacgagtcatatccatcaacagatgttactgggaacggtccacatatatccgtgtggattatctctaatggacactgctcctagtagctcctttcttatttttttttagtgaattttcccttaatacaatctaagcaatgatccgcatttgaaaaatctaagggttgaagtatctcttccttaatgagacgctccattctccccttagaaatgtggcctaaacgacagtgccacaattttgaagacgtctcattatcattacatgcattcaatatattcataatatgattatccaaagagagcaaacagagcttgtcttgcacactagcaagaccaatatcaatattattatacttaataaagcatttgtccttagaaaaattacaatcataaccactgttcgttaaaaccattacagaaataaggttcctcttaacagagggagcataaagaacatcatgaagtaaaagattattgccgcttggaagtcgaagatgaagctccccaacggccatcactttaatttcagctccatcagccactcttaggatccgctccccctttcttagcgtccttacggaacggaatccctgtaatgagttagcaacgtgcacagtggcacctgactcaatccaccatgatttatgagaaaattcaacgtaaagtaattcatcaacattagagacaatatcaacattagtacctttcttagcaagccaagcccaaaagccttcacagtccctctgtgcatgaccttctgcctcgcaaaacttgcaaaggaacttaccagcagagttctgacctgctggaacctgagatttgcccttatgagcaccattagaagcctgagtggaaggagtgttgggcttcttcttcttgttttgggagttgctggactccccttgatagaactttttcttactgcccttagcaccatgaaggaggttcagctgatccttatgcttctatttgtcagccttctgacgatcctcctcctcaacagaatgagaaatgagttcttcaatggaccacttatccctctgattattatagttaataatgaaagactcaaaatcagaaggaagtgaactcaagataaagtggactagaagatcatcattaattcccatgtccatactcttaagctctccattcatagcacccatctgcataatgtgctttctcacaccatctttataattatagcgcatggacgttaggcgcttaattatagagctagcataagacttagaagaactcctgaagttcctatcaatgttttctaagtatgtcttaacatcatcagagtcctcaataccaccaataatgacatttgatatggcactcttgatgtacatgagagaaatcctattggacttctcccattcaatagttttctcacgatataacttcagtttctcctcataatcgtgctcaacactaaaaggttcctcaggacggtcctctctaatggcataatcataatcgagtatgcctaagttgagtaacacgtcagccttccacttagcccattaagaggctcaatgagtcagatctgaccaaaagctgaaaaatcatgaagaaaaaatattcataagtacatatatgcaattaatatgcgttggctcaattaattacataattaaacagaaataaattcccctaattacatcaccgttgggcagaaataattttgggaaacataatcataaataaattttcgtgaatttataatcaacgttggtcaaaaaataaattcacatcatgaaaaaacaaatatctagccaaatttctcattggttccatttagctagaattaatttataaacagtcataaattttttcataatttttcagcaatttttaagcaatccaaaaaggtactaatgcaaatctgtaaataaaaatacttaaagggaaatcgaaaagagaaaatggccaagtacacattatagcatcagcccggccagcttgggaccttaacgcatgcggcccataatgcacagcgcggcccgtggcgagatcgatctcagccgtttgatgtaatagacggtttggatttatcccgaatcggaaaacatatagccgccggctgtaacactaaaaaaaaatcttttccccaactctctctctctccgaaaagaggcggcggcggcgatttcgcggcggagggggcgcgcagcatgaggcggcggcggcacgcgcgtgttaacagtgaaatttggtaagcccggagtagtcatcggctgagagtcagcatcggcttcgaagtcctgagattagccgatgagaattgtcaagtcgttagtagtcagattcctgctatattcggttaaggaaatcaatctactaaaggaagcttatccctaagtgaccgagtttaaagaggatgcggcatggcagtttatctattaattaggaatagtttgttagtttccttttatctttggaaaagtgtgtttagtgtccgataaggactttatattttccttttttctttaggttagttcctttcttgtccgacaaggacttgtatcaacccatgggtataaatatgtacacccggggtctatgtaatctatcttcacgatcaatgcaattcggcgcatcgccaccctttttacttctacttttgttttttaagttccgacggaacttggcatcggtgttcgatctccggcgaaagggtaagtccaatgttccgtcggcccaggcaattgtatcgtttacgtcggcgtcgttcaaggctgcatcagtacattcgacctcttggattgctctggtttggatgatataattgcctatctatttatcatgtctctgttaatctagtcttagcatatcaatttaggtctatcggctgtctcttgctttagggttcctgccggtatcggctaaatcgcgttgctagattagattagcctaggcatctaccaccgtgaaaatcagtcaacggcttgattctctagatattgtgtttcttttcatacttagtgctgcatcagttaagtttgatctactaagtcgtgcttagaaccataatctctagcctgcttattgattgccaataagggtttcatcggggtttcagccgatgagttatctggacgttgcatcggcccataaggattgcatatacatataagttggatttagccgatgacaacaaaggtttcattgtttaatccaatcttgtggatttcatgacatcggacctctagccgatgggtgctttaaccttcggatcaatacttgttctactatatcatattgttagccgattggtttctactggattatattgctatattacatcatcatcagccgattgcctttatatcattatctacatttgacatatagccgattgcttaaaccctatcgctatcggctggtatcggcatcggctattttcggctatcggctggaactactccatcggcttgtcagccgattggctgttttgatctactatttgcatatcttgtcggttgcaggattaaactgactggcacgcccgcatctcatcaatctttggacctgcacaggagctaagcatatctctcaggccggtgtgttcgattttttcgtcaacacagattagccgatgagaattgtcaagtcgtcagtagtcggattcctactatattcggttaaggaaatcaatctactaaaggaagcttatccctaagtgaccgagtttaaagaggatgcggcatggcagtttatctattaattaggaatagtttattaatttccttttatctttaggaaaatgtgtttagtgtcggataaggactttatattttccttttttctttaggttagtttctttcttgtctgacaaggacttgtatcaacccatgggtataaatatgtacacccggggtctatgtaatctatcttcacgatcaatacaatttggcgcatcgccaccctttttacttctacttttgttttttacgtttcggcggaacttggcacctgacgcggggctgcatcggtgttcgatctccggcgaaagggtaagtccaatgttccgtcggcccaggcaattgtatcatttacgtcggcgtcgttcaaggctgcatcagtacattcgacctcttggactgctctggtttggatgatatatttgccttcctatttatcatgtctctgctaatctagtcttagcatatcaatttagctctatcggg

SEQ ID NO: 7685 - DNA, 36466 bp, Oryza sativa
tcatgaatgaatgatccatgttctatcctattcacttgtctttctgagctaagaatcctttggagttgttactagctagacaaaaaaatgtaccggcagtgagatctctgctaaaaaatgtaccggcagtgagttgttggttagtatgttttgttatccgcttctctataggatggaaaactggaaatggaaaacttccttttcttttctttttttactacagatgattggtgcatattcgtgcaaattgtagattaaaatatactccctccatcctaaaatgtttgacgccgttgacttttttttaaatgtttgaccgttcgtcttattcaaaaaatttaagtaattattaattcttttcctatcatttgatttattgttaaatatacttttatgtatacatatagttttacacatttcacaaaagtttttgaataagacgaacggtcaaatatgtttaaaaaagttaacggtgtcaaacatttaggaaaggagggaggatatacaagtctgttgctattttcctttcaaagaggtacttttgggactgtttgagctacctgctccttagaaaactatcttaggataagttcgtggtgacgtcgatcaattatccatgtactgaaaaggctggattcgttatgcaccaaacttttcagagtacaactgtacaagctatagcatgcttatgccgtagtgtactattgtccataattttgtcttggtgtagtatgattcatgcagggaagagtagaggctgttacagtattgaccaagtgtgtacttcacccactagatagttgtacttaatttggtttctgtacgaccctatacgagctaatctgtgacgactacactctacagcacttggtctgtaagttgggtctggttgttcccaattttttctttaaacttttaactttttcatcacatcaaaacttctaattttttcgtcacatcgttccaatttcaatcaaacttttaattttaacgtgaactatacacagccttggcagcatttcaagtcaaaagttcgaaccagctgatagatgatgaatgaaactgagttcatgtcacattatttaagggcacccaagaataaattaagggcccctttgaatcgtagggtagaaaaaacagaggaataggaaaaacattggattctgacaggaattgaagtgtaaaaaacagaggattgcaaaacacaggaaaaacataggaatggtcgtttgattggagcgtaggaaaaacgtaggaatcggatgagagagatagactcaaaggaaattttccaataggttggagctcttgctaaatttcctccaaaatccacatgcaatgtgccattccataggaatttcatagaatttggaaagcttcgatcctttgaatcaaagggccaaataggaaaatttcctataggatttgaatcttatgaaatttctatataaatcctttgattcaaaggggccctaaatattagaaatttgagaagtttatttattgaagttctctatgtaataccgttgaaaggttttacaaacatcacaccgtttagaaattttggaaacctgttgggggataatccacgatgttgttctgaactaaaattgagtttggaattttttttcttcatgtgcaaacaaacaacaacgaattggcgttaagattgtgacatcgagattgaaaatatatgtcctcatcttttagatagctgaaaatgatgaattatttttatggtagctatttgagggtataactgaatgaatcaatcactataaagttaaaatatttgctttagaaatctattacaagaaaattttatataacctttaacactaaacgcaagcgcgcaaagaaaatctagaatgagaaaaggaccaaacagggcctagcacatgtatctccaattgcagcagaagttaaattctctcttgcaccaagaatacgccattaggccattcccaacccaataactagaatggtgtccatagtattaaataagctgccacataggatgaaaagtgatgtggcaagtgaataaacgaaaaaagagaaggaaatcatgtcttgcatgagacatggtttctacacaacatctaagacatcatgtgagataagtagtattaaatttatgtatagaatagtagtatttgtattggaagagtggtgcctactactagttttttgatgatgtggagtttatagaaactatgtcagtgttttgggttgggaatagccttatgctacttctaaacaccttccaattcacaacgttttgactccgttttttttttcataaatctggcatctcagaccccacttcatcaaactgtcctgcataatgtagctgccaatctctgaactgcagaaggtccaaccaactggcagaatcaaattttgctgctctctttgtaaaataaaaaaataaaaaaaaatccaagaaatacttgactggttagctggtcttgttaattaatattaatgggatcttggattcccagctgactttgcaaagcaaacgcattcgagtaagtatcacgctggctgtacacggttgctcatgtaactagtataatatcctgaactaaccccctaattcatcattatctttgtgctactatgatttcgcccatcatgaaccataacattatttctgattttttttttgtacaatactacaatgtgaattataatacatttgatactagctacctggatgggtgtttagtgtcatgcatgcaagttcataataattaattaaaaaaatcaacactgaagaaaaacacccataccattggtaggtacgtagacatttccccccttaattatcacttttttttctagcgaaatgtacaagaaagtctacatcttgacaatctgactatatgtatattttatatatatatatatatatatatatatatatatatatatatatatatatatatatatatatatataaccaagaagcttaatcttaatttaatttcaaaaagaaaaagaagagaaaatggtcccaatggtcgagtagtagtaattaattaattaatcagagaaggagaaaaaaaaatcaggcgatgatgcagccgtagccatcggcctccacctcgtagaggacgacgccgccgccgggggcggcggcgcactggcaggcggggcggcaggagttgcagccggggcagcacggcggcggcggcggtgggcagggcggcggcgggtcgggcttcttgggagggtcgtcgggctttttgggcgcctcgggcttcttttccggctcgacgctgacgacctccgccgcgaacttggccttgcggagctcgcccaccacctgcaccacgtccacctcccccaccaccgtcatcgtccccttctcatcgtccgccgccagcgacttcacccctgcaaaattaatcaattcaattcaattcaattcagctccatcgatgatgattcaagctgcagttgcacctgattcatccaacaaattagtacctgggatcttggccaccacggtcatggcgacggccttgcacttggcccggacgaagtccaccttgatcacgatcttctgcaagatttcagttaggattaagtctctaatataatcgcaatgcatatagccatatacgacgaactggaagtggaagagaggaagagcaagctgaccttggacgacatggcgggcgatcgatcgagctagcgcgaggaggaggaggaagacgaagtggagcaggtgaggtgagagggtgaggagctttgatgctaagaaagggaggttgcgtgtatctcgccataattgaatcagtatggatcgacatcgatctgcgtcattatacgagctttgcaaattaaactaattgtcgtaactattccaattcgattgattagtgtgttaaattgctgaaatggtcaacagctttaacgaattctttgttttttcttttctctctctgagcacaatgctttgcattagagaacgcatttcacatttgttcttctcggaggtaagccggcggtgtcagatcacccgtacttttgtaaatatatttctttttggtgagttgttctgggtgattgatctgatatatatatgagattaaataatcagaagggattataaaaaaattacagctagtgttttgttctctcaaggcagagattgtgtgttgaataaatattttattgccgatcacaatcttataaagaatcagtgcactttattttgagcgataacgatttgtctcaatcagccgcctcttgcctttttctaatcttctcctgcaatctgtccctagtaatgcacaggataatatataacctttaactgattactcgttaagtttcataatattatctcctttttttttcaagaatccagatgcggcgcgctcttgttaattgcttcgagaacgtggatgcatgtactttctctgaactcatcagaggtcaagcacgaagacttttgattacgtagatcgaggtgaagcctgattaaacattgatcagtacgtatgacagtattcagtcagcagtcactctctcagaggatgagtataatactacagattagaatgttagagagatgtttcaaaacattttctctacactaatctaaggactaataatccatccacgggaacatcgtgtgcgtgacatgagggattggtatctccaagccaaaatttgcattaatttttggtgctacggaaaatcatgaagaaatcgagcccacaagaagtttgttaaggaggcctaataaggtactcccccgtcccattttaagtgtgttcaatgtttgttcgtccgtcttatttaaaataattttctgattagtatttttattgttgttagatgataaaaataaatagtactttatatgtgacttatttttttatatttttttttcaaataatacaaatggtcaaacgttggacacagaaaaaacacatgggacagaaggagtaataaatagcacataatgagtcagtagcagattgatatctatgtagcgaatcgcagacaacgagcattatagcggacgctaggttccaatagcaacatttaataaccacgcataaatttgagtatatgccatgaataatgatcttataaaacattaacaaagcaactgagaaacaaattagaagcaatactcatataactgagtataaatatagatttagtagcaatcgaagagttgatgtcttatttcaactcaaattaaattaagaagtgaacatatatgatgttctactcattatatgttccgactcacaagaatacaaggttttaagagacaaaacaactaataaactcgtcatttgttatgggttagtagttatataaaatggccttatgctatagcagcccgcgaaacaaaaatagttgtcatttgtacttttttttttaaaaaaagcgatcacttagttccaacatgctatgtcatatcgggactacctatacatttgtcgacaaattttctcctaaaaatttgacagatgtaattatagtacaatcgtagtataattatactgtaacttgcatgtaactgtagtgtaacttgtatgtaagtttcacgtaatttggaatcattagatctattacaagatttgttctggtgaggaagaaaaaaaattacagcacacacatatgtgaaaggatttgtttccacgacctccattttaccgaaataacatgttacagagagatttttgaaagttacattatagttacagtgcaattacatgcaagttatagtgtaattacactacgattgtactgtaattacatctgttaaatttttaggagaaaatttgttgacaaatatatagtaaaattgtgtcatatccgctatcgccatgacgccggttatgaacactatttatttattagttgggcttaaattaaacgaacggatagacaattacgggctgaatttacccacatttttgggctggatttacgctccactttaggccggagttgcgagcagttctggaccgaaataacgctcgtggttgggccgaaattatgcgcactattgagccgaatccgctcgaagaaatgggctgaacgaacacgcacttgtcgtcttgtcgcctcaaaatttcctctctcctcgccaccgtcttttctgtttacgagctcctctccaaatccccaaaaccctaatccagccagccgccgccgccgccgccgccatgggaggaggaggaggaggagggcgcaagccacgcaacttcgccacgttccggctgttcccgcgcgccggcgccgccgaccccaacgaccgcgtcttcgtccgcgtcgacagcaacgactacaccgtccccggcttcggcgacgacgacgccttcgactcctcatccctctccctcaccggtgacgccgccgccggcgatcacttttcttccgcctccggccccctccccgaccacgtccgccgcgagatcctcgagctcggcctcccggacgacggctacaattacctccaccacctccgcgagctccgcccctccgccgccgccgccgcctcatccttcgcgcccaaccagactgccccgcctctccccctcgacgtgaaggtctgcgacttcccttcccgaaaccccaattttcgtttctcctgctattcggttgtctgatgcttaggatgatatgctgttgttttgggcgtgcaggcgtatgatgccagtagggtgcggattgcttctggcaatgttgaggatgagatggacgaggggaggacgatgtgtaaggtggccgcgaagacagcgcctgtgaggcggattgagagggcggttgatcctgacatcgcgaggttgctcgacgagaccgatgtctcccatggcgggtcggaggatgagggactggaggaggattttgtcatcatggcaaaccgggctgagggggatgaggaggaagatgatgatgatgaagaggagaaagtgatggatggtgtgttcttaagtgatgttgaagagaaagaggagtttgaggatgatgagggtgagcccaagccgagggtccggcggttgctggatgaacagtttgatttggtatgcttcgtttgcattttgtgtttccttcagtatgatttcacatacaccatttttataggggcagtataactttccttccttttattctataggggcatattacgggactacccttatagctgcataagtttctaagtatttatgtgcttgtcaaatatatatttttagagtaaatttcataaaactacagatactatgaccaaattatcacaaaactacagatttaactcagtgtatcacaaaactacacatttaacaccaaatttatcacaaaactacacatttaagatgaagtgtcacaaaactacatgtttagtaactaaattatcataaaactataggtttagaaccaatttaatcacaaagtaataatgtttatagctccacataacaatggtgctagggatttaaactccaaaagttgtagttttgtgataagttcaatattaaatatgcatttttgtgatacttaacctaaaatctgcagttttgtgataaatttggtgctaaatgtgtagttttgtgatacaactccttaaatctgtagttttgtgataatttggtcaaaatacctgtagttttgtgaaatttactcatatttttatcattgtgtagatggtagatctgaagcttctagattgaagattacgcataatggatgactgtgttcatatataatgctggtcatcaaactaattgagcataccataccggatgctgtatcttgttcaactccctctagttggaagcgtatgttgttttagacatgcatccagttgactttcgaaacttcgaatatcaatacactatatagtatatttgtctcaagaactttcttgaatattatactttttacacggtctgatatacataatgcactaaaagttagtggtcaaactactgttctagatagtgtcccattgtccaaaattacatgtattttatgaattgagggaatcatcaccagacgcctaatcagtcatgtctttctacgattagaagttcatcgtgcaaatttggactcgtttgttttgcgaatcgcaaatggtatgcccaattctgacttgttgtgaatcaacttgcagcttgctttggaagaatatggtgacagtgatgatgatgatgatgatccaggtgttagaaatggggaatgtgaactgcctactgaggttattgatgaactgaaactgttccatagtcaaaatgtatctgtcacagaagaatatagaacgccggcagattttgttcgtagaaaattggattcaagcacagcagaggaggtggatgaatctgctaatgtaatccaaaaatgtgctgaatatgctgaaaggtatttaaatgaaactgctgaagaggaagaagttgtacttgtttcagaaagcagtgatgagtctgaagtttgggactgtgagactattgtttccacatactcaaatcttgacaaccatcctggaaagattcaaacaccaggaaatcctaaaaataggctccctaaagtttttcctggagaaacagctacaacgaaagatatcatcaggcttcaaggcaaagagagacttccagtagaatacctaccacagaggaaaagaaatggtgagaaggagaagaaagcaaagccaacagaaactccaagtgctgaaagttttaagaaaggagctcaaaaggaaacaaaggaggaaaagaaagcaagaaaggtaaaagagtggttttaggatattcttgcaatcatgtactgttattccttaaaacagtagagaataccgggaaagcattttaattgtgtttatttgattcatttggaggcttcaacggttgaccaaatgtatgctgcattatacctgcgacctatgtagtcatttcatcatttgtagtataaaaatcttgaagtactaatctttaagttgtctgtaggttcaagtttagtttaaacttttttcaagataaactagcgttaatttatggtacaacagttgcctagctattagcgtatttcttggtggttatgttgaattgataagtgttcttcaagattacaatgtgttcctagctggagcagtgttgtaaaatgatttgtaaatcggcttaatatggtgaaccacttttttttgttttaataatttttaaattgtttattggtatgtgtaacatccttgtcatctgggctgtttcttggtatacatgtaggctgcagtgaaagaagagaagagagaagcacggaaagcaaagaaagagctgaaaggcctgtacaaatttgaaacacagaaggctcagaaggttgctgctgttacagggccagcttctatacggctaatgtaagtcaccctgttgccacgttacaccatctgaaatgaatatgcccaaaggttttgacttattgctgctggaagaaatgaaaaagaactccgccactgtttgctccttagataaagaattcagcggtagtgttatgtcaagtgaaatgtagatatacccatcctgggtagtactatctactgcagaatatgatccaattgcaagtttgcaacaactttgatttgggcatcgaaacagctagaaagaaattcagaactcagaacagaagatatttgtgtagacagctcacgaagtgttgtcaccttttaatcttgagtgaattcttcccttcccatttacttgaattttattttgtcctgtttttgctgccaacatcaaaaacaattaagggaagagaattaagaactatatagttggcagtttctttgttgtttgatgttgtaaaaccaatttggtttcatgattgcacctagctctgctctgctttgcgctacacgttccttcttaggtttgatgtaaacactttttagtggatttatacaaatactctctactctctatactgatttgactcttttttacttgatcaggtaataaccatgttgatttgtaaacatgttctgcacgataacgacgcaatgtgagtcgtaaggagatcctcatcctacaaggtacgacggcaagatatgatacactgatacctcctgggtcatcttgtgccatgtttgtggtttttgtcgactagatacccagtgtataccatgtttggacttctgtatgagaaatatgtcgtgtaagacgtaggttatctaatggacacagtggcgctattttgaatgtgattttacactgaagttacccaagattttcaatctgcatatacgcactgcaaatttcctctagaaaagttgtgctctaagcacaggctgcaagaagggttttgaagactggttttgccggaaaagaactagtacaaacaaaagttgctaggcagacaattttggcaatgttttcatagatctaggctagtctacataatagatccgaaatggatcaaagtgttgataaagtatctttcataggacacttcacaaaataagatatacatacaactgtaaaaattgatacaactttgatagaatggcgtactgggaatacacgtgagtacgttgttttaatactccctcctattttaaaatagaaaaaaaaagtcaaaataactccctataattagtttgaaagtccatctagcattctgaagtttaaaaccgaacattcaattccctaaactttacactaacattcatttaacaacctaacaagcttaggtgtgtttggcaaatgggatttgagagatgaatggctagggtatgtttattaaatgggatttgagaggtgggattgggaaagtgaaatggatgaatggctaggattaaatgaggtgtgaagaatggatgactatgatgcaatattgtcttttggagggtgagatgttatttctcaatcacatttgtcaaacaaagccttagttggagggggtaatatgaagtgaactgtattataaagttggatgggttggatgtcctaatttaacaatggacttttcatataaagtttagaggggttttcagacatttctttttaaaatatagggtgtttttttattaagtttaactgattccccgatggatttggatacaccatcgtgctcttcaactcgttctgccgtgccgccgtcggtaacgtccaaggtctcctcgcctggggactggggagtacatcgaccctggtccttggctcctgagacagcgtgtggtctgtctctgtgtcgagcgcggttacgaagcctccgctacatgctctggaacccgtgctccactgcctgcgccactgtctctccccccgggccagccgcgacggcggccatgcgcttccaccccctgcaccgcttccggcaaagtccgcaggtccccttcccctagaatccggcatgtttctcccgactgcctactacctccagagaatccgacatggttaggaaggcgaataggtaggtgcgccaataacatccatctctctaagatgcagggaacccgctccgtcgtcctgcactggctggttgcagctgcaggtgctcgtgttcgagctcatgcctggcgcacgagatcaagttccatcgcatttgttgccaattagcattcgggattgctaaaaaaaactttcgacagatttttgggtagaaatatactctgagattcgtgctctgtgtgtgtgtggtgggggggggggggggaatgatttcatctgagattcaactacagattgctaagtcttgaacccgcgacctccccctcgcgcgcgcagcctttgagctttgccaagtttactgtacttgcaccctactccctccatatctgtaaaggaagtcgtttaagaaaatgtttaagtcaaaccttagaaatataaatcatgaataactcttgagttgttgagtttgaaaatgttaaaattatatgaatagatatgtcttgaaaaatactttcataaaaatatacatatatcacttttcaataaatatttttatagaaacaagaagccaaagttgtattttagagaccgtatcgctgtccaaaacgacttcctttacgagtacagagggagtacttacattctatttacattatagttatatattaattatattacggtgcaactgcatttgacatatttttggggactttttctgttgaatgttagatagacattcccttagtatttatacatatttatttcacgatataccaagttaatgtggactattcattgggcattgatcaatttactaaaagctgtaacaccccaattttcgtgtggcattaaaaactaatttaataaaattatatatacgaaaattttgttctttgagtgttgagcttaagttgtaccctagatctcaagttaaatccctcctttgttatgtcttcatgatgccaaaaatcaacccctccaaattttcgttccaaagtaatatcttccattcagatttctctactaaaaccctatccacaaatttcgtcgaatattcaaattcaagttcggttcaacaattcacctccaaaccctaaactctctcctgggtctcctgaaatccatactcgaatttgaattcaaactctcaagtttcatccatctctctctctccctcgctctatctatctctataaccctttgaatcctttcccgaatatttgttccaactccaaggaaaattccaaattcaattcctttatttgaaccccaatttctaagattatttcctttctccttaaatccctcccaaataattctccaagccccaaatataaaactatttcaaaaatatcaacctcccacttcgatgtcccatgcttgactcctacatattttcctgagtccaaatatctaatttgaattcaaatactcaaaatttgaatagtcccttaatacaaaacaaacattatattaaaatatatttaatgctaaatttaataaaattaatttcgtgttgtagatgttattaattttttctataaacttggttaaacctaaagaactttgactaaaaaaatcaaatgacttataatatgaaaacaggggagttttttcaacgggggagcatgaaaaaacttgcttgctcaccccacttgcatccatggagaagcggtgcttttgcagttatcccacccttccaatacttgcccacaacaaaaactcacgattgtacgcatccaattcgagggtggtttcccgattgaagatgggactagggctgtcaacgagccgagctcgagcgagctcgcctgcctaggctcgagctcgatacaagcttgagcctatcgagctcgagctgagcctataaaatgttcgaattttcaaacaggcgcggttcaagcttgactaccaagctcgagctcgactaccgagctcgaattttaattagaacaatttatatttcaaaggatattttttaaaaaataataatttatggtttatcatattagtagaagaggaaaaagaataaaataaatatatgctgccaatacaaggcatacaaataacatatttgatcttccaatttattaaatagcaacaaaaaaatcataaattactagtctcgttagaagcttgagctcggctcgacaaagctcgcgagctttggaacaggctcaggctcggctcgtttggagctcgagctgagctcgaatcgagcctaggatgagtcgagctcgaatagctcgcgaacctcgagcttttttgacagccctagataggactatagtatgcaacgcacggtgcaagtgcgcgtgaaagaacggtgtttctttcctctccctctcttctattttagcaagtcttctgtgtagttggagatgataacatatttttataatgggaaactatctaatctctcgaaagtatatcccttcgttgttcatatgtcactcaaatggtagtgaaaaaaaatatgagaagatatattaacacatgatatatcacgctataaatatgcaagttaaaatttaacttctatatatcataacggaaaacaaataaattaaactaagctagttagatattgactgttaaatttgtttttttttggttatacgacatgtagaagggatccagaattttattaggacctggcccattccttgaaaaaggaggcctacaaagaaaggaataagttcatctgaggtcctttaacttattaacgaatccgattttcgtccttcaaccccaaaaccagaaacaacgggtccctcaactatcaaaaccaatatagatggcggttttggttcacgtggcgcctacgtggctggtttgacttgatcttcatttgacgtggctctaacatggcgcttacgtggcaattcgatccagaaaaataataaaaccgatgggatccacatgttagttttagacataaaaataatagaaaaggtgggacccacgtgggccccacatgtcatcctcactctcccctcccctcttctctctgtctatctttttcttttctttttcattccttttcttctttttctttagaagctggtatctggcggccgacacgagagggcgaccgacaacgcgagcgccgcgtcggcggagagggcggccgaggcaggagaggagcggtgacgcgcatgggccggcgggagaggaaggggacgcgggaggtggccctagctgcggcggccggtgggagaggagatggtgtcgacggtgaggaggatgctcgtcacggtcggcgagcgcggcgcacacgcggcgggccgaggaaggtagcggggacgacgatgagaggaggtggagcacgaatctggacagcggactgtggcggcggagcgactgaggtcgagcagcgtgacctggccgcgtccccctcaccagccaacgcgggagatctggtggtggtggtggccggtggtggtttctgaaccaccaggcgcgtcgcaatcccagagcttgggccccgacagggtctaggtcatcgcacggaggagcatcggcgcgggcagtcgtcgtcgccgaagttggcacggaagagggttatccttgttgtcgccggacgggcagcggccggaggcccggactagagcgtctgagcatgccgactaccaccacaaccgtctcttgctgctatggatcgccgcggccacctcctcgccggccatcccgctcgaacgccgtcttcttgctgccccaaaggctgctgcaacattgcgcatggaggatatggggcggcgcccctggccccaccgtccgcccgcgctagagaagcggaaggccgagcaccgccttggccccgccgtcctgcgctagagaagaggatgggcggctgctgcctttggccccaccatctgctgaggaagaggagtatcccattgttttttagtctaactggtatgcgggccccacatttatttttttttaatattttgcttttagtgatcactgccacataggacgaggaccaagtcaaaccagccacatcactgtcacgtcagcctaaaccaccatctaaatcgagggccttatttgcaccggttatgatagttgagggacccgttgtatctggttttggggttcaaggacgaaaatcggattcgatgacaagttaagggatctcaggtgaacttattccacaaggaaatcattcacgaactagattatatgcatttttggaagcccacgggacaggaaattaccggccctatccacatcacttcccagggggataggatttcccggccctttccacccataagctcgcgtcattcgctgatcgcatctccgtcgtcacgagcagccgccgcctccgcctctcccacccgcgagattccgccgtcaccgaccgcaagctgcacttccctcttcttctaactgatgtcaggcgacggccctcgatggtaatgttccggtgagacaaaaatgaacttctttttaatttctttcgatgaaaggactaataatcctcccacaagtttaggactcctgatcatggtttaattttttggtttggccgattctattggaggtcaccagtataaggaaatttctgtccgaaattttgaacaaatgttagtcagatttgaacaaaatattatcaaattcacaaaataaaaataaaaattttggtcgaaataatatcgtatcgggggatccgaaatggctgaaatttctaaccatgctcctattcctgaatgaagcataagttccgttacagtttgatctaatctcggcacatttgaatttgatctaatctcggcacatttgaaattgatttgtctctgcaagagggctttgatatctatggggtgaaattgatttgtctctgcaagagggctttgatatctatgggcttgtttggttctttaccctaccaattcattggtagtgccaaagtctaggaaaattttggcactaccaaaatattggtagggtaaaattatttagctaacatttggattgctaccaatttaaagccaaattcttatagcatagtgaagaaacttctagaatatgaccaaatattttaggggcactaccaaatatttagtctcaatccaaactaacacacaaactattcaatttgccaataaattggtagggtatgtttttggcatcaaaccaaaacggccctatacgagatgaaggaaaatgcctgacctgccgaccatggacgacgacgacgacaagatgggcactcacgcacaggtgcagcagctgcccgacgagctgctcttggagatcctgctccgcctgccgccccgcgccatcgcgcgctgcctcgccgtctgctcggcctggagctccgccgtctccgccgcggccttccgccgcgcccacgccgaccgcccggccgccgtctgcaaggccaccgccacggcgatcgactgctgcgaccgcgacgccgtcgtcctcgacgcgttcctcggccgctggcaccgcggcaacgtccacaccacgccgcggtctccgcgcggcctcgtgttcccggcggccatggcccccgagcccgacaccccgtgggtactcgatacgctggtcgtcggctcctgggacggcgtgctctgcgtcgagcgaggtgctcctctgctccggggaagccgctgggacgccggcgtccatcactggcccaaatccggccggctccgggagtacgtgctctggaacccactcgccatgacccgcgccaccgtctctccgccgcccggccgcggcgctgtcatcggaggctacgcccacccggccaccatgcgcttccacctacttcacgccgccggcgaggccgcacgccgtccaggtagcctcggcctgttcgtcccgaccgtcttccgtgtccagcgagtcggagacggcgcctggcgcgaggttcccctccctctcctggaacaacaagacgatcacgcgcacgcgcagctgcagatgcacggcgctcgctccgtcgccctgcacggcaacctgcactggctggtgcagcggggtggatcggccggacccggacggctgcaggtgctcgtgttcgagccggcgcgcgagaggttccggctgatggaggcgccgccacggcgccatggcgaggaggacgacctggcaagatcgcggatcgtcgtcctgtccaacggcaagctctgcgccgtggccgtgcgcccggccaccagcacgatggagatgtgggtgctcgactcctcctcctccgacgcgccgcggagatggcggctcgacgcgtacagcctccggcgaaggaagtggacgagggtgtgcgccgcgcgccccaggagtggttccgtgggcgtggcgctgctgccgcaccgggagagcgttgctgatgatcagcccagcttcggcgaggcgtcccggctgctcgaccacaccatcgacatcgacgtcgatgaccagtacttgtctatgaacccaattactttgttttgttactgaacaccgattgagttatttatatcagcttagttttattaattttaggaaatgaataaaataagaactatcttataaagaattaatttgttggtggtatttttgtttgtttgatgttagaagttaaactaaccaacgtcaaatataaaaggaaggacgtagtaatatgctaggatgattgaatctgactctgctacatgcgccttcattgggcgaatcgatacgggaaactgttttaattaccacccgtttattacatgtcatctaaacggttatgaaaataattgatatgataagatagtttaatatgtaaaatatcactccacaaacatataagttaaaattcgacttctacaaaaataacaaacaaaacgttaattactatttgtataattgcagctaaatttgttatttttgttacaatttgtagaagttgaatttgaaattgcatgtttgtggagtaatattacatattaatatattttgtcatttttttgaattttttcataaccatttaagttgacatgcaataaacgggtggacgtccactcgagtgattagaatccatctcgatacagatatcttactcagtaacgcatgcttgactctccacacacacccagataggtgttttaaaattcatatacatagggaactctagatttcagatgattgaaattgtcaataattttagtcatttttctcgtccctttgatggcaatccaatgatcctcgttgcttctctttttcacccctttttaaaaggttgacctacatacttaaacatacaaaatttacaagaaataaatctataattaataaaatttacaaaattacatgaaaatgatgcaaacttagataaaaaaaaatgaagtgaagccacatataacaataaaattgcagttaagaagtaaaactacacattacatactaccgcaattttagacataggaatacatatatggtgtgcagcggtcggatccaccgctagctcccgcgcccctcgcagtccgccggggtcgccgccgtcgccattggcggtccgccgttgtcacgcgcccgtcccacggccggatccgtcgtctgcgaccctgcagcagccggatccaccgttcccacgcccatcccgggcggggatttgtggcccgagcccctcgcaggtcgtcgtggtcactgccgtctccgtcgccggtccgccgaggtcacaccgatcgatgccgagaggaggaggagaagatgtggacgccgagagtaggaggagaagctgtggcctgtgggaggagaggttgggggaggtaggggagaggtaggaaatgaggaggaggtgaggtgagaggagaagacaagatcgtcggtgggagtggaaagagataacatccgtgcgattttgatatagggaatttcttttcacagtcggtgctccttatctaccgccagctaaaatcaattttttaccagcggttgtttaagtgggctgccagcgaaaataggttcttagcccctcacccctcgttataattttgtaggtggatttcacaaaaagccgccagtgaaaataatatggtaccgccatgaaaaatcgattttgtagttgtgatagctcttcctgcagaatatttttttttcttccgtctggtccgtgcttccgcgggaccagtataatagtaggtattaaatacctctaagttgacttcttaaaaaaatgacgtcatttgtaatttttcacggaaactaatatttcatggtatttgtatactgtagtccttttctgctttacttacgtaggctatttctcatgtattttcagaaagttttgatccatgttttagaagaagctggctatacaaaagattcacattttactctaccagactttatgaaattaagctccaatctagtactttattcccttggatctctttaacctcaacatacaaatattttctgcaccagtgtatcaggagcatacacatttgattgattttccgtgaatcagctagatgttctagaacgattatatcttgtctgttatttgattgattttattttgaataagctgataatgatctaattaaagtatagttgccatcatctccgtatttgttgtaaatcgttcatcacatcacttcaggtttcatagcattatcgggaaaagttctcaaactaggatgaataaagtttcctctaaagcaaataagtgagaaatgtgatgcgtatcgaggactttaatctttcagaaacaaacataagttgtctacgagagactataagccagttataaacatattttaagaagataaaagaagagagataagagcagtgggctataagtgtagatacaatagcagactataagccagctataaacatattttaatgagataaaagaggagagataagagcagtgggctatagatttgtagccagctacagcacggactccaagacgcatttgtgtatgacaggtgggccagatattgattttgtagcatatgtttatagataactattgtatgaattggatattaagttaactatagattgatttggagcctgtagtaggtttcgccaacccatatagatcctgaagataaaagaatcgactgaacaaataacttcgatttcgaatactgaacgataacccgcatagattctacatatatttaacaacatgctatggtaaagtataggtccaaatagatatttcgaaaagaaaatttaaatggtaatccaataatattatttttagcaaataaaatttagtttacaattaattatttaactatttattgatttaaagagttgaattaaatatggtcgcgccttactgagtggcacggagggggagaaaatatttttatagggagtagagatgctggccatggtcgtcgacgatgagctgaagccgccactgttgggaatagtcccacattactaatctagggggagttgaaccaacttaaaagtggggggagccccttacctcttgacctagcttttgggatgtagcaaggctttctcccaattgggccaacgtctcccgattttgggccaacaagttggtatcagagacaaacccataatctctattgcttgtgcacactcagggtggtgtaaacccaaagcccagtggacagcgggtgtgaggccgatcagtggaccacgggtgtgaggcccgtatgtgcctgtgtgtggggctgatcagggctaaggggtaccaatgtgtgacgggggaaattgttgggaatagtcccacattgctaatttagggggagttaaaccaacttaaaagtgggagagcccctcaccacttgaactagcttttgaggtgtagcaaggctttctcccggttgggccaacgtcttccggttttgggccaacagccgcgacgcctcgccgaagctcacgtcgtgccgcacgacgctgcggcagcagcgtggcgaagcgggagacggacaccgtcgaccacgccctgcgccggcatacgcgtcgatgttggccgtcgttgtggaggatcacctcctcgccctccgcgtcgccctgcaccgctgacacctgcgtcgccgacgagaaagccctcgacaggtcgcgcttgtcccacatcatcaccaggccgaccctctccgcgagccgccacgcccgcgcgccgccggaggagtcgtcgtcgtcgagcacccacatctccatcgtgttcgtcgccggcgagacggccacggcgcagagcttgccgacgccggacaggacgacgacccgcgacatggccaggcctttcttctcctcccccccccccccccccccccgccacggctgtcgtcccacggcggcgcctccatcagccggaacctctcgcgcgctgtgtcgaacacgagcacgttcaaccgcgcggtcgagcccgagccacgctgcaccatccaatgcaggttcccgtgcaagctgacggattgagatgcctgcatcctgagaaagattatggttctccttctccgctgcaattttgcatgtttgcgtcgtcgtggccgtcttcttcttcctgctgttccaggaggggaacctcgcgccaggcgccgccgtctccgactcgccggacacggatggccgtcgcggcgaacaggccacgttccgcctcgccggcggcgtgcaggaggtggaagcgcatggtggccgggtgggcgtaggcgccgatgatgacgccgcggtcgccgccgggcgccgggggagggacggtagcgcaggcccgggtgagcgggttccagagcacgaactcccgctcccgccgctccggctgcgtgttgtctaggtcgggcccgaacctgaagaaccgagaagtgtactcgacgtcgacgcagacgacgccgtcccaggagccgacgacccaggtgagggcgtggtgccgccatggtcgcgagctggaggcggggacggcggcgtggtgtgtggacgttgccgcggtaccagcggccgcggaacgtgtcgagaagcaaggccttgcagtagcgccatggcttgccaaaatatgccaattcggaggtgaccttgacgacagcggccgggcggtgggcggcgagggcgcggtggaaggtcggggcagagacggcggagcgccaggccttgcagacggcgaggcagcgcacgatggtgcgcggcggcaggcgggccaggatgtcctggatcaccttagatgcctccaataattcagagaaacaaacagctcgcagcttattctatgtcagcttattataatctagcttagagtaatctgatttaataatctagattacaataatcttaagctgaaacaaacaggaccttagtatgagaactttataagtgatcgtataaatataacaacttgcaaggtaggtacgattttgatacaataaactaagaaattatgcgacaacttaattatttggagcattttctacatagattcaatttaagtaattattttgacaatatactagtgtggatttgtataagcatatttatatttttattataataattaataacttgaagtcaattaaactggatgtaaaaattattatatttcggttgatatttgagaaggtaaagaaaacgaaaaaaaattttaaggtaattggatgtaaactgtatatgcaatataattactaaagattaaatttaatatctaaggtaatatctgtaggattgctatgtaatggcattattgatatcgggaaaaaaactcacctagcatatgcctagccaaattgatgcaccaaaatacaaattgtcaagttcttgtagtagaacgcacctacctgtcaagttgttacacttggacgctcatttctcaagttcttgcactatatcgcacccacctgccaagttgtaccgtgggtgcaatttactcttctttcttctacagatttttggaagccaaccttgcaggtttcgagtaccattaggtgcatctggtactagcaagtactaaccccttccagctgttagatcttgtgtgatggatggtcaggattcggtacctcctcttcaaaaagggcccaaataaattgattcattattttgttttgtttgaaggaaaatgattatgcacattggctggctatgtacacacaattgacctgttataagcatgaggtctctgttatacgtcatatatcatcacatttatcatttacagcagtaccagaaaagatctccatacagattaagagttctgaatctttagagagtgcttaaaataaatcatttagggaatggaaaaaaaactgcaatcagatgaaccaacatactgcaatgcaaattcagtgcaaacaaactcctagcgcactcaatcccttattttcaacatgctacatgtagatattcagcgtttattttctgaaccaaactgatatacactacttgtgtttcatacttgcagtagtggtctcgtgccattgtgcaacaacacagacaagactaaaccagatcaacttctatagtgtcctaattctggagaaaagggatagcttcccaaaaaaaataaatacagatcaaagtgccagtattaaccacccacaactaaacttgttgttaaaactcaatctcgaaacatgacaaaaaaaagctcatcaagatgttctatgccaactatccatgttgcatcagccaacaggtgaatcttgataattgaacaattaacaagctagcaatccatgtagaaaatctcagatcattggattaagaaggcgtgcatgtatccaactactgcattatattaataaattcacaaaatccagatgtaccacaaagcaaaaaaggcttttactgacatgcagccagagagattgctaaccttaaagcagaaagggccaaaaaatgtatactccatgctggttgtttacacacacaaatactacagaattgacctgttatacatatgagattaacaaaaattgaggagcaaggaacagagtagcagcaagcataaacatgaatataaaagagaacttgatcactccatgttcagttaaataaagtccaaaggagctctgaatatgcagtagcacttaaaatgtcagagatcagaactagcttactaataccaacaggcagaaccgatcatacataattcaggcagaattttcattgggggaaggaaaacctgaatgcagatgatgcaacttacagcaatgtcagcaacatcagtgtaaacaaactcctataaacctacattcagatgcttttttccctcgaaattaactagatagatacaaaatgacactactctgtttcctatacagccaatgaaccacaaactcaaccagataaaattccagtgctctaattcatgagtaaaataatctcagtttattacttgaatcctcaaaagatacagaacaaactacccgtattaaccacccatggctaaacttattcctaaatttgaatccccaaacatgacagaaaaaaatatttaagaacatcttgacaattgaacaattaacaagcgctagcaatcttggtagaaaatcacacatcatcagattaagaaggcatggtcgcatggttatatcttttttttttgaacggaagtcgcatggttatatctgagaaaacactacttcattataaaaaaaatccacagaattcaggtgaggatcgacatagaggtagcacaactgcacaaaatcaaccaaaatgttcaaccaatgtttcagaattcatcggtcaaacgtcacgaacaggtcataaatcaggaacaggttgatcgaatggcaaacacgagtaagagatagacagaccaacgaggaatcaagcataagaagtctcgacggaatcagttggcgccggatacatcctgccgggcgccgacggccctctcggtgcccaacttcgcattcccgatcgcgccctggaggttatcatcggcggcgaagagctcctcctcgacgccagggacacgcgcggatggtccagcagagggaggatcgcatccaggttgctgcggcacccgtcaacactgacgtccttgccggcttcatggagctttggttctagcgttccactccgcgaggtaccaaggaggccgatctcgcccagacgcgtcgatgggttgacgctgccgtcgtggagcgcgaggagctcggccaccccaccttcatgagggacatcgcggaggagagatttctggacgcgtcccccgagctctcccatcgcaagctggatggatcctggtgcgcgcggcggccgcctcctcctcgtccccccgcgtgcatcggtgacgtcacgtgcgccagcgccttggcgacgtagtaacaaacagaactctaaagcaaattggtactaagtcttaatgtattgctacaactagaactcttgaagaatcagaggaccaaagtcgtccttcccatttccagtagaaaaaaggagtataggacttcatttcagctgaaagagaacagcaaaagtggagatcagtagcaaatctgagccgtatgttcaccatgcgccggtgcagctagttcagtttcttcgccttgacaacagaatcgtccaggcatcggacaactcctgagcaacggcttcctgagcgcagcgcatctcattcgttgccatagtggcctcgagggcagcgactgccgtgaatttttcggcctccgatgcccacacatcccacagcgggcacccgtaggcaacgctacccatgatgacgagggcgaccttgcccgcctcggcgtttgacaccgtatcgatcaccctcttcagcgccttgctgatgtggtcaacggcttcctggtggtggacgtcccagctgcggtacgccgggtcatcctgctgggcgccgaggtgcgcgacgtagcgagcgaggacgtgccttgtcttcgcgtggagaacggtgctctgcgagatctcgcggcgggcgtcctcaagggccacggtggggcagattccctcgggatccagctggtaggcagaatttccttcgacggggacggccgccgccggcgtctcctggcgtaagttcacgcgcagcatagcgacgcgttcctggagcttgccatgggcatctcggatcaacctgagcgctttcagcccgccggtggcgacgagcaggaaggctccagggagtgtcctctcaatctcttgccaccacttgtccaccgccgccggtggagctcttccgcgacgcagaatcgctacggcgtcgaagaactcgagagcaacagattggcgcgcccggagcacctcgtccagcgccagggtggcctccaaagcggcctggtccacgagcttctcggccgccgacgtccactctgcccacagctggagcgggggctggggctgggagaggagggtctcggcgatgtcgacggcgtccttggccgcctcggcatgcgacgcggcttcgctaaccttctccagcgccttatcggtgaagcggatggcgtcctggtggtggacctcccagctgcggtacgccgggtcatcttgctggacgccgaggtgcgcgacgacgtagcgagcgaagacgtgcctggtcttcccgtggcgagcgccgctctgcgagatctcgcggcgggcctcctcgaggatctcggtggggatgactccttcggcggccgggtcgccgaagaggttcatggcgatggccgccggcatgcccaagtgtatccggcggaacaaagttccgcgcacttgtagattgctgtgggcgacttcgatcaacctggtggcttccatctcgcagctgactagcatgagcgtctcgggcactctccacgcaagctcctcccactcgtccattgccgccgatcgagctctctccttctccctctccctctccgctctttctaagtttctagcttcggcttgggcggtttggatggagacgaagacgaggacgcaatttatagagaggcgctgctggagggaggaggggaaatgtggcttgccggtgaagacagacacgggaatctctgtgtcactgacaactcctgcacccgcagtttcaatttttttaaccttacaaccgtgggccccacgtatcttccaggctggctatttcatatctcatgctcgcgagcggcgaggagaaggcgcggccgccgcgcgcaccaggatccacagcttgcgcgcgatgggagagctcgtggacgcgtccagagatctcgcctcagcgaagtccctcatgaaggcggccgatctcctcgcgctccacctccacggcggcagtgtcaacccggccgtcgacgcttctgggcgggatcaaccaccttggcgcccagtatgtacctcgcggagcggaacgcctgtgactaagctccgtgatgaagccggggaggacctggatgcgatcctcctcatgctggaccatccgaatctccctggcgtcgacggcttgatctaggtggagcgcgccgccgccgatggttacctcctggccgcgatagggagcgcggagttgggcaacgagagggccttgggcgcccggggggatgtatccggcgccaactgattccgtcgagtcttcgtatgtttgatacctcgttcttctgtccatctctttttcgtgtttgccatttgacctgctcctgctttgttacctgttcgtgtcgtctgtctgatcgatgaattctgaaacattggttgaacattttggttgcatttgtgcacttttgctagctgtacgactcgatcctcacctggattctgtggattttttttttttgacgcggattatgtggatttttgataatgaagtagtgttttctcggacatatccatgcctttttaatccgatgacgtgagagtttctacctcgattactaggttgttaattgttcaattgtcaagatgttctgaaatttttttgctgccatgtttggggattcagatttaagaacaagtttggccgtgggtggttaatacaggcagtttgttcagtatcttttggggttccaagtgataaactgagattatttcattcacgaattagagcattggaacttgatttgattgagtttgtggctgtataggaaacagagtatggagcgatcaagctcttttatatcttcatgttttatgcctgccgctactctgttccttgctcctcaattttttttaatctcttacgtgtaacaggtaaattctgtagtatttgtgtgtaaacaaacaggtaatgagtaaaaatgttttgggcactttctgctcaaggttagccatcactgtgactgcatgtcagtaaaagtcttttttttttctttctcctacatgtgggttctgtcaatttttgagaatgcagtagttctttcttggatatatgagtgccctcttaatcaaatgatatgagattttcctcatggattgctagcttgttaattgcacaattatcaatatgcacctgttggataatgcagcagggatagttgagatagaacatcttggagcgcttgttcttttgtgtcatgtttggagattgagatttaagaacaagtttagctgtgggtggtttgcactggggattttgttctgtttcttttcggaatatcaactagcatgaactgggctatccattaattccagaactaggactgtaggagactagaagttgatttggtttaatctgtgcctttgttgtacaatggcacaatggtcgcgctgctcgccgcatcttgctttcgtagggctccatttgtttggtcgatagatcactgaaatcgcttgcaatttcctctggcgcgtgcgtaccgaactaccaatcatgcgaattcgtgtgcaaacacataagtagatgatgttcatcacaatctgagattcagcagcagattcgcattccatttgctagcggcagtgttccaaatttgatcaaccacactagtaaatgcgtcacaactctgaaatttttacatgggcgcggtttgaatggagacgaagacgaggaacagcccattacggttcattatgccacttgggacaaattaacgtcccgaatttccccaaaaacttaataggcccatcaagccccaattaaagagcgcagagttgtgaacatgtacgttcagaactcagacgcagaaacgcgtgctgttcctaactgtaaccgcatatatagatacaaatagaagcattattgttttttcacttttgatgatatatagaagccctaacgcccgtaacaacaactaggcaatcaaattagttgccttttttccatggagtccaccaccaccacgcgcgaggcgaaactgctgcggcgaaatccatctgatcaccacgacagcggcggaggcggaggcaacgacctgatcagtcacctcagcgatgacatcctggcgcacatcctcgcctccctacccagcatgacggacgtgatgcgcgcgtgcgcggtctcgcggcgatggcgccatcttggggcgcgtgtccccgtcctcagattcttctgcctcgatcacgacttcagcgagcaggagaagctcgaccggttcatcgccttcgttaacaatatccttgccaggcgcgccgatgatggcactagtactactgtagtagaggagctcgagatctcctttaagttgttcaatagccgttgcatgagtggcggcagcaaacgcgtcgtgccatcagtggatgttgcccaagtcgacgcgtggattcagtatggtatgcagcatgtatccaagtctttcaccctacaacttaactacatgctgccattgaacttgcacaacagcaatagcagcaacggctgcatgcaggttttgggtagtaataagcttatgattacctgcggcggcggcgcgacgaggttggagagcatggtcttgtcgttgaacaaagcgtgtctccgccgccttcccacgaacgtgacgctcgattcgcttgtacatctcacgctcgaggatgttgatgatctcaatcagctcttgtcaacagcacgctgcccttctctgcggaagctatgcttgcacaagcaaactgtgagtccggcgacaacgacagatcagtcgttgcatctggagtccaacgagcttttaaaggtgtcgttggattggatctggagccgtgctttggtgttggagctcaggactcccaggctccgtgttttccacacgaggaacgcgtccataggaaggttggtgatatcagcgccgaggctagaggagttgacgttcttctacacgagggtggcttccattgtccaagtcgaggatatgccgtgcgtgcggatctttgagactgagatgagttcactacgacgacccgaatgtaatgaccacgtaaatcaaactaggattcggctcctacgatgctgcaaattccttcaatttctcacgttacacctaactattacccaggtacgtacgtgttgtatatacgagctagagaaatttcatagtccttgaaaaagtgcctcgagataccaaaattttacactaaattttttttttacctcgaggtacttagtacccagagatattaaattttacactagaaagggtggtaattcctggtacttttcaaggatggatgataaaattatacatgttacaatttttttcagactgtgattagctttagtttcactcgcatatattatttataacataatactgagttttcttttgttatactccataattttactatataggacacttatatagagcaccaaggtatcaaatacataaattcacttaaatttttaaattttttgaaattatgagttcaaattcagttcaaacttgtttgaactagttagtaaagaagttaatgtttatacctaaatattttaaaaattttcatactcaattgaattgagtatatacttaatttgaatcttggtgcccgagcaccatgatgcagtgcatgcatgtgagacataacagaaataaagtatggtacaaatattcgtcatgtcttcaactttaggattattaataagctaacaatgatcctttaatttgtgcagaaagacggtcacgatagtgcagaggttgagctgataaaagatataccacaacttcctcacgctacatctttatcattacaggtttttgcacaggtttatgatattgctagtgtgttatgtcttcttactcggtgcaaatttctcaaacatctcgaacttaacataaaatattgttcgatggtaagctgctactccgttgtttattaactgatcagtagtttaataacttacatcgatttaattcatcgaattgatgatggttttccataggcagaatattgcaaaagacctacaggtatcggtacccaaaatcagagggatcatcatatcatctcgttagagcatcttcaggatataaagattaccagcgcttacaaacgacagtacgaagctaggctcctgaaattcttacatgcaagcgcaccggccttgaagaagatgatagtagcattcatatcagcctttatgctatcccagagcttacaaatatgtgcgaaagaatgcgaagaatttctacatagcattccacttaataaggaaggaaagtgggcattttgctaccatggtgctcatatgcaagattttacaacgttcgagtggacgccaataaaaaaagtagagtgcagacagatagtacatatggattaatcaatcgatactgggtatgctatttgttagaattctttttttttcctatcgtaaacgtgcaaaataattgcatgtcaatatattagaagaaaaaaaggttttgttacacaacgcaatcggccagacagacctatgttggaggaacaataataaaatgaccaaaacagaaaaggaaaaaaaaaaccactacgaagaaaaactactccaacaaacaagagagaggaggtggagccgcactacactcccaggagatccccaaaagcggcaatgcctacggaagctcacagatggccttccgagcggatggactcaaaaagcatggagactgaagagagtgcagagtcgaaaacagttccgctccttccacagttgccaagagaccagaaggactaagagtcgaagccggaggaaagatgctccggtaagcgggccctagaatttgttagaattcaaaattttgtacaactagtactgagctctagtttgagttggatgctttcaccagttcccttttttcccccctcaagaatttatcgtggttattttccttttctcaataggaattttatggtttttacatggtatatattgttgtggctaccctcgacagtcgcgaataatgccttgaataacgtgacaacacatgcaacatgtttaatgtcagaatttgcagttttcactagctgcatgaaaatgcccaaaatatttatgcacatttactggtagtgtacacacagataaaaacttgacctgttatatgatattaagaaaattcgagtgcaagggacagagtaattacagcgagaataaaacataaagataaaagaaaatttgatcactccatattgagttaaataaagtccaaaaaagggttctgaataagcactagcacttaaaatggtcagaggtcagagctagtatcttattctcgctaataccaataggcagaacagatcatacataatgcaggtagaattttgattgggaaaaggaaaaactgcacgcagatgaacaaacataggcaactgcttcagaagaaacagatggacacaatggcactagtactactctgtttccacaaaaaaactcaaccagatcaagtcccaaatctctaatttgtgaataaatgaaaatctcggttatttatggagtattactcgaatcccaaaagatacagaacaagttgcccatatcaaccagccgcagctagacttgttcttaaatctgaatccccaaagatgacatgacataattttttttgtaagaacatcttgacaaatcaacaattaacaagctagcaatacaggtagaaaatctcgcgtcgtcggattaagaaggcatgtatatatccgagaaaacactagtacctcattatcaaaaatccacataacaatccaggtgaggatcgacatagagctagcacaagtgcacaaaagcaaccaaaattttcaaacaatgtttcagaattcatcgatcagacgacacgatcacacgaacagtaacaaagcaggagcaggtcgaacggcaagcgcgaaaaagagatggacagatgaacgaggtacgtatcaagcatacgaagactcaacggaatcaactggcgccggacacgtcctgccgggcggcggtggccatctcggcgctccgctgaacggccactatcgcggcctcgaggtcggcgacggcggcgaggcgctcggcgttgatcatgccctgcacgtctggtagacgacctacatggtccagcagaaggagggccgcgtcgaggtggccgcggcacccgtccacaagggcgtacgccttccgggcgtcactctcggcgtagctgagcttgattgcggcgctctgctccgcgaggtagttcaccctgagaagacgcacagacagcagggttgatgccgtcgccgcggagagcgaggagcctggccgccaccgtgaaggaaatcgcggaggcgagattgctgcacgagctctcatccccgaggccgagcgcgtccagcgcgagctggatcgtatctcgcacggtgttcgcatcgcccgcgaccatcgacgacgacgacgacgtcagttgcggcagcaaggcgtggaggctctcacgcacgccatcgacgcggatcgccgcctcctccacaagcctcccgaactgcgccttccacacctccgccgccatctcgctcgctcgctcgctcgctcgctgggtgttcaacaatttgtttctggaaggatttcgagtcgaggcgtggcgtggcgtggttgcggttggtatgaaatattagcaagcggccagcctggaagagacgtggggcccacgactgtaacggatttctcacctcgggtggggtgagtgaaaaaatgtaaatactcgctgttaaaaatttgaaacagcgggcgggtgggcgcaaagctgcttgtcagtgagacggtaatttcccgtgttcttatccagcaagccacatttccacggaaaaaaaaagtaaattgcgtttagggccaccttttatcacaaaagtttcactttggactacccttaaaaccttttcactttggactagattaatttgccttttccccgcaaaaaaaagaagattaatttgcctttgtttcactttgaaccacccaaaaactttttcgagcacataaatgattttaaccacatcggcacccataaaccgataatcttcccgatttacatgtagactattcttcgcaagattagagggtagatacaactagaaaagtaacttggggtggtccaaaccgcaacaaaggtaatcttacctagtctaaagtgaaaatattagttagagggtggcccaaagtgaaactttagtaataaaaggtggaccaaagtgcaattaactctaaaaaatgcacattctcttgcatgttcttagcctggattcggcaaacaataagatgctgatcataatcaaacattaagatgaatttggtagttatatgtatgagatgtgaaacctgaatttggtagttatgtctaaaacctgaatttgggcccccatcggttggtctaggcttattataagccataacggcttatttgcgattaaaacatgatatgtgagtaaaacttttgtatatatgttcttagtgattgaaaagccaaagttaaaaaaaacctattgtaacgctccgcttttcgcgtggcgttaaaaagctaatttacaaaaatcctaattgcgaaaattccgttctttgagtgttgagtctaagttgtgccaaagatctcaatttaaaatccctcccttgtctcaataccctgatatcaatgatcgcctcctcaaaatttccgctccaaaataatctcgaagttcgaatgcttctattcggatttcaatccagaaaccctaaccacaaatatcgcctaattccggaatccaaaaccagactccaaccctaaagcccctccgatcaaattccctccttgagctagctctaacatccaagcttctccctctcctcgtctccatcgctctatctatctatctatctatctatctatctatctatctatctatctatctatctattgcattctaccgccacatcctttgtttcacccccgaacattgatttctccttttgtttccctctcaaataatccttgagctgccaaatacaaacatatccctaaaatatcaattctcgctttgaacttcaaccacccatcgacatcgaaaatcacgcctcatcgaaattccttcccattaccgaaagtatcgaattcactctttgaatcccctccttggtttctccatattttgttgagttcaaatatccaatttgaattcaaatccagcgtcaaatgctcctcatattccttaaagaaattttctgggtaaacagtctattatacctccgtcgatcttttgggctgattcctccttccccggcccaactctcctcttttggcatgtttcctccccccaataaaattcggtaccggaccaatatgggccaataaatcaccccactcggccccatgggttttttttgcgcccaaccgttggaccatttgtattatttgaaaaaaaaatataaaaaaataagtcacatatcaagtactatttatgtttatcacctaaaaacaataaaaattctaatccgaaaattatttttaataaaacggtctaccacacattgaacacacttaagatggtacggggaagtcctttattaggctaccatacaaacatgttgtgggcccaacttcctaatgattttcccgcacccccaaaaattaatgcgatattctggcccgggagacttccaacccctcactgtaacccaccataatttcccgtgcgtaggataattagcgcccatcaatacctgggaaaaaaaaatggttcagaacattccttcaacattctaaatctgaagataacaaaccaactcccttaaactatcgcccgtcgacctatacctagtcatccatcccttctaactcttttaactgaggttacacctctcttcactcactccagagacttctgcgtctcacccc

SEQ ID NO: 7686 - DNA, 71818 bp, Oryza sativa
tgacaaaatcaattccataacccctaggctattttacgagacgaatctaacgaggtatattaatctatgattagcggatgattactgtagcataactgtagcaaatcatgaattaatatgcctcgttagattcgtctcacaaaatagcctaggggttataaaatgggttttgtcagtaatttacgtttaatactcctaaatagcaagattctggagagctatttaatagcctgaagcatccaaacagggccatggtttcctcctgcaatgaagagatgccagcaaagagccagaattaagacgtgtatgcattgcacagttggcttgcattatagatagatgatgggtggtagatgatggattaaagtgggtttatgacaattattcaacgataaagataaacaaatgaattaaatgatagacagttgaaaatttattaaaagtagagtccacgagaacactccctgattgtgaataattactcatcatcggagctcaagggtataaggattcctaccggtcatgaattgctacctaatatgattaaccgggaattcttgccaattgatgatgcatatacaatctaacttcccaggaaagttaatacaaataatctgagcacaaattagtagttaaagaaagtaaacatatgggaggcgtacgttgccgtttgctgcttcaagcagcatctgctagaggatgaagcagaagtgcaggagagagactaaacttggggctacatgtcataacagcatgtttagatatatagttaaaagttattatattttttttacggagatagtactattcttgagaaacagagaactcggtgtgttagaactcaaccataaactaagcatgcagagtagagaaacgaagtaggcagaaggctacatgcaagtgcaaattacaagtatgtgctgtttggatatttagctaatgtgaagagtccttgtgtaagagaattgaaaaaaaaacactatatgtcataaattcatcttccatctttttctagttcctttttacttttaatttctaattcaaaatattggtatcaaggatttgttaattcgttcaatttgttgatggatgagaaaatttatttccacacgttacggtgtacgggtataatgctagtaaaaaaataaaaatgagggggtaatggacacaatgagtatacaagatgagggtcatccagcaagaagcctttgtggtggctggactgcgaggcagcaacggcgaagcagaggtggtgccacatgaggcaaaggccgccggagaggaggcggtggccaagtgcatggtggaggctagcagcgaagaggcaacgtcacctgagatggaggggcccctaggagacgttatagtgcgactgtgcgaggtggaagccaccgagatagaaggcgctggagtgttgccttgtgttatcggcggaagagccagtttacatgtttgggcctgagtgagaaggttaagaatggaaagagatgggattttttttaatcggttaactgcacatgacattcagcccttgcaggagtaaaaagtctatatgacttaacgtcttagcatagcttttcttttaaaaccctgtataagtatagtattttccgttttattcaatgaaattagcatgctttgcactggttcattaaaaaaattgcacacatggcatgagtcccacattgtttggtgttagcaagcgatatcaaaccgaacatgtgagattttatactatttgctagctgcttcaataccacactgtcaaatggtgctctcctggtcgactttgatttttttttcccatcgagacaccacagccaatgctctcatgtcattttgaacacaatatactacatcactgtcacatcacatgagccctgtcgcaccgaacaaaaaataaccatgctacccctgcccttcatacgcagatcctcctaatccccatcgctgccttctcactctccataggtactctaacccaatcttcgacgatgacgacaatggtggcgagcagcgctagaagaacaaaaaccaccaacaagatggcagcggggttcgtggagcagttttcggcgaggagttcaggacttcggggtaacacagtgctacctcaacatgcatactagcgctaccctagcctaccagatgatccaccaaaaggtgatggcaatgctgaggacatgtggtgcgaggtgaagatcatgcatgctacgtccacctcgtcatggtgctttgcgagagcagcaagatcacccctgcagcgtggggagggaaaagatgggcaacggtggggagatggaggaatagagcacctgaagtggaggcacagttgaggtggtcagggtagatctggcatcttcgagctcaatagcagactaatatgaagccctcgggctcgtcgcggctggctctggcaaggagaggcagccaactcgctatgtggtgctctgcgttggtggtggcagcggcgatggctcgtcatcagagaaggaggttggtgccgtcaccgtccattagttgttgccaattcgtctcctcccgcatgaactatgtccaaaaaagtggaaaaatgggcaagagagtcaatttccccgaattgcatacttatcatgctgtgttagaagaagtgataaaataaaaacaattcagagttcatgagtgtcaaataatcgaagtcactcaaagatggcactcgtagggttgacttctcctgcctggttcggttgccaacatcattgtgcattggtagagttgtgcatacataacttaactcatcatgattaaaatccgactatatccataaattgaattatatgctctcgcagagtctgtaagttatacctcttttgtgaaaagaaaaaataacctcgaaagcctaaagctacatcaatgtaagtcaaattagcatatagtcctgccaagccgatttgccatgcaacactacacaatggattaaaatttgcaccaaatttatcgagccagatccactcatgcaaatggtgatgatattacattgaaaataattgtcactctctgtctcccccatgtatctaaggcatatacaattataagagttttatttcaactcagtatcacaaaagatttgatagaaaatggctcttagagtatcaccttcccaaaactgattttgagggattttaggtgaaaattttgatcaaatcccctatagtccaacacacgttttggagttttttggagttctcttcccttatttctcgctccgttgatttaggggagagaaagcgctcccctccgactcgtctctcacatgtgagggaggagcgtgatctattctgcacgagaattctatttatagtttaacagaagggtccacttttagttttttttataaaatttaattaggtttctcttgaagatatcagtttatttatttctatttttagtttaggaaaccaaaaacaaatttttaggaggagattattcataatctcttggtaatgcccttagataaatgtgcaattgatgtctggtttgggccaactatatcaggtctactttacatacctcaccttaggttcgagtttcagttgcattcctcaaccgttatactaggtataacaatctctcatcttttaaaattagtataaatatagtctcaaggcattactgaggctgattttggttgatatcggcgttcacctgacgtattaactaagttctcgtcccatgaggaatttatgtggcacttatggttagaaaaaaaaatatggtaagatccacgtggggctcacctgtgaggggtcttcttcttcccctttcttcccatctctctctacatctcccctatcttcctctttgtctctaggaaggcaggcggcgaggataggggcgacacctagcaggagaggagcaaggcagcggcaaactcgcctccgtgggggtgggcaaggtagaaggagtgtgatcgattgcccatgtgggtcctatcgttatttttttttctaacggtaagtaccacgtaaacgctacatggcacaaagaactagtgaatacgtcacgtgagcgccgcgccagctaacaccaacctcaatattgccttaaaattatatttacacttgttgtaaagatgatagatgtgttgtattcggctttagagttgacaacgtgattgaaactcaacccttacacgacgaatgtaaagtggacttcttccttatggcaaacatgccacgagagcctctaaatacaggcccaacactgatctaacatggacatgctcagctcatgcaaatttacaggtgggctcccagaattaatgagaattttgttgcaggcatcatcgagggtgctggctcaatcattgtaaggggaggccggtgcggtgctctgctccgttggcttgtccatggcggtgctctgctcctaggtccaagcagtgcctcatgttcaacaccgtggttgccgctgaccatcatctacaacttcaagatgctcctcctgcactgaactctgaaccattttggacagagttcatctggaaaatatgaaacatggaagaaatacttgtactgtactatgtatttagtggaattttgagatgttatggaacatatattcaaatgcgggatcaattgtatatttgtatcgccaattcagtatcatgtaaagattgtttttttccagatccaactcaaccatgcgtgaggctagtggcatgtacatgtataaccattaactgacaggtcgaagaacagaaattgtcagcgactgactagcacatatttttttagataatgtccatgctgatcaagtatatatactatacatgcataattacatatatatatataaactcctaatttttcgtatgcataatttcaatccgccgcctacagagaccagcaatttctcagagcaacatcacaacgcatgattcccaaatttacacaaatagaaacgaacttcacatgagatcgacggacaggagcagcacgcgagggcagcggcggcgaggcgagcgccggaggcgccgccgtcgcggtggccggcgccgccgtacgggctgaaggcgctgctgggcccgaacgacgagccgctcccgttgaagctccccggcgggccgaaccccgacggcggcgtgccgaacccgcccagcggcggggtgccgaagccgcccgccggcggggtgaagccgccggccggaggggtcgtgccggccgccggcgggctgagtcggtcggtgggctggtgccgaccggcggcgtgaggcccgccggtggggagagcgtcgtcggagggctggctcccggcacgctcgtgttcgagcctcctgccatcgagctgcacaaagtaaacagaaataaatatgatatttatccttgtcgcattcttgcattgctaatttgaaaagctaaatttcaaacaatcttttattattcacgtttcgttttcagctatcctttaaacatttaacatttttatctttatgatactctagatcattttcaactcttttatcaatctatatccaatttattatatgctgaaaaatggtggttacatatagctattgaagttcattgacgaatatgaaatatcggcaataaaacatgtctaaagtaaaatttactctcgtatgaatgtaatatgtggctgatttgttcaagaatttccacatttgagctcactcaccttcctgtgaagacgcatgatcctgagcctgagagtattcaaaagaagaagaaaaaaattaaattcagcaaaaattcagtgaccgaggagggagtgaaatactccgtattacagaagaaatggagcttactgggatcggcggtggtggtggtggcggtgccattgaaggagcaggtggcgccggtggacgccatcttctggtagtagtcgttgtaggcgtaggacgccagcgccggcaggttgttctgcttgtagcacgcgccgccgggctggatcgccgcgcagtccgcctgcccgggcccgcacgcccagttcagccccgcctgcagcgccgccgcgtccgcgttctgcagcgccacgcagaacatccccgccgacgtcgccagcgaccgcctctcgccgccgccgacgccgccggaggcctgcagcaggtagctgtggtacaccaccgtcgtcgcgccaccgccgaattcttctgtctccaccggcgccgcgatcaccgggatggcgcccccggggaaccccagcgcgcgcatcgcgccgtaggccgcgtcgaccatggtgtccgtggactccgacggccgggtcttgaggaacagcggcgcgccggtggcgttcaggaaccggaggaggccgcccgccacggcggcggcggcccacgccgggggagcctgcagcgcggcgccggacaccgcgctcgacaccttcacgcggccgtcgaggcgcgacgcggcgagcgcggcgtggaggttggccatcgccgggaggaggaagtacgcgttccccggtgacctggccacaacgtcgtcgccggccaccacgtgcgtgatcctcgtcgccgggaggaaccgcgcgacgttggcggcgacccagagctcggcctcctccgggaactcggccatgtgctcgagctggtcgttgggcacggtgaggatcacctcctcgccggtgttcgccagcgatcgcagcgaccgatggtccccgccgccgatgaacacgcgcgcatgcttcgtctgcttagactgaacaatcttggcgaactccgacggcgagttctccggcgaagggatcgtgttggcgccaacataagtccctgctcatcattggagcagaaaatttagtgtagaacaggcaaacacaacaggtgatttctgaatttctgattagtgacgaagtgcagaaagataaaagttcagttggttcagtctagtctacttatcctgttaatccatgttagtaattgattggagcagaaaattttagtgtaagacaggcaaacacaacagatggttttgaattctgaatatctgattactgacgaagtgcagaaagatatgaaagtacagttggttcagactagtacttaatcctgttaatccatgttggtacttggttgtagtacatgatggttgtgcacttcatagttcatacaaataatgcatagaatgatagtactcttgttagattaagagtgttagatcatgaagccctggaatcatttgctgtcatcagggaaagaaaacatgacctgctgcatgaaagatcagaactggctacagttcaggtttcagagtgttcagtatttgaatgtttgttttctcacagctgactgatatgatttgggttgtatcaaacaaatcattggctaagtatatattattcgcaccattctactatttcttaagcatgagataactgataagtttctagatgtcacatgtatggcgtatgctttttgtgactgaagataaggcatgcaaagtggggaaaagcacaagcatatcagaaaactttgtactagcttaaaagtctcctataatgttctgcactttaggcatgtatgttcattttttttgtaaagaatctcagtgatgaaaaagaaagtgagaaaggaacctggttctgttgttaactgaaactgaagcaaaaactaacaagagaacaactgatacggagtactaattagtaaatgataatgctacttttgctactacagagtgcacatacctgatgcattgcagacaagacagatgagcaaaagtatggttccccgccatcttctgtccaacatcattgatgatagatggtgctacaggaagggcaacttcttgatgcacctcttggacctgttgaacctagcaataccatcagagaattccagaagattatagaaagtatttgcaattggacgcttgcatcattgcatgctcattttggagtcaggggaaaaatgacctgtttccagatcctcatgaactaaagcacaaaattcccaaaagaaaatggggcaatacccccttgcaaaaaagaagaagaatacccaaaagaaagtgcctcttgcaaagtgcaagcaaagctaaaggacttgcaaggaaaagactacaatataataaaatcctacaaaaaagttcctatcaaattctccatcattgttcacacaacccttagcaattacatgccaactctataagaacaatacatgtcaaccagccccatgcattgttttgatgattttctacttagtaatatagcaacctagtatcgaataggacatatacttcatagtacaacgaatctgaaaagaaagcatgtccggatatggaatttccagccgattcagcgagaagttccatgtcctctgaataagtccggtagttgggacgttgttggatcagaattcagaacagaacagaacaaacacagcaatattcataatacggatgctgcgttatctgaggtcggccgggccatacattgtagccttggagatgcttcgagagatggaaccgtatactcaccaaacaaccctactagtcctacatggcgacgtcatgaagaaattaagcagggaaaataattgagatgcgacacgacacacatcgaagaaagaagaagaagaagaagatggacttgaattcgccggacccagccggtgatctgatcgatcaccgctgcctggtgtcatcggcagagcgacacgaactaggctagtcttgaagccaagtgtccgcgtcttattgggttgaccatgaatgatccaaaacaatttcctaagctaaaacaattattagtagtaaataattttacggttattgagaatgtaacgtgaattactacaatttggtacattttgatacctaggtactatgagataccaaatctatctatctatctattatatactaaagttcattaaacttcctacaaacgctctcaagctaccacgtggcgctctaataaattagagaaaatcctagaaattctaagaaaaaagcaaaacatctacctcttgattttcacttaaattggtgggaccaatattatacaccgttagataaaattgatcttaaaacaaaccaaatactatggggtcccacctctcctcctcccgtgcatatgtacgtgggtatatatatatacacgtacataccatgtacatacacccttcttttcttttttttttctttttttcttcttttcccatttatataatatggatatatacctttttaaatattcataaaagtccattaaacttcctacaaatgctctcaagctgccacgtggcactctaataaataagagaaaatcctagaaattctaagaaaaaagcaaaacatctatcccttgattttcacttaaattggtgggtccaatattatacaccgttaaatgaaattaatcttaaaacaaaccaaatactatggggtcccacctctcctccttctcccgtgcatgtgtacgtgggtatatatatacgtacgtaccatgtatgtacacccttcttttcttttctttttttttcttcttttccatttatataatatggatatatacctttttaaataatcataaatttacaacacaaagaatctaccatcatacaactcactggtaactaaattagctctacaatttttgaaaataaaatttaaaccattatatgtgaccattaaattaataatgtaatatagtttccacttaaacatgtgtattcattattttgtactattattttcaaataatgcactattttaaaataaagtttacacaattatattgtgtacctatcaaataaacaatttaagatctatattaattgatttatacgtgcacttaaaccgatggacccattacttaaattatcggaactatttttttattacattggactattattctcaaataatgcatggtttcaaaataaagtctacaccattatattatgtacctattaaattaacaatttaaaatatatattaactaatgtacacttacactataaccggtggacccattatttaaatcatttgatatattatttgctaataaataaaacgtccgaagttctctttttttgcccgctgcacaatgcacatctgcacctttaccttttgcacgcatgacaaagcatcatgtctggcactaccgttttgccacatatcaaatcatatatggagatgattaattttgtcaataacatgaaaaaaaaattaaaggtgtgatgcagcgagagaagaattaagcactgtgggttgtgttttttttctaacacttagctttgtttaagctgaaaccgagagttgattacagaataattataacgtattgtgttatgtcgtatttggattttgcactatttgttcgtatagatgaaagaattcattatgttataaatgtgagcacaatattaatgaatatcaatagcactcttacaaagactagggtgttataaaggagtttaagatcctctttttttccctgatttcatagttggattttcgtttgcacgctttccaagtttctaaatggcgtctctttaaacaacattttaactttttataagtcaatttattcgtttataccctcaaatagctatcacataaataagataattcatcaatttcagctgtcctaaaccctaagtagtacatatttttttatgcgagtcatggtgatcagtaaattagggatcaactgataatcaaagtcgtaagatgaatatgtaagagctactatgaacaactgtaatcggtgtcaaaattaattgctactaattagacatctaatggcttgctagccacatcattaatttctctcaacatgtatataaacatgcacgaagctagaacaaatattaccatatgccctatacatatatatattaagcggttaatattcttattacatgtgttaagtcctttaaaatttcttaaaacgctctcaagctgccacgtattagaaattctaagggaaaaaaatcaaagtatccattacttgatttttcacttaatcggtacgtccaatattataaaccgttagattaaattgatcttaaaaaaacaaaatactataaggtctcacctctcgtcccgtgtcataggtatacacctacgtacatggttatgtacgcttcccctcccttttttcttttttcccttttttctttttttccatgcatacacttccctccctttcttactatatcatgcgccttcttgagacgatttaatcacaagaattttgagtatcttgctctcgcatttttcatttgtggccatactatacggtatatatatagatggactgtatgataattaactagcaatggtttcttatttactcgagaaaaaaatgatttaaaactcataccttaagaaaaagtttttgaatggttttttaagataccttaagaaaaatagaacccttaaattattataaaataacattatccgaactttagtttgcccttaatctataagacaaaatttttgaataaataataattttacctttcaataatataagtgccgcgcatacgcgcgggccactttcctaatttataatagaaaagtggtacctcatagtacctcctcaagtaccgtaaaatttatcttagtagtagcaccccaagattctgacttcaaatcttcatatgagcgaatttcagattgagttatttgagggctatattttctatttgataggttcctaatttaaaaatattgtctatatctggttggatgtagagcccgggtaaaaaatacccttctctaaaaaaaatcagtagtaatcaggattagcggattaagtgcttagctatccccatcaaaggatagatatgatatgataaaaaagaaacaacttttaaaagtactctacttaatcccgtagctctcgtatcttcatcaatttcagtagtattgctttaagcgtcaaggtcactgattgatgctcgagagtgaaatgaaataatcatcacaaaatttccagctagaaatatactacgagtttaaattggtggagtaacagtaatacggacaactcggattcaagtagcctattgggtatgcgagaatcccatgcaaagctctacgaggatttttacagtgaaaataaaatcgctccaaattaaacgctttgactgacagaatatgaatatcgcacatgaagtagccagctgattgataggagaaatgaagctcaataaatttgaaattgagaaaaggttagatcatactgataagaattaacaacgctagcataacgaggatgaactagtataattcagcagatagcaatacagaaaccgggcaacacgatcgattacccgacgatcgagaggaacagaaacaagaagcagaaacaacagagtaaatcaccatgaacgaacgaatgatttcatgctgcaacaactggaatttcactgatggctgtatgtacctgggagtagcagagagctctcccagctcgcagcctcggatctctcctcgtttcgcttcgcccggacgaaaagcctggcctcggaactgccgctaatttatgctaagcactctcctctgttactgtgttcttggagctgatgagccagccagcagatagcaactgaagctgaagctgcagctgcgaaccgagcagggaggagcagagtgatggcaaggcgactgccattttatacgcaagctaatctctccatcaaatattcaattagtacggtaatgacgcacgctaaacgacgctatcatcggtgacaaaggtggccccggaagatggctacgaggcgttggaccaaaaaaaaaagagagagagagagaggaagagaaaaggaaaccagaaaggagaagtagatgagcagcggcggcgtacacacgcagacacaccatccatgcagcgacatcttctgtttatctcgtcagtgaaactgaaacgtgtttggtttgcacttgggcgccggcctgcctgcctgcctgccactactgtagattgcatgctttgcttctttctgccggatagtataccgacggatcgagaattgtctgaccaagacggcatgctttgccttcgagcctgttcactttggtgccatttttaaccttagcaaattttaataaaattgttaaaaaagtggctacatttagtttgctgccaaattttggtaactatataagaaatcctgctaaaattttggcaagttgctaaaattttggtaatgctaaaatttggtaaggtttttttttcatcaaagtgaacaggcctttcatcttagtcttcagttaggtttgggatggattttacaatataaaattttggtacctacatacaaatattcagtctcatcgttctatttatgtttatatttgttagctaaaatttaaatttagagttgattttaggtttttttttcatcgtagtttatttttcagtctttatttttaagtcgttaagaacgtgtatatgaaaattttattcacaaactatttttcatttgtaaatatacgtgatggagctgattgctctttggcttgtactttgaagttatctaggctgatataaattcagagatgcaatttcttaacaacagtatatcatggatctcatgctgatgtgacatggcaatgccaaaaaggatcggagccattgcctgacaggtgtgattgggtgccaacccctaaccgaaacatcaagagaagcatctggtcaaaccggccggacagtaacatctggctacgacttgggagtttcggacttcaaaacaggtgatccatcttcagctgaacggcatatccattacagtactatcttccaaccaaacttaactgatactctttcatccggccgagtaattaaccttaagcaatcgattgattgattaattagtccctctctaatctttcttgaggcttcaaaagcaaaagagagtctaatttgccatgtcattagccgactgcttttttgctaatcacccaatgcatgataaggtagcatttcgttggtgccctgcttctgcttctgctttgcgccgatgagccgatctagttgcaccaaaaaggggcaactaaaagagacgcaatgtggaatttgctttgtgctgcattggggacggataagcctcgacaagtagtcgacagagagtgcttgatgcgtcgcgctttggacctgctgacggggtttctcacatgcgctgatgcacggcacacaaaaaccgactagatttcgccgttcttttatccggctatatcctgcaacctgcattagaaaatcgtcatcattctaagggtccaagattaccacccatttttattctgatacactgcacgttcccaatacattatactcctgcgtaaaagttaagggtctcattggttgtcctatcgcttataagtcagagccaaaatttaaattttaaaacttgattttcaatttgattttgatgttctttaacatagtttttttttcaattttagcttttaagtcgctaagaacatattatatatatatatatatatatatatatatatatatatatatatatatatatatatatatatatatatataggtaaattaactggtgctacatggagtatgggctccaagattcaaattgagtatatacccaatttaaatgagtatgaaatttttttaaatgtttagatatgaacatcaacttctttactaacaagttcaaacaagtttgaactttttttttgttagattttggttctaggtatataacatccaaacatataattcgttaggtatgtaataatgaattgtgaaataaagttgagtttgagttgttttgttgttaggtatttgtatgaatcaaattcatatacctaggtatatactcacaatttaaaaattttaaaaaatttgagagaatttgtgtgttttatatcttggagcccgagcaccatggagtcccatatgtgtatcatatatatatatatatatatatatatatatatatatatatatatatatatatatatatatatatatatatatatatatatacacacacagaaattttactcatgtattttttttaatcgttaatagctcgttatggcttataagtcataagcaactgatggggataatctaatttattttaaaacggatgaagtatcaaacaaacaaaagtatcaacgttatatatggccattggaaactcgatgacacactttggccgaaaagaacatagttgtacatcaccggatcacccctgcgacaccatacgtggattcaaatgcagtcgcactcatcagcacggagcacgtaattaagtaaaacattatcttgtgacaaggaaaaaggagccggcacacgttgcatcatcatatgtattgttgatatacacttcttcaattcgttggcttttctgcagagatccatcaatcatagcttaggaacaaaggaaactttggctcaatctctccctagcctctatgtacacatgggtcgttgcattctgcacacatcgatgcacatggctcgattgctttgcttgggttggttctcgacctgctggccggtgatggacaaatggcggtgtggcgcccggtagccgtgtctcgactgttctctctctaaaactttagttttgtggtggataagtgtaaagttaaggtttcgttattttcggcctcatcttttcacttaaattttaaattttcaacatttaatttgaagctgatgttgggattttttttatcgaagtttatttctaacctttacttttagatcgctaagaacacgtatataaaagtttttgttggaaatttggtcataattcggcatattttaatccaaaatattaagacaataaacatgacatttgcaatatgagtagatctagtgacagtgatagatgtatacagcttgagtatgcttaatatgaaataagcatcaacatttacatagtaacacaatactgccattgcgaagagtattaacaaagaaacatctaatagaatcgggagaatgaaagtataccccgaaaacatcccaccgctggattttgaagcaggattgcctccgttgatgtcgttcatcatcttgtctccaatctccgtcgacatcttggtgaaggcgtcgatgcagcagcagtagccgtgaagaacaagagcagtcgcgcttgaagcgttacccaaaaacttgatcgcccgcctacccatacaggttctcaagcggacggagtttcggaggcacctgctcatcccgtacacctgagcgcgcaggtgaacagaaccggggaaggattctacagctcaagaacagaggaggaggaactcgaagtgcaagagaggtcgggaagaacttctttcgtccttctagtcgctgtggagtatatatatacgagcgtgggagtaacgttcggaatcatcaaccacggtgtttaatttcgtaaccgacgcgctcgttaatacggaatcaattcacgacgtttaattccgtaaccgacggaatcaattcacgacatttaattccgtaaccaatgtgttcattgatacgaaatcaattctccgtgtgtttaattccgtaaccgacggaatcaattcacgatgtttaattccgtaatcgacacgttcattgatacgaaatcaattctccgtgtttattatcgtcaattcatgacatttaattccgtaaccaacgcgttcattgatacgaaatcaattctccgtgtgtttaattcgcgttcattgatacgaaatcaattctccgtgtttattaccgtccgttacaaaacgagagagcgcagcaatagctatctgcctcaccccgcctggttgtccgcgcaccatcaatagagactctccactagctctgtatttaagttgagacctcttcacttatatttctaaggtggtattattacccatagcacttaatgtgggccaatggaatttattaggatttaattgggcctaacccattaatctaacagttttattaaaaaattactctttgttgcaaatatgccgtttggcttatgatgggaacctttgttttctattttctgctagtgtgtttagaccattttcagcaaacgtaagagttttagcgaaatgaggttaaccccctgtaggagctgagaaaattcatttgttacaaagaaggcgttgtaaaacgagaaaaaggaacaatactgattgagaggatggaaaaggcagaaatgggaaaaaaaaagaatatggtatgaaacaaagaaaagaggggagaaagtcaaagaaagaaaacataccaaactttttcatgaggggaaaaatatgccaaacttttcctgagaaggaaaaatttatacttctaccaaactcgaaagacaaaaaaagagaagagaaaatgaaccagaccgaaatgggaaagcaagaaagtagtcgaaactggaaagcgagaaaacataccgtcatgggccaaatttctctacagatcaaagcccaacaagagcccgtttgtgtacagcccatcttacccgtcacggcgtcacctcccgcatccaccgtccaatccccgcccccccggatccaacggtccacgcgacatctctcccctcattaaagccaaaggcggcacgcacgcacccctccccctccgcgctcctcctctccctccccctccgcgcaacatccggaagcttctggaaatctggaggcgacgaacccaggagcggcgaagcgcctccaagccctaggcgggaaaggtaatcatcatccgattcgcgagtcgagattcctatccccccgttccccttctcctccttctccttcgccggtgaggagatttctaggtttggatttgtattggtcgcgggatttgatgcggtttgatggttgattcgtgcgcgcgcgtgttacatacacgtcgttgtgtgccgcgcgccatcggggaaaccctagctcgctccaccgcgcggtgtggttgcggtgtgatgccgcccgttaggctgcagcgtttgcttggagggtggtggtgtctttgaggccggttttgtgagcggcgggccgattcgagggggttgcgtcgcctgatttggttatgttttgcggtttgcgtgggatttccttttcgctagggtttgggtgttcttggcggtgtgaaggatggagtgtttgctggtgggattgaatggcaatgatcgacagctgtgtggattggcggcgtgctcatattcttttctaactcttgatttagatgccataggaagatgttatgcattcattcacaacagttatttcttatacttaaacttgattgatatataaagtatgctattgaacgcttctaatcatttcatcagtacggaagatgttatgtattcattcacaaccattgttaacaatacagttaatagttcttatagattattaagttgacgactcttaagtcttgaatgccttgtgtgcgttcaaggcactacttaaatttaccattgatggatgtaaattgggagtggcaattatttgatgcatagaaatatattgtgatgtctatttttctcgaatgctgaaatgttgtagcttgttttattccctaccagcatctaccgaacctttttagctaaaaatagctgaatggaagaatgagtcttgttgataaggtcacttgctgttggcattgttctttttagcggaacgagtagcttatgaaacacaatcgcatcatttgaatttcctctaatggcaatttttttcctgtaagcttagatcactatgggaagaggctatgattatggtccatcaccgccaagagaatacaggagaagagcccgcagcccaagtcctcgtgggcgctatggaggccgtgacagggatctcccaactagtcttttggtgaggaatcttcgccgtgactgtaggtaagtttctttgcaccttggtcagtaactgaatgagtgttttcttgttaagtaacacatgcaatcacacattccggttacactagttgtagttgagttggtgcaattcatcatcatttgggccaagataatgtctctttataaaattataatactactgatgtgcattttttaaatccgtaaattatttttcatcttgagcttctattgcatacagctcatgagcttggtttgcaatgccaaaattcatttagtcatcacttataaaccaaagaagcattgctttggcgcaaaacagattggagtgtaaatctaaacattgttcttctgttgtaatgacataaggcaaatgagtaaatgtttgttgttttcctaaggattttttttgtaacctgtgttattattgtcatctgttggatattatatatttgatttacagaagttcgtaactgtaaggatttctcgccttttcatgtcttttaatttcaatgctattttaccactttctccatgttgcatgtctttaccttagacataattatgaatacaggcctgatgatctacgaagaccatttggaaaatttggtcgtgtcaaagatatatatcttccaagagattattacactgggtaaggcacctcaactcaaatagagccagtgttcattttcaactggaggcctacatgctgtttagggatcaaaccatgagatgtttaggatgctgtgatattttttcaatccagtaatatgctatttttggattcatttgcaattggcttaaacatgtgctttggaaatgtttgtttgtgctttagtacatttggtacacctaaattgaatgatttttgcccacctcttaagattaactgtgaaaataattttttgaagacacaagccttaagagtactctgttgaagagaagggaagaaatagagtataagagatatgcaagttatgaagagtttcaagtctatctttaaactctgatgagtacaaggtcagcagcctagtgcttgctttatctgttgaaaaatttgtgtatcaacatccagggaaaggaatcaaggttcaaggatatgaataatcaattgttcctttacttgactaaagtcaagtatccttttcaggattttcttgtatactgttcagaattgtgcaattaattaaagctaaatcttgttatctgtaacagggagcctcgaggatttgggttcatccaatattatgatcctgaggatgctgctgatgcaaaataccacatggatgggcaaattcttcttggcagggaagttactgttgtatttgctgaggagaacagaaagaaaccatctgagatgagggctagggaaagagtcgggtattgcactgctctctttcatcctttttctctaatgttttttgttttgttaaagtattatctcttttgtggcatatgtaaccagtttgttcatcttctgcagtagcagggaccgttcttatgatcgcaggtcgcgctctcctagatactcccgctcaaggtcacctgtgtactctccaagatcacggtcccgtagtcgaagctactcacctgcacctaagagaaagcactattcaaggtttgacttcagtatcctccatggacgtttatattagtttattcacaacaaaatcattcacatgttttaccatcttagcaggtctcctgcccgtcgggagagatctctgtcgcgctcaccagcggacagcagatcacgaagtagaagcctctctgatgaccgccgcagcaagtcacctgacagggagaggtctctttctgttagccggtgaggagcttaggacccaaatgccaacggggcactgggttgaaccatgtttcgatgatgactgcttcttgttactaggttgaaccatgtttcggaatttttaggccatcctgatcttctaggaatgttaatgatgtgtggtcttctaggatttccttttcattgttggatcctgaagataaaaagtcgaagcatcgaacaacttatcatattctttgacctcgtgcccattttaagtgactggttattgccttttgtggtcctgtaacgttaccaatgatttccccattggcgagcaggcattgttaatgtaagaactcaagtcaggattactagttgtctcaattctgcttttcatactcatcatctggaggttattttgttggttaataagaacagttttttttctctgatacaaacaatgtacctggagttaaaatcggtatatactcgagagatgtgacatgtggcaatcttcccttcttttggtgccctttagatctggaatttctttaaggaaccaagatcattgcctcacaaaattagacctcacaaaactctgctattcacatgatctcctggtttgtggcggcactgattttgttttgttcctcgcttagacgcgtagtcgtagctttcgcaaacgtagctgaggatttggatcgttcgcaggccgaaaccaggagacgatgaacgacgatgcaaatgccaattggacggcccggcgctgatgcagttatgcttatgcaacatatgaatgtgatgagcgcaaaatgatccactgctaaaaggaaatttatacagatgttgaaaggtcaattgagaagctggaaccgaccatgaccgcgcatggtccagtacaatatagaaatagtagcacatcaatgggttttgaagaaagaaaaaaaaaagaactgggatcagtaataggcttataggcgtgccaactcacctcaccttcaatcaagtactctacagaaaaatggtacttcaaccagcaaccagtgtagtaaaatggtcggtaaagataatgtggcccagcaaccagtgtatatgtaggagcagcttggagttggcgaggatttggtcggcaaaaggaggccaactgccggtttgaccacggagtaataagcactgcattgccttctggttgatctcccggtccttacgagtcaagcagtaaactaatcttttaatcagccggcagcttggccacggttaaatgtcctgcaaatttcggtcgcacgtaggagtagctgcctagaaagagcgtgttgactctccaggaaaggcaacaattaattaagaagaaaaaaccgaattaattgccggacgaggtttccggtcagtttcatcgatatcccaatccaggacaccatgcaatgcaactaacttctccagcagtcagcagcactgcgttgggtcgggtcgtccatgtgacgcctcattcccgatagtcatagacagagatatcatatccacttacacttgattagctgtaggatctgaacaagaacatactaggtaaacagttaacagtcctgaccacctctgttcatgccccagaagaagaaacattgttcagaattttattttctgtacttgatgaaagcaggttacagtgtaatcttccttttttatatagaaaattttgacaacaaattaatccatgatcacacgtatatgcacaccataatctcttcttggttaggtcatgcccaattgtccatcgacactaactcattgcatccacaaacgaatgatgcacatggattactgcttgctggctgcctactgttctacttcagctgttttgctggtgacaccgacaagttcatgattctctgcaggaaatcagtgagaatgccgatcgaagcacaatccatgacatgacatggcatatacgagcctgattgattaccatctagaaaatatgtagttatcatacaaatatatgcggcttgggtctctttaattacgatctgtaactacggtttcatatagcagcagggaaagggcaatgcgtatcatgtcagggttatcagccacccatcaaaatcaagccagccatgtataattgtatatgaagtgtatttctttcaaaataataataataaaatgtatatggagtatatatatacatgcatacatgtccgcatcttgatcgatcggtgcctgtgattaattcaagatcacagaaaaaaaaagataatgcacagtgtcagcacagctggaatagttgttggccaagctggattcctgtcaggtccagtttacatcatctctgacaccctttttaatcgatcaataattaatgttacttagtactccctccattccaaattaatctacatatagttttttttgaagttattcctaaatgatctacatatttgtgttcattcattaagtctattcgttatttgtacattggagtaaatggacattgatgcatgcatccatgcatacaagtatttataacccacatgtaatatcttgatttgctattggctaggaaatagtgagaatggtgtatgcatcgagtttgttgctagagtaaatatagtatgagagatttattagtttttcttggtcttgatataccatgaaatatgtatatcaatttggaatgaagggagtagtaccacttaactgaggaggaggagcgtgtaatgctgcttaattatatagagcagctgatgcatgtgaatatattgatgtttttgtttccgagcggatatattagatgatttgactctctaatccaatccattaattttgctcagatatccaattaattcatgtttctttcatcaggtcaagctaattaagtattctctctatatctcaaccatgtcagtatggttccaagtagttgtggtactaaacaaatggacggtgatggcatcagtttatttttttaagctaaaaatcttaaatgtaaattttaagaacttttttgacactccttccattctaaaatataagcatttctaaagtttcatgtgaaaattaggaaagcaagtggatataaattgtaatggttgtggtgggttgagatgagaaagaagattgattgagatttaacatgttatattctgaaatgagtattaaatgttcgtatttgttccccgcaaaaaaaatattcgaatttgttatattttaagatggtgtaatatatttggactaattatctacttatacatatctaacctgcactaattgaataaataagtgaccaagatctactagattttatctcgatcctacgcgatatagaaaaacatgagtttaattagtttggatgtcaattttttcccttagaatcataggaacaagaaagctttctactccatccgagccctaaatataagagattttagttggacgtgacacatcttattataataaatctggatataatcatgtccaaatacattgtactaagatgtgtcacatcaaaccaaaatctcttatatttaaagataaagggagtatatttttcttttcctcattctttcgaatcaaatgcatgaacgggaacctttcctagtactcctcccgtcccacaaaggaggtcattctgctcgcaagcaaatgtcccatattttttgacattgtacgctgtacttccccaacagcacacagttacgaacttctagaaaaacatccataaaaatgttttgaattgattggaccggttacattagtttaatccattaagtagtagatgtggtagttcattttcactcaaaactaatttggctcaatcattctagaacgtccagcattttgagacggagggagtatatgatttcaattgctctttttttcctctactttttgtccaattcaaatggtttaaaagggggtgtgtttagtgagaataaccatggtttatatgcaaataatttaaaacgggaagtacatcttgaaaagtgtcacgcgtactagtagatgaacactacagcgtccatgtcagctggccgccggcgcacgtgggagtttgccctagcggtgtgacccgtacaagcgtacgtacggacgcacgagtgcgtcctagctacacgcaggctagcagctggctgattaattgggcctttaaatgcagtaacctacgaactgtacccatctttgaccagaaatccccgaacattattactccattatcttcaaattttccaacaacagtagtaagaatgcaagaccgacagtagtcaaacgaatatgcagtacagcaagcatagacgacttcaggtctctttaatttaacgaaataggtagcacgttttctttaaacgattccaatcactcattttgccattcctaaaacagcatgattattaatgtgtaaaattaagtttatcaatatgttctttccagcttcctcttaaaaaaacttcctccgtcccaaaatataagcatttttagaataatgtaaagacgaagatttttaactttaactattagtagaaaaaagtaaaaaaaaacatcaatcatgtaaaattgatgttactagatgtatcattcaataaagtatcataatatacaactcattttatttaaaacgtcttatttttatagatattgttgatcaatgtagcatctcaaaaactgtgtcgaaatctaaaaatacttatatttgggacagagggagtatcttctttttagctatttactatttttcaaatatacaaagttgttaccttttgaacatcattgttgcacaatcgtcttattaaaaataattatgtaaggatcatctattttgttttgaattgttttataattaaagttattttaagcatgatttatattttttaaatattcacactaaattttgaataaaatgaatggttaaacattatgttcaaaagttaataatattatgcatttaaaaacataaggagtgatatatatattctacaaagtaggaaatgaacatactatatcatcatgatgccatcaagctagctaattataacatgtaagtaatcattaatttgcaccataggactattgttgacacgctttattttatcattaagttcgtacgtaaccggcggatcgacgtagactcaattcaaaccttcattaaatttaaaaaggttatatatccccgttttctctccctaatccagtctgtcatgtgcttgctacttcttgatacaatcgttcgtaaagtgcaagtttagaagatcctccccacttaaattaattattatatcatgccgaaagaacttaattagcagggcacacgttgtttctaggcaagatcagcagcatttcataatatatatgtgcatgcatgcatatatgtagatatgtcagtgtcatgacactgaggaagctagaaactctcacttataattccaccacacaccaaaaccatttgtctcatcgatcagtcccctacgccatattaattgttaaaatgactttttgacctaaatttgtggtccaatataacacacattatatgaatacaaaaaacagaaataatgctgtttttaaaataaaatgttggcagaaaaacatgaaaataaattaacaatgggattataggatatttcttagatccttcatgtgtctaaaaccctagtcgtcgccacagcccacaggaaaaacaagctaggcctaacaacagcaacactagtgctgtacatatataattatatatttattcatgctgccaaattaaactagatgcatgtacattagctaggttgtgcgtgtcggagcccataaatccctctgcccttcgcgtgatccaggtagattagatttgccttgctgctgtctctcatgtgcaccgaccccctgtctgattaattaatttattactaatctataatataaaatacttctcaatttatataatattataaaatcgagtatcctgaactaattaattcgtccaaaatggaagcttccacggaagtttcttctgtgttcttctctccttggacgtactcgaccccatgcgattctacgctagcagctgggagatcgagagtatagcagtttttgctacgtcatcgatgaccatgcattaggctaactaataatcaagccatgcattggttagctgattaatttcaacgcatgattaaattagcgtcaagaacaccctggcatttcggactagaaaactgcatatcatgttgctggttaaggtatatatcatcatgctcccaacggagagtacggagagatgagcgattagatcaattaaacagggtgctttcggtgtcttcttcttggataatcttggcacttttctgcataattaattgttagtgcatatatgtatatgtatttgtgtctgtattttgtgatatgtttttgggctcggaggttgtgtgccgtcgggctggtcagcaattgcgttcagagggcaacgtcttagggctttctttttcgatgaataatttatctaggtattaatataattccttctgtcttgtgcctgtttaattccaagagacatttagcatttgttgtttgttcctgctgctagctttaattactctgcatcattaatacggtcccagttttgttggcaacactggtattaatacgcatctctgtactctatgattctctctatctttgcactgggattaattatgagagcatttcctgtggtctaggggctgagtataaactctcagcaaaatgtcatgaatttaggagggaaaagaatgtaacgaaggctttcatccactagtcatcataaacttcagcaaaaacaaaagaaaaagttcccctaagaaattaacccgatatgaaatgggaaaaattttaactgcagtttaatttacagcctcatcgtttgggataagccaaatggcatatttgtaaacgaaaaaaaatttatgaataaaaattttatatatgtgtttttaacgatctaaaatcaaaggttgaaaaaataaactacgatgaaaaaacccccccaaaatcaactttaaatttaaggttgaaaatttaaattttaactgatgagcatataagcataagcgaaaagatgaggctgttattgattttccttgcacaagtcatgaatatacatttgatttgattttttttcctggagttatagatgtcgcaattatgcattttaccaaaattttgattactcgctgtaaggtatttttatggttaatttagtaccctgttgaccatgcttagttacaatcttgttgcagatctgctctatgatgtgctaacctaagtaggatgcacccacatttgggtttttgcttggagacctagcaacattgaaggaaaacaaaattgtggcagtgtccaatttctcaactcatggcccatggtgtccacgtagacaaagaaatatataaaggctgtgtttagattcaaagtttggatcgaaacttcagtcatttttcatcatatcagcctatcatacccacataatttttcagtcacatcatctttaattttaaccaaaatctaaactttgcgctgaactaaacacagccgcaccgtccaaatttctcgacaaatttggagttttggactgtcagtccatcccatttttgagtctcacacggcatgggcgaaagtaaccgaccgaccagcagcgctcaagtcaatttaagcaaaaacaagacaaactgtagccatcaggccatggcgtgccacgtgccacctagaatggcaaccacgtcatcaacgtatatgcagtgacgtgtccatatacagttgatttgcacgataagagtctcatatacaagcaaaactaacgaatatgtttgtttgcgtaaacatcatacactgaccatttctattaggcgtaaaccaaaatcaacttccgtgtacactgatgaagagaaaatggaatcaaaatctagcaatgtggagtacgtacggtaaatagatcaaattcaaggacaaattctttcgtatactagaaaaatgtccgtgcgttgcaatggatgaatgttattttaattttattattgttatacggtttaggtagaatgaaatttactgtgttaaattcgcttggatagaaaatcatgagctgcaactaggagtccgatcgtctcaagttagcatgcgaatttttttaatgagatttcttatgcgactccttttgtatttacaaaagtgaacgaacttaaaatccgactcaaatatggatctgtgttttcaaaagcgaatgaatttacaaaccgattcatccacatatgacgtaccaaagtaccaataaaaatatcttcaatttttataatagcagagattcgtatatatagttcctatgataggctatttggttggtgtttatagattcttcttttataatcctaccaatctagcctagaagtaaaatttactactccttccgtttcatattatgaggtgtttgactttttttagtcaaacttctttaagttgtctaagtttgtagaaaaatatactgatattttcaatacaaaacaaacatattttcaaaatgtattcaatattaaatttaataaaactagtttggtattgtagatgttgctattttttttctataatcttggtcaaatttaaagaactttgtataaaaaaaagtcaaacagcttataatattaatcggagggaatagttaagattgtttatgaagtaaacatgccatctttgggcaatgcacaacacgaactaagtgaatcctaaccatctagaagtaaaattgattaaattcaaaattgctcaagtaaatatgtcatctttggacgaagcacaatacaaactgaatcgtacccttctagaagtaaaagaatttactaatccagattgcttaccaagcaaacatgtcatcctcagatgatgcacaaagtacaaactaaatggatcggataaactgtaccttttgaatccgtccataattaacgtatcacctgtcgctgccatcgtctctccttgtcgctgcaattgactttcagcatccttcctaacgaataaccatgcatggttacaagaaattgccgcgtgtatgtcattacctttagctaattaagtcccttcataagctttggtaaattatggtgaaaaggtccagcactctgaaaaattccatcaagaacatcagtaaacagcatttgaatacttaaaactgaaatatgggctacattcacactcgatttaactatgttgacggagattaagtcagctgataagttttgccagtcaaagcgcaaatatttcgagacgaaaatgactcatgactataaataatcactccacaagcagagtagtagtagtagtaacattatttgaccaaaccgaccgacctatatgctgattcagattgcttgtgtttgtcattttcctcgttgctctgaacttctacgtgtaaaatccatcggcattgccatttcactttcagtgcattgtagaggaaaaacaaaatcaatccaactttaaaacaggtcctgcctgaaaacgtcaagaatttgcaaagaatgtgtaagcagtaactgtacagaggcaaatattcagacattccaagcagaggctcttttgctgtacaagcaataaccgtataccagatcagtagaaattcagacattccaaacaagctagtatttgcagtaactaagaattttcagaagaaagaaatagtagtaaaaaacacgagcagatccatggctagagaagaggagacaggagagaagaggacaccacctacccaaacagcgtcgtcgcgtggtttgatacacgctctcacctcatctcatctcgtcgccattgacagactagcgccggcctgtccagtgccgatgccgagtgacacacctgcctgacaacacgtacgtacgtggaaatcataaacctttttttttattttatttagtttcttctcgccaccgctcgccttcgccgagctccctatatatcgccgtcgtctcgcactgcctccatcggatatccagctcctgcagccaagaaacactcacacgcacgcacaaagcgatcaggcaccttttgttttgttgctttagaggttaattacaaacaggaggagaagatcctagttgtctagttgaaagtgaggtgagttcttgtcgttttgagtttttgatccaatcttgttagtgaagtcgtgagcttgttgtttgtttggtggtgtttgttgctattcttgttcttgaaatctgaaggtgttgtgtttggttggattaggtggtagagaaagagagagatccgggctgcaagcaaatgggcgtcctcttctcgtgccccgtcgatgactacgacgcattggaggagagcgccgcggcggcggcggcggcgtcgtcggagtcgaactccggcggcggcaagccggcggcgatcctgaaggcgttgggatccgggaagctgctcatcgaagggtcgctcagcttcaagcgtgaccagcagatgagccccacctccctcctccaggtggagaccgagatctccatcaagcctgccgccgccgacattgccgccgcgccaagggcgaggttcgccgccgacggcggcgcggcggcggcggagagcccaaagcacgaggcggcggcggtgaagctgcagaaggtgtacaagagcttccggacgcggcggcagctcgcggactgcgccgtgctggtggagcagagctggtggaagctcctcgacttcgccctcctcaagcggagctccgtctccttcttcgacatcgagaagcaggagacggccgtctccagatggtccagagcaagaacccgagctgccaaggtaacaacactgccttttctttttctttttctttttctttttttaccacctgcagtttgtgtctctgagtaatttgatctgaacatctttttgcaaaatttggctgaatttcaggtcgggaagggattgtccaaggatgaaaaggcacagaaactcgcattacagcactggctcgaagcggtgagtactgagttacaagttgaatgtgtgcaaattattcagtttttttttttttaccgctgtgttatcgttcaatgagctaatgttgcaaatgttcagattgacccgcgccaccggtatggtcacaaccttcactactactatgatacctggctccactgcgagagcaagcagcctttcttctactggtcagtatacttgtcactcagatatcacagtttcagactgaatagaaatgttagttcatggatcatgatcctgatttgattatgtaatgcaggcttgatgtgggagaagggaaagagatcaatcttgagggcaagtgctccaggtcgaagcttttgagccaatgcatcaagtaccttggtcctgtaagtggttgcaaacatgatgctaagaattgctagagttagaacatcacgaagttgtaaagtggctaacatgaaaaaactgaaattattttgtgcagaaagaaagagaggactatgaagttatacttgaggatggcaagttcttgtacaagaaaagccggcaaatcctcgatacctcttgtgggccaagagatgcaaagtggatctttgttcttagcacatcaaagagcttgtatgttggccaggtaattttcacatatcttgtgtcatattggctaaaactattgccagccttagaaatgtccgttcattgtgtaattttgtttttgtaatctcaaatgcagaagaagaaaggcaaatttcaacattcaagcttccttgctggaggggcgacttctgctgccgggcgattggtggttgaaaatggaaccttaaaggtatgtattgtttatagtcagtccattgaacaacttgttcatcctttacaaagaactgggtcatgtgttgagttctagttgcagacaaaatgctgacacaatcatgtttcctctttgtctgacaggctatttggccacatagtggacactaccgcccaactgaggagaacttcgaggagttcaagagcttcctgaacgacaactctgtcgatctcaccgatgttaaggtaagcaagcacatcatgtaaattcagacagaaactgaaaaagaaaaattctcaatgctgcagttatcctgtaaattttcaagcaaactgaaaactccattcagctgtgaatttgtaatctgacatccttttgaattggtgcagatgagcccagcagaggaggacgaggaattctggggtagcctgaaaaggatcagttcagagagctaccccaagaacactgccactgacaactctgaagaccaagccgctgaagctgaagaaaccggcaattcccagatgcctcgagtctctgacgaaccaacctgtgcagagatcgacggctgcgacgaaccggcggcgacgaggagggtagattcgtcgtcagctgttgctgctgctgctgagaacactgaagccgaggaggaggatcaagaaggcggcggcgagcaggcgccggtgccgagggagaagatcctggagaggatcaactccaagaaggggatgaggtcgtatcagctcgggaagcagctctccttccggtggacgaccggcgccgggccgcggatcgggtgcgtgcgcgactacccgtcggagctgcagctgcgggcgctggagcaggtcaacctgtcgccgaggagcgccgccgccgcgtccgcgtcctcccggttctcgtcgccgcagcgccggagcttcaacggcgcggcggcgcccgccacgccgagggaggcgctccggccgtcgcccctgcagcatgggctggtagccaccgtcgctgcggctgactgatcatggacggccttcgccgtggaagaagaaaaaaaagatgaaacttttgccgagtaatttgtataattgcatactaatttaaattttagtgtagatcttgtagaacaggtaatatacattaattacatatacattgatatagtactagcaaagttgtttgacatagtgtatatatacaagtttttttcattcttggaagaagttgaccacaagtgcacgaattgatatgatatatgttccaaaaatacgaatgtatttacatgcccatatgttaattaaattttgatatccccgcaaaaaaaataattaaaatttgacatagaaatagcgatttctgaattgaaattgaaagaaattaaagaactgctttgaagtctatatagatacaatatgaaaattttaactgcaaatttcaaatatatagagaaaaatgtttaaatttatttgtggggacctcctcaaaagagtcggttccctccaaaaattagcgtatgctgctaattgcggcgcgcacacggtattctttagtaaaaggcgaaagaatagttcgctctgtgctcaccgcgcagctgcgtgagttcaagcgttggcaccagacccctatatatagcagagctccctaaggcctccgacttggttaggcgaggtgggactaaacgagcagagagcactctactgtctaactgttcgccctgcgacagccaatgcggcccagatgcaaacgggaggcctacatgagccgcccaacctgtaggcccaaaagcgaaggcatcatgctgaaactggaggaaacaagaacagtaatggtcctttattatgttatttttttgtatacaaagcatgagaagagatctcgtgagaaatgatcacggccaattccaataacagaagagatctcctgtttttgtataaaccatgggaaatggtcacggccaattccaaatccaagtgctacggcagtaccatttcccatggcacagtatattctcgtcgcaaaatgaagatatctgtatatttgccaaagaaaaggaacaaagggagaaaagaatcgacattttcacgaaggtgaagcatgcagacatgctagtacacttgctgcaagatcacctagtacagacagacaccagcaatcactagtcagttgacatgccagtgctatcctctacattcccaacccaacagaagccagacgaaaacctctagccaacaacagtgcacgcaatgaatcaacaaccttagttagggcgtgtatttgagttagacaggtgcattcaccttatgcaattagcctacctacactacacctcttcttccgctggagaaaagcagacgagagatgaatatcctactttctcagtttctccctttctgaagcagccgtatgtactttgtccctgtagaacaacgccgtcatacaacatcatccaatggtacaggccgtgatggggagcgctcttgatggggattcttgtggccagtagatatgccatactcttctgttaaaataccttccgactcttttatgtcattcagagctctcttggcgtacaccgtgaaggcgaccgtgaggacaacagcgatgacgaacgagatggcgttgtatgttatctccaccggtgtcatcttgtagttgccatacttcatgtcagccaatgtgcgtatcaaccgcccgctgcaccaaaacatagaaagatgaacaatcaaaagcgcatcactgaacaccatacctagtgcacttagtaactcctgaaagaaaattgcatgtgtcggtgacctgcattagttgattaactgcaagtgtatacactactgaattgctaaagttattgtaaagatagttatcctgcacagataacttttcctatataatataaatttactcttttataataagttatcaatcacaaaccttctgacatgttttcatgtatatatagcttgcaaaactagtatatccaataccgttttactggtgagcttatgcttgaaagagcgattcattaaaaatcagtgactaggtgcactattgttgacaacatgataaataaacagcaatggaatacagtgagtgaggacatataggtagcaaaattggatgtctgcagattggagaggtatgtaaccaacctataaatatagatgaacgcctcgggtatcatcccagcaattgaaccacatagataagggttgaacttgatttctgtcacagttacagcgtagttaaaaattgtatatggaaatggcgagattctgaatagtgcaacaactctaaactgctggaaccaatttccttccccagcaagttttattagagctatctgctgaggccatctttttaaccatgcctgcattaaaaaatgtagagggaagaagagagcagaaaattagggcaaagctccttcaaaaaagatgcaggtcctaaaatagacatcacaagaacatgcagttcagaatttttacatgcagacgttcgcggaacaatgagccaatccaatatggaaccaccatgcctatagtagtcccaaccataataatcaagaaaccccaaccatagccaaagatcattccagctagccacatggaaggtccagaagggactaaagtaactgggaagagggctaaagatgcaacgagaacaacagccaaaactggacgcccaaaggcacttgcttcccattgcatgattggcaagagaacctacaacaaacagatcttccaacataagtccaaacaattttctggaaaatgaatatgattaaaatgttactcctatctggcacaacatggtacaaaaacaagagataattgaaaattttgtaaacttgaaattaaattgcattgtgacagccgtgcatccattaaccatacattcatctagcattccaactggtgtgcataaactagggtatacatgggaacatatggactagtcaaactatcaatcaacagtttgaaatttcataagcagaaacctccactaatgcatggtagtggaggtttcataagcagaaacctctgccgacaaaccataaaaagaactcaagtcaagatttcagtacttggtcaacctatgaacctatgacaaatattacccttgatgctcaccttctcgaaggcaaaggggactccccatttcacgaagacataagatactaatataagaaggaagcagccaagcagaactttcatccaccaaatggaccttgaggtaggttcttcaggtaggactaccgtgttatcatcagctattacactatgagctggtctgaccagcctttcatattcatcatcctttgtgttttgctcaggttgttcgattccgttgcctgatgccactgcggaagagcttggcatgtctgtaactacctcttcacgtctgtttacaaaccaagcagattagaataagaagttactcaaaacatgtaacaaattttatcaatttatctcattgaagtaaagatgccatgtgcttgttttgttttgtgtactggaaaagcatggaaattagttgtatggattaaatctaaccaagatgtgcaacaaaaattaatctgatatgctcacattcacaagcatggctcatatctttgtcatttgatctcacattctgttgggctgtaaatacaacagtatgtgtgtgttttatgtgctggcccatctgctagagggcccatctagtcatgtatatgtaaataaggatagcaatacagagaaggtgaagcttccagagaaaattggctgccaaaaaacttcatggtatcagagccgaccggccggcggcaggcgacggctgaaccctagctggccggaggcgtggaggcttgagcagggtagagagtgcgcatcagcagcggcgcggaagagcggggccagcgcggcgcgtcgaggaggaagaagccgagcagctgcaggtgcggagctgctgctgctgcttggggctgagctcgcaggtgcagagctgctttgggctgaggcaagaaagaaagtgctggtaaacagctggtgttggtgctcctcaggaagaagtggctcttgctctgtagtggcggggtcacagcacagtgaagactttgcatctcttgtgggtgtgtgattggcaaggaaaccgagataaaagcacagctactgcttttgtgatattgactatttgagcaatctataggaagggaaaggtagaacagggggctcagatctgctagttgggtttctactggtttgcagtttcagaatttgcattatggcagaaaatcaaggaatagaacaagtgatgggtaaattggtggacatgctagcgaaaaaatttagtgaggcctcaactacaagcaatgcaattatccctcatactgaatcaatactgaagattgagttaatgcaaaacgaaatcaagttggagggtgtcaaaaattatttgagttggtcaaggagggcattactaatactaaaaacaaaggggttagaaggatatgtcacaggagaagtgaaggagcctgagaacacatcaagtgtagaatggaagacttggagcactaccaactctttagtggtggcatggttgttgacttcattaatcccagctattgctacaactgttgagactatctctagtgcgagtgagatgtggaaaactcttactaaactatactcaggagaaggtaatgtgatgctaatggtggaggcacaagagaagataagtgctttgagacagggggagcgctctgtggcagaatatgtcgcagagttgaagagtttgtggtccgatttagatcattatgatcctcttggattagagcactctgattgcatagcaaaaatgaaaaaatgggttgagcgtagaagggttattgagttcttgaagggtctaaatccagagttcgaaggaagaagagatgcaatgtttcaccaaaccactcttcctaccttagatgaggccattgcagctatggcacaggaggagcttaagaagaaagtattgcctagtgccgcaccatgttcaccaagtcccacctatgcaattgtacaaggtaaagagactagagagtgcttcaattgtggtgaaatgggacaccttatgcgtgattgtcatgctccacgcaagcctacttatgggagaggaagaggtgttgatagaggtggaacaagaggtggaagaggctatgctggtaggagcaatagaggaagaggttatggatatagaggtgattacaaggctaatgcagttactctagaagagggttcttccgggactacacctgacaatgttgccaactttgctcattctacttcaggtagttttaatcaagcatttatgtctatgaacacttctcattcaagttggatattagactcaggtgcatccaggcatgtcactggcatgagtggagaatttacatcatataaaccatattcatttgcacataaagagaccattcaaactgctgatggcacatcatgtcaggttaagggggagggcatagtgcaatgtactccatccattactttgtcatcagtgttatatgtccattcttttccagtgaatttaatttcaataagttctcttgttgataatatggattgtcgggtttcccttgatcgtgagaattgtttaattcaggagagaagaacagggaagaaacttgggattggtatcaggcgtgatggactttggtacttggacagaagagggacaaatgaggatgtgtgtgcactaatggcttcaacaagtaaagaagtgactgaggtattacttttgcattgtcgactaggacatatatcttttgaaattatgagtaaaatgttcccggtagagtttagtaaagtggataaacatatgctgatatgtgatgcatgtgagtatgggaagcatactagaacatcatatgtgagtagaggacttcgcagtattttgccctttatgctaatccactcagatgtgtggacgtcgcctgtggtttctatgagtggaatgaaatattttgtcacctttattgattgctattcccgcatgacatggttatatctcatgagacataaggatgaagtgcttaaatgcttccaaaacttttatgcatatattaaaaatcattttaatgctcgggttcagtttattagaactgataatggaggggagtatatgaatagtgaattcggtcactttctttctttggaaggaatattacatcagacttcttgtcctgatactcctccacagaatggagtggctgaaagaaaaaatcgccatcttttggagatagctcggtcactaatgtatactatgaatgtacctaaatttctatggagtgaggcagtaatgacggcagcttatctcatcaaccgcacaccatcaagaatacttggaatgaagacaccatatgagatgatatttgggaagaatgaatttgtggttccaccgagggtgtttggctgcacttgttttgttagagatcatagaccatctattgggaaacttgatcctcgagctgttaaatgcatctttataggctattcatccagccagaaggggtataagtgttggagtccatcagaacggcggacatttgtaagtatggatgttacgtttagggaatctgttccattctatggtgagaaaacagatataagctctttatttgttgatcttgatgatttaactagaggtgaccatgatcaacaaaaggaaggtgaaatcttgggtctcaaggagaatgaacaatcaaagggaaagattgtggttggtgaaattccatgtgctataggtgatcctgtacaagaacaagaatggagaaagccacatgaagaggaaaatcttcaagtttacacaaggagaatgagacttccaacaactcaacaagttgaagttgatgatcaagtatcagatgatcttactcatgtgcaagtgtcttcggagtcagggggagaacaaatagaaattagagaagaagaatcaaacttgccaattgccataagaaaggggatgagaagcaatgcaggcaaacctccacaaagatatggttttgaaattggagatgaaagtggtgatgagaatgatatagccaattatgtatcttacacttccttgtcatcgacatacagggcctttgtggcatctctaaattcagctataattcctaaggattggaaagaggcaaagcaagacccaaggtggcatcaagcaatgctagatgaactagaagctcttgagaagaacaaaacatgggatcttgtatcctatcccaatggaaagaaagtggtaaactgtaagtgggtatatgcagtgaaacaaaatccggatggaaaagtggagaggtacaaagcaagacttgtggctaagggatatagccagacatatggaattgattatgatgaaacgtttgcaccggttgcaaaaatgagtacggtaagaactataatatcttgtgcagttaactttgattggccattacatcaattggatgtcaagaatgcttttctacatggcgatcttcaagaggaggtatatatggaaattccacctggatttgctactttgcaaactaaaggtaaagtattgagactgaagaaatccttatatggtctcaaacagtcgccaagagcatggtttgatcgatttaggcgtgcaatgtgtgctatgggctataaacaatgtaatggagatcacacagttttctatcatcatagtggagatcatataaccattcttgctgtttatgttgatgatatgattatcactggaaatgattgctcggagataactaggctgaaacaaaatctaagcaaagaatttgaagttaaggacctaggccagttgaaatattttctgggtattgaaattgcaagatctcctagagggatagttctttcacagcggaaatatgcattggacttgctcagtgacacaggtatgcttggatgtcgcccagcctctacaccagttgatcaaaatcataagttatgtgcagagtctggaaatccagtgaataaggaaagataccaaaggctggttgggagactgatatatttatgtcatacacgacctgacataacttatgctgtcagtatggtgagtcgatatatgcatgatccaaggagtgggcatatggatgctgtctataggatcttgagatatttgaaaggaagcccaggtaaaggcctatggtttaagaaaaatggacacttggaggttgaaggctattgtgatgcacattgggcaagttgtcctgatgatagaagatcaacttcaggctattgtgtgtttgttggtggcaatctagtatcttggaggagcaagaagcaaccggtggtgtctcgctcaaccgctgaggcagaatatcgggcaatgtcagtgagtttgagtgagttgttatggctaaggaatcttctttctgagttgatgttgccggtggatactccaatgaaattgtggtgtgacaacaagtcagcaatcagcattgctaacaacccagttcaacatgatcgaacaaagcatgtggagttggatcgtttctttatcaaggaaaaactggatgagggagttttggaattagaatttgtaatgtctggtggacaagttgctgattgtttcacaaagggtttaggtgttaaagagtgtaatagttcatgtgacaagatgggtatgatagatatctatcacccatcttgagggggagtgttgggctgtaaatacaacagtatgtgtgtgttttatgtgctggcccatctgctagaggcccatctagtcatgtatatgtaaataaggatagcaatacagagaaggtgaagcttccagagaaaattggctgccaaaaaacttcacattctaggccatgataatctacatggcttttccatacagaacctggtaaaatgaggacgacgataaaatgaagtgctagatttcatgaccgaacagagaatgtacatcgatctatagctcaatcaatagatgccatcggggtgctacatttggacaataaagtgcagtaatccctaaaactaatgcaataactgcatatctattctactgaaatacaggtcatctttctcacaccacagcaatgtggcatgaactagacaaaacatttgacatgtgacaatccttgatctaaaatttgaataaccaggtcaaatgttccagttcgtatttttctatttgtttaacacaatacaacaagtatacttaatttacatatctagtcaaactgccagcggccaatttcttcccagtttatctgcagtactcaacaccctacaacattggtttcgtaaagagcaacagacagcactcaatcatgacactccatctttccatgcgaaatactgctataactagaatttcagatatggttttaagctgtaacagtaaaaaaaaccgatgttataaacatggttaagcaagatttcccaaaatagctcccgcttgagttgcaacgattttgaaagaatcccaaatggatcactccatgctcgctgcccttcttgctcgttcatgtgccacattggcctccaaaaaacggggcgtaggtgaagaaacagttaacaacaccccgtgagtcttgtgtccgtgtccgtgcatggtactgctgcgaggggaacatcaacccgtgcccatcacacatcacagcgcccgtgaccaaaaggctcaatgggctctctaatggcggataagcggcaacgaagaacaaagtgcacgccacagcacgcataaatgccacttttgttttcctcttggagtacggaaaattgaaagaaccgaataagcccaaaccacacgccatgacgcaatgctattgcactttggtgggagaacgcaaccgacctcgaggcttaaaaccaacaaccacacccgcaatctttggcatacaaaaaattctccaaaattttcggccgacaaaaattctattttgaatttgtaaaagaacagattaacaagaagcctcccaaacaaaccaccttggatgcatcgtcggctccaactaaacccaaactccttttttctcctactaagaaaatcgccaacacaccaccaaacttcccctttttttcgaaggaaaaaaataactccaacaatctgaacgcgatgaacaagcaaacaaacagattgcagcgagagctcggggaaggaagaatacctgggcatggccatctcccccgcctcgatgctgagggggaggacgcgtgccatggagagacgaataccaaagagagacgcgtggtttgcctttgcctttggcttttccacctcctttctcctcccctttctttctggaagctttgcagcagcggaggggggaggagagacgaaagcagcagcagcagccgcgcggcgcacacgaaacgagagagaaaaacaaaaggcggtagtagtagcagccgcggacccggcgaatttaccgggatgcccctgggtggaggcgaggtgggcgcgacgccgtgagtgaggcggacggaagacggaactggccctgctcgcacgcccgggggaagggggaatattcgtcggcgcgcgcgggggcgtggagtcgctgacgaggtgggcccaccggcgggggggcgggggtcgaggtctcggtctcggtgcgttgccgcgtggtgacgcgtgtcggggggtggctgccgggtggggcccggccgggattgcttccgtgtgggttgtggttggttgctgggtagttgcgcggttgctgctcctgctagtactggtcagggttcataatttccacgaaaactgatggagttttacgaaatttggatacagcttgaaattaagtttcgattaaaattttaaaagttaaacagtatatttggtcgaatttcagttgaaatttatcaaaaaccgattaaaatttatcaaaaatcgtgatatcaataggactcgaaatttagtagtcagtcggtaatgttaatgtaaatcctggtactagtttccccatacttcgaagggaagcagagtagttaaatatggagtcaagttaattaatgggtcgtcattttgtcttggtcaaaccatgctagctgctgctgttgtcgtcgttaaggttttgctttgagaattcttcgcttctagagcagcaagatgtgttgttggacggcttctagaattgacctgatcattttggctggattgctgcttggttttattctaaagtaaaagtgtatgcatggctaggggttgacttttgttaaccatgatgtatggggtgattatactagtggtatagtgggccgtgcttatggtgctcttaaagcaacagtagtgcaggatacgccctaaaacctttagcgaggtgtcacgtgctacgtaggccaagacactgaagtctggtttagtttccaaaatttttttcccaaaacatcaaattgaatctttggacacatgcatgaagtattaaatatagattaaaaaattaattgcacagttaggagggaaatcgtgagataaatcttttcagtctaattagtccataattagctgtaagtgctacagcaacccacatatgctaatgatggattaattaggttcaaaagattcgtctcgcggtttacatgcgagttatgaaattattttttcattcatgtccgaaaatcccttccaacatccggtcaaacgtatgatgtgacactcaaaaattttatttttgcgaactaaacacaccttgaatggacacaggtttcatgttgtatgtggtctcaagggtctatacataggctccacaacaaatctcatgtcacggtctatctctgatgagctcaggaacacgtacctcagctcctcacatagagttaggggtgggcagaataagaccgaaccgatgagccgaaccgaaaagactaagaccgagatcgagaaatttggttagtagttcggtctcagccatcgaaagaccggatttttttggtaattcggttataggcttcggttaaccgaattaaccgagaaaaccgaattgtggcccaataggcctaggaagcccaataaacccagtacatacagcaaaccctagaggaggacagccgagtaaagtcaagcacgccctcaccgcctcacatccatcgcgctgcctccaaaccaatccccaccctagcgcaccgtcacgcctccacctcgcgtttcctccgacccccgcctcgtgtcgcctccgccctccgcctccagcgccggcgccaccttcgcctcggcgccgcgccgccacctccgccctccgcctccagcgacctgcgttggcgccgcctccgcctccatcgcgccttttatttgtgacttgtgagctctagtgttgtattgtcaactgttgctgttgtgaagtttagacttgagacctatcttgtgatatattttttggtgtttgatgttgcctattatttggtatttttgtgatatatatgactgtgataaaatgtctgaaaagaggggaagtgctgtcaatttttttcatttcaaacttatctcctgaaaattcggtcagaccgagaccgaatttgccggtcctgagtttccaaagaccgaactaaccgaaaaaccgaagaccgagaccgaattttttagtctaaccaaacgcccacccctacatggagtacaccgagcgcaaatatggaggatgaacaacacatcaacacaatttctgttgtggatggtctcattgtaataagagaacatttttatttatccacatgtctggttatgatatgcagtgaatgatatattgtgcttcacttattaaaaatgaagtatataaatccacaagtaaatagaaatattatttatccataaagatattccatttgtgcataattctgcacacatgattggcactgatgtggatggttttctaatagtaactcattgtttttcatttcatcgttgagcaaaacgcataggtaggagttaacatttcttaaccttaacataagttaaaatcaaacgcggcgataaattcaaacaaataggatcataaaaaaattgtggcgaacaaactatggttttctttagtttatttttctttttaatgttaatcttcctccacacaaaccatcacatctacctcactcttttgtatttttcaatctgttctacttcaaccatttgttcaattggtggtgtataggtttatcggattgaacttttagcatttgagccaaaccatatcatatggaaggtatcatatggcatgttcgattgctttcgctggccttgtgctcatatcttgggtacacagagcgatttgtttggttacgtggttatgcgctccacctaaatagaatatgtataaaatgcatcccggtcctaaacgagagttgtgagctttgctgtgagatagggatggataatgcaggcagacagctttccctacgcacatatttgtgtagcctcgtactcacgctcacgatctttatcaatagaatcactatttcacactcgacaacaacttcatttgtagatatttttaaggtctcatcccctttattttaagtatatgccatcaaaatatggtacttttaggtactactatcctacctttaaatgctatttcaaaaattaaactaatggtcatcaaatgcatggtcatgcgaggactgattactggaggcaggggcataagagtagtttacaattaattacgcaaactccgttttgagttccaactttgaacggtagagacagaacgaaaattttgattcaaactcgatggctgctggacagctggaaattcaaaacaccccacacgcgtccgcccactgtccttttggacccagatcgcagcgaagaagcggactaagcggtccagacccggttcaactgtccgccaatgaaccgggttcatcccgaccgcccgacccggcccgctgccttgagtcggaggcggcggcggcgaattcgttccgatttggggaaaaaaaaaataaaaaattcgaaccaaacctatccaaaatccccatctcgccaccatctgcaaactcgccgccggccaccccgccgtcgacgaaccccacccaaacctcgccggggaaccagtccaagctccgtccaaccatgcggaagaacttccgcaagcggaacctcgaggcggacgccgccgccgaccactccgacgacgacgacgcccgccggtacccctcccctctccccgctcccgccgccgcgcctctcgcttgggttttggtagggatctctcgctgactgacgcctctctccctctccccccctcgcagcgtcgccctggaggagatcaagtacatgcagaagctccgggagaggaagctgggcatccccgccgccgccgccgcagcgggcgcgtcgtcagcggcttctgccgacggggcctccccccgcggaagaggcggcggcggaggtgggttagcggccggaggggatgccgagaaggaggacctcgtcctccaggacaccttcgcgcaggagaccgccgtcaccatcgaggatcccaacatgtgcgtttttaacttcgcgtgtgattgttcttgccaatctgttgttttcattcatctttgatgatgcggaattgaagcggagcgtatgtgcgtgcgtgggtctgatgtttgaaggctgaggtatgtggagaacgagctgttgaagaagaggggcaagaaggttgatgtgaaggacaaggaggagaaagaccaggtcgatgagctctacactgtgccagaccacctcaaggttggtagccgaacagagcttcgatgcactcctgaaaggatatttcatggttttgatatgtgtgcattgtaatgatggtgccaatcaattttttgcttataggttaggaagaagaactcggaagagagctcaacgcagtggaccactggcattgctgaagttcagctgcctattgagtaagttcttgtgccccttcgtttgttcttgtttataaaaggttcatttgttcatgtttataaaaggttgttaaggtagtcttccatattatgttgtaattcaaaggggaaggtgcccaaaatactgcaatgcatcataaggagatgtgcatatgggcttgttaataaggatatttattaattgactagctgaatgcctgtgcattgcaacagaattttggaaaagaagaaattcattatacacattttaaataccctaaacaaatttgccacattatttttctctaatcatctagatagatgctttcgccatcaccttcacacgggaatttagaagacacatgttactacgccctaacaacaagtagcccacctatcagggagtgggtggtggtgggcggcaaattcaccactcagcaccaccattggagtcttttaaaatggtatagataactgaacctacaaaactccctacaagtatgcactggtcttatggacatctctggttgtacttctattaaaaaagtacaacttttcttctatcatacatgggaatgatgtgataatccaattgagactttttaggacagcatgatagttagataagataaatggtccagtgggatggacaaacctgtaactgttattttcaatctaaagttctaaactgatctatgcatacaatggtgtgctcgaattataattcctgatttcgaaggtctctgaagggtcaacaactcaacattgtactgtcagcattgtgggttcaatataacctaaaaggttcctgttcctcgttaatattctcaaggttcttggtgctatatatgtatattaatctattattctggtactagagtcatgcactcatgcgtttctttagaactgggcctgcagctatatacagattcatgttaccatcttcttgattgttgcaggtacaaattaagaaacattgaagagaccgaggcagctaaaaagatgctacaagagaaaaggcttgccggtaaaacaaaatcagatgctaacattccgtcgagctataatgctgactttttccatcgcggaaaagattacaccgaaaagttgagaagaggtttgtacatatacctttcagttttcaggttatcataactagttttacacttgtagtgtcatcaccagaaactatcgagtcttaagtctatctgatattgtaaggcacataatgctcccagaggagtttaccagtctaataaacagaaacgccttcaaaaagtactatatgtttctaattgtggtttctaggaacgaataatttgtaaaagtacaactttttttaattttatatttacctcgcacataaagttaaataacaggtcaagtctatcagaaatgtagaattgtagacaggcataaattttgtcactagtacactgccgtagtgctgcaccagttcttcaaataaatatatattctattttttatttaaaaagccaaaacaactatcttccaatctaaaactaagtaaaacatgttttcttgtaatctacatatgcacatgtgtaaacgatgaaattggttaaaaaaggatcatgcaaatgagtaattcatatgcataaatacatggatgatcaatgtaaagcacacgaacaccattatcgattcctcttttttttttcatgagtaagagagagatgcaaggtatgcgcacaccagtcttatcagatgccagctttatgtaacaactgatgattggcacttgatctaagccatgaacagagctttcgaatgataatttgcatatcagatattcctcttgattcacttcaatcacctgggcctgctgccagcttttgaccagttgcagagcaacacttcaatcacaacaacttatttccagttttagcataccgaatataactttattcttaagatatccctttttattaagaacaatttgctatataaagaaaacagaggtacccaatggacctacagcagaagtattcaggttttatataagagttttgatcttcagctgtctttaatacagatcaattgttcccctcaatagacctgaattttaaattaacattgaaggaatccactaatcgttacataatacaaattgcaaatagcctgtgaaacaatctatgctgcatcaaaatccacgaatatgggaaatgtgatggtagcaataccatttttgaacttctgttttagaaacaatagctgtggcatatcattgatataatttatcgtttaagtgctaaactgttccattttccttgcagagcatcctgaactgtacaaagatcaaggttcacaggctaatggaactggaggtaaatcaatgggtggtaaccatccagatggtgctggtgcagggcggagagaagctgctactgatgagttgttgcttgagcgtttccgcaagcgtgaaaaattccgtgtcatgcgcagataacatgaaatggaataggatgctaacttatgctatttcctttaaagggcaagcgtgtcagtgtgaccacatgatggccctctatacatcggttgattttggcttttgcttctaaagccagtgtccatggctcatcatgttataggcgtatcttcgaagcatttgggaaaattggacaggtcttcatgaaactgatcaatattgttctgtactgagcagcaatccaggatctcgtttctctcttttctttaaaactgctggttcaaccatggataaattgccaatgatctcagatatgcctttccatcccgatcctgaggcttaccttccatgcttatcatttctgctgcttacacaaccaccttgcggcttgcaccttattactgaaaatttcctggatataagcaagcactggcaatgtaccttatgttatattttcatcagaaacactcagctttgttgatgttgcccttctgaaacaaggaaaagctgtcagtaaagaagttgttaatttctgctccgtgcattgatgtgaccttgcataattttttgagccatcatttgtttggtacattatgattatcgctgtattaatgttgaccggctattttgcatctataactggattggatggcgtaatgcttgtagtgtgcaagctgttagtacatatgttaggttaagagaatgtgggtttgtcacagttcagaaatattatgtcattttagcatggttgcatgtcgtatttgagaccgtactgaagttgagttggtgaatcatccattctgtaatctcaacctgtgtactgaggctgtttatttggaaatattgtgcatgctcatactgggtgagtcttctgcccctcggattgatgagattttggtccatgtgtaccttttcagccgtctgattttctgctcaatgtttcgattttctgctcaaaaggctttctggaaattttttccattgcttgttggaatatttggaagcagagaaatgccttcatttttcagagtgtggatccacatccttctgattggttggttaagttcaagcatgaaattcgatttcatagttgtaggatgaaagaacctctcttatcttcggttattagagattgtttagatcccaaaaaattttggccaaaaacgtcacatcaaatgtttggacatatgcatggggcattaaatgtagggaaaaaacaatttcacaagtttgtatgtaaattgcgagatgaaccttttgagcttaattacgtcatgatttgacaatgtgatgttacagtaaacatttgctaatgacggattaattaggcttaataaattcatctcgcagtttacaagcggaatctgtaatttgttttgttattagtctacgtttaatacttcaaatgtgtgttcatatacttcaaaaactttacacccaaagaattaaacacacccttaagggtgtgttctctattcccggctgggaacttggaaaattaaacacacccttaagggtgtgttctctattcccggctgggaacttggaatagtacgtacggaaaacggaacggtccattagcgcgtgactaattaagtattagttttttttttcaaaaatggattaatttgatttttttaagcaactttcatatagaaattttttgcaaaaaaagtatcgtttggcagtttgaaatgcgtgcgagtggaaaacgagggagatgggttggaaaaagggagtgccgaacacaccctaattagttggttgcaagctttgtaatcatggattttttgtaaattctgtatatctttacctattataaaagttcaaggtgtttttgccagaattttggtacgtcatccgtgtttgaaacgattttagttttatgttttgattttaatctatacctctacttaaaaaattcccgtcttatatacataaaaaaagaaagaaaagtccgaatcaaaaaggtaaataaagaaagaaaagaaagtccgacttaacgagctattaaaaaaaaagcttccgtcgtcgttagtaaaaaaaaaatatctcttgtctgactctatagagaaaggaaaaaaatctcccagtaaaaaacaaaaaatctgtttgattttgttggcaccggtattttttttccttttttctttgcacgcagagttttttttccttttttctttgcacgtagaagagttttttatgcggctaaagcttttgtttttttttatctttttttaatccgatctattcaccgtgcatctcttgggtgcttatagttttttcgtcaatattttttgtcaccggttttttctcccgtgtgctttttgtttgtctcatccggttttataatcccatctattcgctgcacacctcccgaggtgaaccctagcgccacgctgctgccatatcgatagtgtgttttctcctccaatttaattataaaaatcgattccctactcctctctcaccattttctcaatgatttccccttcgatttagctttaattgctggatttaatctctgttctaaagttgccgattttgacggcgatcttccccggtcatttttatcccgaattttacgctctgattttggggaaaacggaaagagtagatcgagtggatcaaaaaccttgaacaattttggttacccaagaaagattcggccggatttgatggggagatttgctttggcaaacgtacgggcacgagattatcttcgggcacgggattatcttcgggagtcttcgggaggttgaagatggtagtcatattcggaaagttaaagatggtagggtcaaagagaagcagaccaaatggagggaggtagcgggctagcctagggctgaaaaggaaggaagtcttttggctaaaaacctaggaaatattttcattaatttttttaattataatctatagcgatcccaatgttaagatttttattaacttttttaattatagtgtatagtgatcccaatatttcaatttattacttagctcttgatatatcactgtaaaaagtctttacccgttgcaacgtacgggtatcttttctagtattaatataatttaaactactgggcgaaccccggtagtctttctctctcttaaaaaaaaagatgatgaaaacaaaaatccgcaaaattttgtttctgccatttgctgcgcaatccaaaattcgttacgcaccaaatcaacacgatggaacaaaactgtaaaatgttggaacaaaaatggaagctagaggcggtagcaacactggccccaggcgtgcagcgaccgggagcgcgagagcacgcgcgacgccgccccgaagctcacctcgtgcggcaatggcaggacgccgtgctcgtgcctcaccatcgacacgtgcaccttgccggcgaccgaccgggcgacgtcgttggcgccccgccacctccctcgccggaggctgtacgcgttcacctggccgcgggtgtggacgaacaccttgtcaccctcctcctccgcgccctgcaccgcctccacctgcttcaacgccggccacaggttgcgccgccagcgccacccgcgctcgtccctgagcaggtcgatcctcctcttgagctgccagctccggcggtggtcgccgtggtagtcgtcgagcacccacatgctcaccgtcgtgccgcgatcctccacggcgaagacgcacagcttcccggcggcggcgggcagcacgctgatccgcgccgtctctaggtccatcgccgccatgcgctccggcgtctccttcagccggagcttctcccgggacatgtcgaacgccaggagcttcagcttccggacggccggccagcggccgcccgactgcaccagccagtggagcttgccgtgcagggcggcggagcgagcggcggcgtgtcccgtcgtcgccatggtgatcttgggtggcggcgcggggcccacgcgccaggcggcgtcgccgatcgtctggacccggaagacggccggcgccagctgcttccggtagtagtagtggccgacggtcttgccggaggcgtgcaggatgtggaagcgccccgtcgccgggtgcgcgtaggcgccgacgaactgtcggcggcggccggcgcggagacggtggcgcaggcgttggtgagagggttccagagcacgtacacgtcggcgccctggccacccgtcgtcatggccatgcacagcacgccgtcccatgagccgagcaccagcgacgagatgctgtacttgtccgtcgtcgccgcggcgccgagcgagaggacgcgccggtacggcggcacggccgcgccgtcgacgttccagtggctgcggaacaactcgaaccggacgatggtgtcggcggcgcgggtagtgttgatcttcacggtgacctttgcggcgacaggccgtggccgtgggacgtaggcgcggtagaattccggccgggaggtgaggcggcgccaggccttgcacgcggcgcggcagccggtgacgatgctgcgcggcggcaagcgagagatgatcttctcgacgatgtcgtccggcagctcggcggcggcggcggcggacatggtcgttggagttggaaaataatcgattgaagaggaaaatagatcaattaacgcacatatctagggcagctagggctggcctgcctccgaagcttaaattttgttgattcaccatgtatatttttcaaaaaactaatactactccattagtcaaggtctatcttagcttagtcttgtataatttctactccgccactgcatatcatgtttacgtcagattttgttttacttatccatcgaataagtaaaaatcctagttgacagtttcagccgttggatgcggccatgtaggcaatttttttttaacgctaagctagatataagggcatagacattaaacataaaaaggaaacgtatatttggttataggcttatagccatcctgccctattttattccgctaactcctccggtccaggactgctatacgaaagatattttttaaaataaaaattactcaaatgtaattataatgcaattaaactgtaattataatgtgattacagtgtaccataattataattacaatgtaattacaatgatacattatatttacactataattatattgttcgtgtgcttattaaaacaaaatcgatacctacctcatctggtaatggctgcattgcatgttctccaccatgagatcctggatcattctcaccccttatgctagccattcttttttttttccaccagctaatacgtgaatcattgggattgctatacacaaatggagctgcacgcccacttgtattggatcaaactaaatggacgggcatgacggcctatatatatatatatgcaatgggaccttaaaaaggctagtacatgaattattaggatcactatacacaagtgaagccacacgcccacttatactggatcaaacaaatggacggcctacatatatgcaagggtaccttaaaaagactagaggggtgaattgtgtgatttttgtatatatttcgaggatgctacgtctctgtcaaaggctcctgatcagttatcggttgccagctgatgcggattggggagttccatgcaagcctatagcacaacattgacatggcatagttgaccgggaacctatcctatgcacacaaactttccatgcacagtactccgtgcacgtacaccaactagcaaatattacagaaaattcaaaaaaaaaatggacacatacttacaatagtattacatctacacgtgaaatcttatcttcaaattcattatattttagctgtaacaaaaaaagataaaattctgatagatttttaccctttaaactgtcagatttttcacttttttgctacggccaaatataatgaatttgaatatggaacttggcagataagtgtagtacaattaggagtaaatgtctaatttttttatagaattttttgtgatattttgctagttagtgtgtacgggaagtttgtgtgcgtaggatatgttcccctctatagttttgtttcagtgtttatgacactgactgcaacggggaggtgtcatactgtcatttgatgatatcttgagcatcttgcgagatctgactggttcttctctgactgagcagcagagagccataagaatttgtataattgcacgtaattgtagtttgtagattattgctcatgttgttacaactacatgctgcggctaaaatgggtacctcacatgtcgctctgatcaagctgatagttatgaagtggtcataaactgttgaacgaccctaaatgccatgcgctggactacttttttttttccatgatcacattgttagtcttgctggctggagtaattgttggaatcaatagagattaatttctacctgcgagtcttttttttttcatgaacgcgcgaaaaaattgcacatcagtatattaaaaaaaatagagttttagttacacaacgcaatcgaccagaccggtcgttgccgggtataaggaaaaggactgcgagaacgagaaaaaaaaggaaaaagagtaatagtaatagtaatgtatttttggtggggctaacactcgtggagaagtgatcttttcccgtggcacccaaagtcataattgtcccgattagattaagaaccgatactaaagatgcttcaaggcccttgaaacatttttagtccgggtttaccaaccgggactaaaaattgttctttagtcccgattggtactaagacaaatttttagtccaagttggtgttatcaactgggactaaaaatacctctaggattagttcaaaaggaaaacatctttattcaagttagatgtgtgtagtgtgtacaaggtgggatggttacgcgcgtgagggatcttgagttcgaatcccacatcccatatatatattttatttgctatgtaactttagtacaagttttctgtagttccgatttactcgtcctgttgctataaccaggagtaaaaaccgtttctccaacagtatacactactacaaaaaccatttttcgtggcggccattttgggttttcgctgacggaaattggagccgccacaaagcaaaggccagtgaaaatcaatgattttcgctggcggttacgatctgtttgcaacaatagatttttcccttgtggacaattaggaggaccgccagcgaaaatctatttgcgcaagcggctaattaggtggactgccagcaaaaatctatttgtgcaggcggcaccactaagaggatcaccagcgatatctttttgcaaaaacaataaaaataataattcacattcagaagaagcattgttgcattttcaaatttcaaatccacatcaggagatcatattcaaatccaatccagattcacatcaatatccaagatcactacatcgatttctcagtattttcaacatgcaaacatcaacacattgaaatgaaaataacatgcaatcatcaacacgtcgtcatcgttggcgaccttgttgctattgccaccaccgaagcaactgtcgccgtctccctatggcaagagggaggagacccgggaggggagggagggcgtcgccggtccctaaccatcttgccaccggatccgcacccgtcgccatcgccatcgccgccacgaccgccgttgtctggaggggaggggaaggcaaggtcgccaccgctggatctgagagaggaagggaaggggaaagtagggtggccgccaccggatctgagagagggagagcagggtcgctaactcaccgtggccctctcgctacccaatccgccgtccgtgcccgtcccgcggccggatatgccgcctgcggccctgcagcggccggatccaccactagctcctgtgccctgcgcagtccgccggggtcgccgccgtcgccgtcgctggtccgccgttgtcacgcgcccgtctcgcggccggatccatcgtctgcgaccctgcagtagtcggatccaccgttcccgcgcccatctcgggcggggattcatagcccgagcccctcgcaggccgtcgtggtcactgtcgtctccgtcgccgatccgccgaggtcacgccgatcgatgccgagaggaggaggagaaggtgtggacgccgagagtaggaggagaagctttggcctgtgggaggagaggttgggggaggtaggggagaggtgggagatgaggaggaagtgaggtgagaggagaagataagatcgtcggtgggagtggaaagagataacatccgtgcgattttaatatagggaatttcttttcgcagtcggtgcttgttggcggctgttaaatgctgattctataccgccaacatctgcctaaagttcagataataaaacatccaatatagtgataggtgcttaatcttacatattccatagtgttggtgtatatttgtatgcaggtgataaaccccaatgttgggaggaaatctagactaaagggagaagaaacatgtatctatacaaggaggggttgtgaacttcatcaaaatatcagtaaatcaacccaaaactccgagaaatggatagaggaaggtccagggagtccaccgaccgaaagccaggccaggagggcccagctcaggttcggccgaacccccctgatcaccgttgatcctggggtttggcgtggtggcgctccagatgaattcccaatgacggttgcggggcagttcgaacatttccccttctcagaaccgtcataacttacctataaaaggacctcacttcattcactctcacacacacttccaagcttgagctgaattataagaggctctattgtactatattgtatactagaataggaagagagtagagtagaagaagttggaagaattccggagctgtcggtaatcttctcctatttcttttattctgtttattactttgaattcaatataatattcttcttgagtaatttagatttatcttgtgagaattatctcttggttagttcctaaatagcatacgggattattgttcactataatcaactaaaatatagtgattgctttggtgagttataaacactaaagtagatagtaattgcttagacgtggtgtttaggtaattgttatctagtaattgctgcatatcccatagtatgtttgaggtaggtgtagaggtggttacagccctcgagatcacttaagtcctccctgtccgggtacgtagtagagcaacatctgggaacaacgggttgccttggtcttcctcttcctaccggcatcggctggttctcttatttgcccttggagtaggcttgaggtcctgggggcataacagccgatgacagggggagctagaccacctccatttagtagaaggcctggagcatattctatgtctttgccgctattgcttttgcgatgaggagaggattctattgtctgcaagacagaagaagaggttagtcaaaatacaaatcggctgacagtcattttacatgattgacaaagtaaggatttacctgagggataacatctgggaatagatctgtcatgtacatggaagccgattggtggaacaagtgctgcttccattcaccccaccatttgtcaaagttcgtgctcctgaaccttgctagttctacattatcgatgctgcccaaagggggtcctgggatgttgagcagtcgatccatcatcaatgttgatgagattttgcctctgcattgaattttatcggcaaaatagaagccgattggcagctgtcccatcccaaactgcctagccgagctcatgggatggtagaactcataagatacttgtatgtttctcccttgatggatgccaacaggaagaatacatggactgatagcagccgagaagacttctctagacttatcatattttttagaattgatttcttcaaatatgaagtctgatggcagttcaaagctcattgagtcttcatatgcaaaccaaactcgggcatctttctgaaaaccatcatagaaactgaagaaccagtccctcagtagctcagccgataacttggatccagaatcggctggtgtggatgcagcctctccatatgacatgcatcggcggtgggtgagttcttctccatcatcatttgtaatcggttctagccttggaaattcagcatatgtcaaagatgaccgattcacagccttcatggcaacaaggttaagccatgtttgcaacaaccaccaagggccaccagcaccgactactgatccactggttatcttaaccgatgcattgtttaacatctgatacagatagccgaggaggatttttcctaaagggatttgtttcttcgcttcaaggctttcggctaagaactaccaattggtagtagggccacaactcgaatcgtagaataggaatttttcaagccacatcagtaggaaggctacatgttctcggggagtaacagatcctttgcccatgtatgcagcaatatagctggaccagcaacctatggttttagtcttgaatcaaactgattcttggagttcaagctcatagggttggccgatgcggtgatgtctaagccagtaatcatgatgacatctagcagagtaggggtcatcggcccttggttaaatataaaggcattgagggtgttggaccagaagtatgttgcagaagccatcaggggttcatccttagctgaatttactaaagtaagagcaagggcttggctgattcctagttcgtcccaatgaacctgcttgctagccgatacacgcttgtaccatacgggccagcttttctcaggagaacttttctcaagggaaggccaagatttgaaagtatttttccagtgacctagatttgggttggccaatctaaagggtatcctgttggtttcggtgctaatgaactcagtggggtcggaatagccgatcggaccaaggaaatactgatgctcatgagatagactgggaattgcaaccagattggaaagatgctaaaaatgcaaaaaagaatagagaggaagaaaacaagatgagataaggaaaaaccaatctactgcacaaaggagaggatctagccgatgggtagttacctctgcgtattcggctgatggcgcggcagacgggctggtggaagtcgacatctccgcaggcggaagcttggccaaagggagagtcgcctcgagatcgccttgcgcaccgaggggatcgccggagagagagagagagagagagagaagacgaagttggcttgagcggtgaaaacggaagtaacggtgtgaaatttctcaggggtgacggttagtatttaaagtgctgtggtaacggtcggaaaaacggtaatgagcgatattcctggagaagtagatatggcaaatccgaaacattaccaaatattccggacttgggggggcatgtgttaataaccaaatctggtaatttcagtatcggagatgaagataaaaccgaagcggaatccaaggatggatcgttccggaaacagagcaagaatcgactgaagttcgaatcggctgcgactagaatcggcagaatttgagtcggacaaggttagccgattaagccgattctgacaatacgacgcagtacacgtcatcgggttaggttgaagtgcttcatgtgggttgccatgcatggattgagtcctggaaagacaattgtatctattacttaggatgttttatataatttccttagagataagtttaggcaaaagtctgtcgtaaagacttatggtatcttagagtttgttagagataagagtcgtgtccgacgaggacatattttgtatctcgggtataaatatcacccgaaaccatgtaatcaaacaacacacgttcaatacaatatcggtgcatcgctacccttttactttcgtttgatctcgacgagttcttactttcgggttgagctgcatcgtttcgatcttcaactagaggtaaacttgtcatggcgacttgcgttctcaggattagtgcttccatctttatgacactctaatattgtttatgtaagttgttgagttagaatatatcctatataatctctggcaatattgttatttaatcctcagtcggccaacatctataactagaaggcagccgatcaggttaaataccgacattgacttagattatataaggtatccacaattctatgaaacatcgaacagcttgattgtctaggtattgttattcttttcatacttatagctgcatcagttgagtttgatattataagtcgtgattagaatctcaatctctagcctgcttttgattgccgattagggtagtatcggggttttagccaatcttatctgatttaactactttatatcctatatgcgtgattgatatgttaaatctgctctttatgttaagatcttgttgcatttaggtatattaaacttcatgtctgatatattctgcttgctttaatatcttaatgtagagtggtaccggagtattagccgatacatgctagatctatctgatcggctatgttatgaacggttataatctttatgttaatgtatatttcgatctaagtgatttatactgtctcggcatgacaaccgatctatcccaatcacttgatttaaatatacatcgacagaaggattatatatcattaatatctacagccgatcgaatagatttagttctttcttgcttacttatgactgccgatcgattagaatatgacatcggctcaaagataaatgatatgtcatcggcgactggccgatcggctatcgtttatggatttaactgctatttttctgtctttgtttcttgttgattgcaggatcaaatcaactggcattctcatgaatctaaaggtaagatttttggacctgcactggagttaagtagatctcccaggcctcgtgtttttcgcatcggcaccttgcgtacctcgtgcagcaactcgacatgcttctggaacttccgaacttgctgatggcggctttgatcaatgtatgccaggcttttcagctcggcggcgccgatgagcacgagggttctcggcactttcggtgctagctctctccactccttcatttccatcgatcgagctagctctcccccgacgcagaatcgtccaggcgtcgaagaacctgggagtgaccaacaccagcgccctgggtgttctggccagggccttgtcggccggtgatgcggatggcgtcccggtagtgggtgtccctgctggtgcacggcggcttgacaactcgtgctggatgccgatcgacaagcccggcgtagcgcacaacgatgtggtcggccatcgcgtggcgagcggtgccccgcgagagtcatggtggggcagactccaacggaggccgggtcgccgaagaggctcatggcaatggccgccggcatcccgaagcgtatgttgcgcatcaaagcagcgcgctcttggatcttcctgacggctcgcatcccggagctgagttgcatgagcgtccattgtcgccgatcgagctcttcctctccctctcgctctttctcgcttcggtttgggattgggatctgagcgtcttctgtgtgtgtggcaatttggatggagacgaagaggagtacaaaatttatagataagcgctgtgtgaagagtggaaatgggaaaaaaaatttggtgcataccggatgtaaatctcaccccgtgcatacccagcttagatacgcgacacgtggacgaggcgtccatctgacggccggcctgcactgcgcgcgcgcaggcgcacggccatgcctcgtactcggctgggcttgcgcgagcgatctccacgctcgcctacgcggctcgtactcgctcatctcggctcgatctaaatccgcttcgcttgtagcggtaggctcccaaaagtatttcctccccgccgttcccctctacgataccgccgccgccagccgcctctctcatccggaacccgtctgccgctgctaccctcttctacgcgtgggagggcgccgtgccgctgtctgcctgctggccgcccctcctcgtccaactgcccgaggtaactgccgccgctttcttcctccacggcaccacctgggtagccggcgccgcccacagccgctgacatattcctcctcacgcaagagggccactgatgtggtgctgtcgtccgtcgtgactcgtgaaggtggctgcttaccatcttgagtggttatgctattgactgtttgtttataaacaataattattttttcatatacagtcatttacagtcagttgcaagcatgctcacaaatcgatatgcttagtcatgttggctgattcttagtgatgggagctgattccaaatacttcctccgtttcacaatataagactttctagcattgctcaatgtaagactttctagcattgctcacatatatatagatgttaatgaatctaaacacattaacatctaaatgaatgtgggcaatgttagaaagtcttacattgtgaaacggatgaagtagtaaattactcactacatttttacatacaacatctttgcaggggagacagacataaggggtgaagcttggctgatgattcaacattagaagactgcaatgaacaagaggccacttaagaaatgccatagaacaatcaacgacagaaaaatatggactgaaggaaattattctgggagctgatgtgtgaaagtagttagttttgcctcatgtctgtagcctttctttgtaagatgcactaaagtagctgggtagtctgtatatagttaagagtttgcagggacagtagtcatagatgctacaaatttgaacccccttttggttcaaatagcaaagaaactcatatctgtacaatatatttcttttatcacctggcgtgttggatgttatgaaatctgcaaagtgattgatttgttaaaaaacttgtggttgtttctctgattccttgcgaaaataagatctgcaatattgtgtaatctgaaatcgtgatgttcaaatctggaatgtggggcctgttcactttgatgccattttcaaccttaccaaaatttggtaacgttgccaaaaaagtggctacatttagtttgctgccaaattttggtaactacataagaaattctgccaaaattttggcaagttaccaaaattttggcaatgctgaaatttggtaaggttttttagcatcaaagtaaacaggcccgtgatgtctagaagctgactttcttaaacaatattagatgatttcacatctcatacataactggggcctcatcgtttgccctatagcttataagccaaagccaaaatttgaatttaaaaacttgaatttgaatttgattctttttcaacatagttgtcacagcccaaaccggcaccgccgtacaatggcacctgataggagcgtgtcgtaggaaaaacggcgcgaaccgcttcatacgaaaccgcgatctcagtaccagtcccaggacatagcgctggtacccacggtgacaattatgaatcattgcaatccttaaataaatagaggacttatttaccttaacttaggttgcagcttagacagcccgagaatgcaaccgacgacacggacgaggcaaacaccaccaacagcagcagcagcagcagcagaaccaacggtctaacacccaacaccacaggcaacagcagggaactaggacaaaaccctaatcttcacttcacttcaacttcatcttcagagcgggcagaactatatttatatagagcaagggtgattacttacgtactcagcaagccaggggaacttaggtggttaatgcaagcttcaaagataaggctgttatttttcaatcggtttaatttgcaagttttcaataatctaagtgtgtgctttccactaccagagcgagacaagtctcaactcggccggggcgagaagtaacaaatttatgtatcaagatttgcacaactcccggagttggcttcgaatatggtttttcccaaccaaaccaattttccaaacttcccgataatagtggtccccaaacgaccaatcacttccagggactcccggtcccgctatcccccggacagctaaatgcttcccaagcattaggtttcccaaaccttaacatcttttcataaaatagggtaaaacaaaaactacactaaggaatcacctcacatccgcccatgaccgtgggcacggctgttcgaacagtttgttaacctctgcagagggggtacactttacccagacgacattactaacccgggtcacccagcccgtgcagaatagccacgtctggtgactttggggctttcatgacaaggcatttcgaaagccgacacaggattgccatatgccaacgagaggggtcccagaccaacaacaagtttggtcccagaccatactgtgccaggaagcccggggattctccccgacaccaccccgttgaatccacatgtctcttggcatcaaggctcccctgattagctatttactcagccaggggcgtcccattccacccatgtggtcgcactattgtatgcttggatgtaattccataggaatcggtccttagatgcgaccgcacaagtattccgcccaggaatggccttgtgtcgcgagtttcatttttaaaactcattttctttcacaaggcaccgatccaagcgtcgggttttccaaagcttttgtaaaccaagttttacccaagaagttactcagattttaagtttgaaggtgaccgtcgatactcgcacagagtgcatgaatatcgaggcacaactagatggttacaagggaacatgatataacaattaacaatggaaggatcagatgcaacaagttaggtaggcccaccggtctacctcgtagacggggcaaacagattaagtgcaatcctatcaatgcataatattttacaagcaatataatcccttcttcctatatagttggtaccaactacaacattagctcctataaaggaagcaccaggttaagccacgtcattgagactttagagccgtagagccgtctgatcaatctattgtcagatgccaaacaccgttagatcttattctcggctggacacagaaatcaggcccaagttggttagcaggccctgtcaagcccgtccgaactcctgcaaacctctgctggacacactccgcgaagccacgcattgacggggatttcgatcggcttgcttcctggtcctggaccgtgcaatcctcacatacttgggagacggagcgacagaggccgttcatatcctgcgctccacccatcctttcctcttcatcaatcactgccaattaaactagaaaaaacagccgctatcaattgcctacttcaactataactgcgtcgatttaccaacactcgcagggtctcttcttactcatatcatcaccacgacgctggtattctcaagcatggcaccggattaatctactctgctttcagtttggtcacatcttcagcagttctgcatgcgagaaaactgtgagttagctcaatccatgtaatttgcttgctttggatggatctaccgagcacaacagttggccgcattctcctcctgcactaaagatggtagaccatacatctctggccactgccgtagaagtacttctgtgcagaaggtatctatctccacttcttttctggttggttaattcagttaatggaaattgtttacagactatattcaaggtgaaattgcactactgcaggttataaatctttccatttgcaacagtccatgttctatctcaatgatattcatacgttcctcttcaatgtcatgccctcatgcatgcaaaaacaaaaaagggtcttcgatctcagctttaaaagggtagcacaaaattttttattggaatattgaaagttcaggaatcaaagaatcatctccatgggcacaggtaactaaacaggtaaatataagctacatatatagaatatttgcttaatttatatttttgttgatctctttattaattatctttttccgacagtagtccattaggattacactttttgaatgcaaattcctatttcaggattattattatccctgcctaatccatgtataagatttccccctattttctgaaaccaatgtagcatttgcctctccatgaactccggcagaagacagtcacactacaattaaatataaactacatgtactccagcagaaggtagtcgcctttacaacaagaatcaattaatgtcaattgccagcagcataaaaaatctcaaaatgtgttatttcttttttttttttcgaacggtcaggcagttgccgacgttttatattaagaagaagatatcccattttaaggagaaaacgggaccaaaccttacaatgctcagttaatgttatagccatatagtggctgtaaacccgtaactaatcaccccatattaatccctcacacaccatatggtactttagacatgaaaattaagtttctacctcccttattggaatacatatttaaaaccaatttgttcaaattggttttaaatatgtagattgtagagtgcagtgtcaactccctttcgaataattcatttgtcatttttgtaatctacagtatgttgtgtgccgtggtagtatcaagtatgtgtataatcaaacattttcctggactactataatgaaatccaatttacaccgatttgttattttgaattcagtatgtaccataaaccaggaggctttaacatataaatgcacatgagtctctttgacaccacactgaaagtaataaaaagcatacattttggttcacagtttcacactaactttttatgtttgaaataacttattaagcccgcagcaacgcgtggggattcaactagttaagttcaaatataggctcaatatgttcaaaggtggcttgccttgctcagagtcttcacgaagcttcacaaatcttcgagaaatccgcttgaagaaaaatatccggtaaccacaactaggcgcaaacaatcaaaaacctaaacaaagaccaaataaaatatcctatttaggctaattaatagtgccattagatagatcacaatttaatggaattattgaaagtggaacggggtaaatcggagttacggatcaagagatatgaattttggaagtttaaataaattttctggacaagaagatgatttgtcagaattttctggaatacgaaaaatggtttatggaatttatagaaataatattctcaagaatattattgatagtcactgacatgcgggaccgagggaatgaattattggaatcccggaataggataaaggactttatggaattttggaaaaagaaaggaaatacttgtggaatattggaaaaaatattctcaagaatatctttgactcattgaagagtggggccaacaagaaggtcgagtgagagagaggagcaattggaggtagcaattgtggacttttagctcttgggtgtgtgggcactggacttggaggagggagtaaaagtgaactttctatgttttgttaggccgaggaggaaggctggccaatgggccaagcccacgagccagaggagagaggggtggctgacttggcgctgtggactgggtcaaatgccacgtgggctgccacgtaagcgcaagagagaaggagagggaggcagagctcgcccggatcggacggcttacggcggcgcaacggcgccggcgagcggcagcgagccaaagggaggggacggcgccggaggcaagaggaggaggattggatcccttccaccggcgcggattagggcgccggggtcggaggagggccagcgacggcgtccggcggcggcggcgggagcggcacggcgcgggcgcagagggcgaagctagcgactgcggcggcgcttcggggaggtccgagggggcacggggataatggtggcgccgggaatcaaggagaggagggaggccaacggcggtgcgcaaccgtgtgcacggcggcggcggaaaggacggcacggcgcaggggcaaaagagaaggccggcgggcggagcgacggtttggggtggtttgttagagctcaaggtgggtggcggcgagaggattcggcgcgggaccgaccggcggcggcggtgaaacagagcgacggcgacgagaaggggaagagaaccgacagcgaggagaggatggccgatggcggcgcgtggttgcccgcggcggcaagaacagcagcacggcgcgggaggggaaaagaacggtgcgaccgtggcgataagagcagggaggaggcgagtagctcaccgacgggcgaggcgagacggcgttggtgatgagggctcggaagcgagaaaggggatgccggcggcaaggatgtcctggcgggtttgacgccgaggcgggctgatggagttgtccgcccgtggcgagatgatcaccgcgacgggagcggcacggcgccaagacggcgtggccggggaagaagaggggagcgcgaggatggggcggcccagtggcggcgaagagacgttcttggtcgcggcggcgacggccagcgacgaaggagtcggcggtgctccgttcctaggagcatgagaccaaggggatggattggggctcaaggggtggtatttataggcgaggaccgaggagggcgcatgcgagctggcgctcggctagcgaccgcaagcagcatcgacgctttcgtgggtgacgcgaaaacggcgacggcgtggatgcgttgggcggcggaggcggtggatcgggcggagcgaattgaacgcggggcgcgggagggttggcacgggcgagcgggcgcggtcaaggtgggggcggcgaggtgctgcagcggcgtcagcggctctgcctcttgagcaagaagccaaggagttgaggcagggagctcgctacccgggaagggaaaaagcgaaaggaggaggaaagggagctttgctccttccgttttgggaggaaagggatgagaacgagccgcgcctcacggttttggatgcacgcggcatggggcgccgggcccgagaggatgacgccggcgatgactgcaaaaaggatggggacggtttgaaggcgagcgcggacacggtggtcgtcggggcaagcgacgaccgagggtagcgatggcggcgcccaggcggccggccacgtgcgtgggcacgcgggaatcgaaggcggcggccggaattttgggcggcgtcggtgggaagcgacgccgacagagagagagagagagagagagagagagaggggggggggggggg

SEQ ID NO: 7687 - DNA, 24278 bp, Oryza sativa
gccctccttatataggttggggggcagggttacaagatagaaaccttaaccaatacggtatcggttttctaaatctactttacaatcttatcaaactaggactttaggctgttccataatatacagggaaacgtaatacccaagtcatgatctgttacatattttatatatataagttatcccctataactagtcggataaccatgccgtgtgggtatggggtacccataatctccacagtagcccctgagaccttcacagtcggaaagataatcttctctcgaactagattactccaaagccgagtgcttcaatcatcttcgccatgatctcccgagtactttttccaaatcagaagactgtggagggctgaaaaaataaagtcaggtgcatcgactagatgcaccgagtggtttcgataattgtagtcaaccaagcgacttaatatgtagcatatgtggtatgaatccctgaataatatgatccaagtgatataccgactgctttgtaaaatatgatgagtgtaacctaaagttggctacatcattgaaaattcacatagcaaaatagctataaagaagcttgtatgttgtgaataaagaaatttccatagtattgggcatacgccatgcgcacactgctttaacagatgtgcttaagtccctagaagacacatggttccaccacacctggaaatatatggcatatgaggtataaaatctgagtaaataaactcataaaggatttaccaaccgcctggaaaatgaccacaatatataatcagcctaagccataatattggtcaataaaaatgcacacttacgtggcaaaaagcaatgatattgtatccaatcaattgcttaaaaacccaaacaacaccatgactatataaaaaagtcagcggggcagctatataaagctttactgtttgacaccttttaagatgcattataccaactcctaaaaagttgagtaactgcgatataaaaggattttaaggtattgggcaattgatcacgcgcactttggcctaagcaaaaagtgcctaagtccctaaaagaacgtgacaggccacacctgaaaatatgggctgcagatatattaggcctaggccaaaaaatatgccttcgacaccctttaaaggatgacgcatgtaacatgctcccgagtaataaatcttttcgggtgatatagaccaagtgtagctcatatgaatagcttctgatctgagtgattatcctttatgggatactccaaaatagatataacaattgaattccgactggcacaagtattcagttgataacccttacggggaataataaatagtccagtctttgagcatagaaaatagacccatgatcatgaattcatgttgcatgtatccggagcaagtccaaattgaagatataatacttgtatttgagctagtaagcccctgagcacgtagtcacaattgttcattgatggtagctgacgcagttggcatagagacaagacgaccaatatagagataatattgcccaacagaggtggcaaaaatattggtggtagtgaagatagtgataccaatcaaaagtgatgaagttgcacagccgtggaggcgaagaaaccagtcagctgttgtagatgcttcacttggaggagagttgatgttgttgcccaactcgtctaaccgaaatatttgaagttgttgaagtagaatgtctgctccgaagcaaagatgaagataatgactcctggagttgactcgttggctgattaattgatttcttcagcttgacataaaatttgtcaaattttgagccttgtatttgtgtagcccccgactctttgatcagttgggaaacaactgaacatagagtcgagaactgtagcttcttgtcatcgaatagtcataacttgagtgaagatatgtgttgaggatgtccgagtagaaatattgaagattggaacaccacttgttgtaataaaataatacggcatcatatttagtgacatatgccgaggtgtcgaaactcttgtagtcgtcgtggttggtgaagtagcaaagcttgcgaagtagaagcaataaagtttgccggtgccgaagataataaagatgaagtcgctccaccatggtgacaaagttgcatagctgtaatgaagtgaacacgagtcggcggtaacagaagcaaaccggtggtgaagacgcgcagttgtgaagataaaagcaccagtcggcggcggcataaccagtcggcgacggaagacgatgatgtccatcagtagtggtagctattagcggtgacggtgatgtagccagccgtgaagaagatagcatcagttggcgtcataacaggccagccgtgcaggcggtgacaccagtcggcggcggacgaggcggccggtcggtgaagacgtagacgcccaacaacggcggcataataggccagccgtgcaggcggaaacaccagtcggcggcggacgaggcggccggtcggtgaagacgtagacgcccaacaacggcggcataataggccaacgtgcaggcggaaacaccagtcggcagcgaacgaggcggccggtcggtgaaaacgtagacgtccaacaacggcggcataataggccagccgtgtaagcggaaacaccggtcggtggcggatgaggtggccgatcggtgaagatgtaggcgcccaacaatggcggcataataggccagccgtgcaggcgaggacaccagttggcggcgacgaaggcaagccggttggtgaagacgtagacgcccaacaacggcggcataataggccagccgtgcaggcgaggacaccagtcggcggcgacggaggcaggccggtcggtgaagacgtaggcgcccaacaatggcggcataataggccagccgtgcaggcgaggacaccagtcggcggcgacgaaggcgagccggtggtgaagacgtagacacccaacaacggcggcataataggccagccgtgcaggcgaggacaccagtcggcggcgacgaaggcgagccggtggtgatgttctgattgatccattcctaaagcgtaggagataagcttaaagccatgaatcccttttatgcatatctggatctggatcctacagaacaaacagataggatgagtagtacctgatgtaaatataatactcgagaaaaattcaagcattttaaaatgtttataaatatgtatttctcctcttgtcaattgtgatttccccgagcagatgactccttacgtttaaacactctgcccgactagtcatagtccccaagcatcgggagtcggcctaggcacttcccaaacatgcatatgagtgacatgagttcgtcattaatggaacaaagtttcacggatcagaatttactactcgggtacttttgccattattaagagcagaaaataaatttatctcatctctatgcttttgatttattccgaataatacttagcaccttgcgttactcggtccatccaacgagcccccgggtgctaggaatcagcccaaaggcaaccatccattggcaaaccaaacggaaagcataggaagatagaactccataactcgataggtacttttgtactcagattatgtcgcaagtaatcaagataaatattataaaaaatatgatataacatctgtagcccccgactcactactcaatggaagaccaattggtgtagtgaggcagaggaaaaggaaaaatatcatataaagaataaaataaatgatgacttagctttgtaatattccccttggtgatggcagaagtggccaatgtgggaacaaagtcgtccatcaataacaatgaagacaccagtcggcggcgacgaaggcggtcgacggtgaaagtgaagatgcccactaatggcggcacaataggccaaccgtgtaagcggaaacaccagtcgacggcaatgaaggtgagccaacggtgaagatgtagacatccaacaacggcggcataataggccagccgtgcaggcggaaacaccagtcggcgaaggccagccggtcggtgaagacgtggacgcccatgaacggtggtgtgaccaaccgaccgtataggcggggacgccagtcggcggcgacggaggcaggccggcggtgtagatgacgatgcccatcaacggtggtgtgaccaaccgaccgtataggcgaggacatcagtcggcggcgacggaggcaggccggcggtgtagatgacgatgcccatcaacggtggtgtgaccaaccgaccgtataggcgaggacaccagtcggcggcgacggaggcaggccggtggtgaagtcgtagacgcccaacaacggcggcataataggccagccgtgcaggcggaaacaccagtcggcgaaggccagccggtcggtgaagacatggacgcctatgaacggtggtgtgaccaaccgtatataggcgaggacaccggtcggcggcgacggaggcaggctgccggtgaagtcgtagtcgcccaacagcggcggcataataggccaaccgtgcaggcaaggacaccagtcagcagcggacgaggcggccggtcggtgaagacgtagacgcctaacaacggcggcataataggccagccgtgcaggcgaggacaccagtcggcggcgacaaaggcgagccggtggtgaagacgtagacacccaacaacggcggcataataggccagccgtgcaggcgaggacaccagtcggcggcgacggaggcaggccggtcggtgaagacgtaggcgcccaacaatagcggcataataggccagccgtgcaggcgaggacaccagttggcggcgacgaaggcaagccggtcggtgaagacgtagacgcccaacaacggtggcttgatatgccagccgtgtagacggagacaccagtcggcggcggcgaaggcaaaccgggcggtgacggtggctccagcagtacatgtaaagagaaaagcaatctctaattagcatcaagaaaattaatcttgtgtacgtaagtctgcatatatgaagcatgcatatattttttgattggccgattgatctcctgtagcatgaacagtacacacatccacacatgcacgtcaccagacagattgcaggctgccatccgtgcgtacagatcacggtccgagtccggatcaaatccaacttggaggctttacgtgatgggaatcagactcaggtgaccatggcgcatgcaaaataaggaatcacagatcaaactgagattagaaaattaatctaatctaatctagttagtacacactagaagattaattagaagtatatgcatgcatgattaggtagatcgtgcatgtatgttaatctgctaaatcaactcatgcatgcgtgaaatttctccgagcaagctataggcggctgctcccatgtgcccgtggtggcgtggtggccgcaacgcatccgtcggcgctgctcctggcgatcgccgtcaacagctccgttttaacctcagccgaccagcccatagaaagcaaggaaaacaccagaagagcaaatcacaattagaaattaatctaataacagttagatcaaaacaccgaacccgactgaagatttgagccatcgagattaatctcgccgtttcttctgtagttgattccatcacacttttcgatgggtaattcgacgcagcccctacctggcgcgccaactgtcgaaacatgaattcggcaataataaaagggggtagcgcacgagacctaaaagtggatggatgcggagacaaaggatttagacaggttcaggccctctcaatgagaggtaataccctactcctgtttggggatttgaatccgccgagtgtgtattgatctgacgatcaggttgtctcatgcccctagagggggctccctgccctccttatataggttggggggcagggttacaagatagaaaccttaaccaatacggtatcggtttcctaaatctactttacaatcttatcaaaccaggactttaggctgttccataatatacagggaaacgtaatacccaagtcatgatctgttacatattttatatatataagttatcccctataactagtcggataaccatgccgtgtgggtatggggtacccataatctccacatagggcatgaatgagattgagaaaaattgtcaaggggtacacactagtttggataggaagatagggaaaaaaaggagatgaagatcgaggacgtttttcccaagatggaccgtgtgactgatatatcgaaatacaagcagtacacggtcgcaaggtctccaccacggagatcaaggatgccttggccgttccacaccaaatagtgatgatatgctcatgcatgtaacatcgtggagtcccaatctaaatcaggtttaacaatttgggggtgtgtgtctggggaggggggagcggtaaaattagaaattgtagattttttttccaaaatttggatcaaattttttgatgaaatttgagccaatttaaatacatttccacaaaaatgaaactttctacaacgatatctatatagtcccttccccggcgcccgcctccgcccctggagagcacggagacattggtgtaacttcgtgtgatgctatgcctgttttttttttattctcgatgcgaaactatgtcttctctctcttttcgccgatccgaaaatattaaaataataaagacggtgtccagtgacaaattatgacatttacagagtgtcttcttctaaagtttaacttggtgtcttacatgtaaaactgtaaagtgacaatatcatatagcaaatttaccaattaactgcgcatataaaattaattattttatatccactgattatactgaccagccaattacatattgatctctattacacgcatggagacgaaggagagctagcatgacccttattgcatatatatctcgcatgcattcaggttacatacgtttagacgtactactacgatatagcttgatcagtatacagctttattctcggcacacacatatatagtatactcccatgcactaatagtacgtaggtacatgcaagggtatatacaatttaatccattttatcaacgacagttgctgtgctttgctttgagcttcttatatatggtttccagttctgcatactctttgtgcttagcctgcctgtaattctccagtgcttgtatcttcatctggagggctgcattttgattcttcaaggcagcgatttcagcctcgtacgatttgttcttgcttattgctagctgaccacatgcttcatcctgcatacatgcataataatgcattggtatttatatatatagattcaatcaaaattaaagtacatatattaattctacatttgtgtagtatatgtatggtagctagttctacatatatatgttacgactgttatatactgagagagagagagagagagagagagtgcatagagaggaggggaagaagaagggtatagtatgtaccattatattgagctagatatatcgtagctagttctgtttgcagaactacaacacttgttcagtggctaacttagcatgtttctcgcttcctacgtacgcttaaatagacaaagcagcatggaggcttgcagttagttttcgtttcactactataaatccccaggttccctagggttaaaattcgttaccttgtagtgaatttgtccatgttgtcaacttcttcttcctcatttttcatacgtacgttttccgaatgttatgttttattgtaaatttctataggaaagtagctttaaagaatcatatcatattaaacaattcattttcaagttattttagctaatacttaattaatcatgtgttaattcaccgctacgttttccatgcatagagaataagttcccaacttcccaaaagaacagtcttatgctctcatggtagtgtgttgcttttttgggtggattctcctctacttctcgaacaatatataacgttataaaatagatacgcactaaaatatttagagaaaagttatcatatatatatatatatatatatatatatatatatatatatatatatatatatatatatatagagagagagagagagagagagagactgactgagactttgtagggtgattgaatgtaggagagccattgtgatcacttgtaatctaacgatgtaagataagatacaaatgaaaaggtattaaaaatatggttaacgtactaacaacagatgctagctagcgaatacgtgcgacaacggtaagttgcgcaccccgattagagtttagagctttggtgcaagagcgttgcaggtgaacgagagcccattgcagtgcgcatgtctccacctaagcgagagcttcccattccccagtatcacatgaccacaagaatcctaaaacttttgtctcgaattcaaaagaagacttttaattcaaaatctagaaattccttcacaaatttagaaaatttcaactcaaatatgaaaacttttgtctgaaaaattcaaaatttttaattcaaaaaccaacaatttcatataaaaaatttaattgaaaatccaaaacttatatctcaaaaacataaaactttcaatttatgatgccttatcccaaaataaagctatttctccacctaccacctcctctcaaccatttacaatcattatccatttaatttattcatatatattctcttctcaatcaatcacaacatttctctaacaatttttacctactttcttaatacccgagtccacctctaacattttgagcaaaggaagtattttctaatttatggttaaaataaatcaacggtggatacttggttgggtggcttaggagctagtatacctccaagcacgataaaattagttctcatatataggcatgtcattcacacatgatcgtcaggaaactataggatcgtcagtccagtgacttcaatgtatgcatcatctaattaagcacaagacgagcagaatatttaatttactggatatatatgcgttaaaagctattctctaagcaagttgtgatcaaactatatatacccacgcaagagtgctgagatcaccttgatgacacattgaaattattcgtttattagctagctagtagcttggatatatatattggggcaaacgctccctgttttcatcattatacttacaccaaaacaattaattactagtacattttttttcacattataagcagggccggccctgggattcttggccatcctcaacgtctgattgtatggaagcttacagaaaggaacaaattttagtttttaccatgtcaaatcaacctgacggtaatatatagaactctgggagcatgcacgtaatcaactagagctaaatcctatttcatcacattataagacattttaggttttgaatatatatgtgtgggtgtatgtatatatatgtatatatatgtatgtatatatatccatatatgtgtgtttcatatatgtacctacatttatatagatgtaagtggaactaactcttgtgcctgttcgttcgaaacaattagtaaatcaacttggaatggcagaattaattctactatcaaaaaattaggtcaagttggagcaataattcatttttataccgctaacattctatacttctatatctatatacgttgggaaaaaaagttgttccaaaatacttttacttgcgcacatgcatatataccaaagaagatatgtatgttctctacacagtcaaatctaataatttaagacccgtgtttagagcatcaacaatggtgtccctactccattcctaatctttattttttggaattttagtaagaaaaaaccgctccaacagtacccatactattcattccaaaaatcaccattcccttcttcattctcgctcttcacaaatcgggaatcgttctcaatctcaaattttgtctcctgagcgagactgccatccaagaagaggggcgagtgggagggcagcgctagatgggtgattgtggagtcagatggcacgatgataaagcgcgggttgaggtaatacttttaatattctcaaatcctcattagataatctcaaaaggagatttaggaaagagatttttagtcatctattggccatgaggtttcttagcttcgtccgggaatagtcgtctcttgaagagaaagtaaaaatttatgtcaaaatgagatatatatgttcaatgttcaatgtcaaagtgagcacaaaaagctcaaataattgctgaaagttttcttggttattgtttttctcaaaaggagttaatttgagaatcaatgataatgcaataagtctacatgtagagtttttctttcaacctatgtactattgaatatattgtattataaattgtttgaaatcatgaatcttgattgttgacttaagcttaattgtaacatttttggttcatgtttatactcacaatgcatgcttgttaactcgttgatgaatttatatcttttgttttgcaacacacgtccttgaattgctcttgttatatctcaaagctctttgaactataagtggtgacttgcaaaacttgataatatcattgtcaaagggggagaagagatacaaaacatgcatgttttcagctgggggaattttctttcttttcaaaagggggagaagttctatgttgattttttagcactccaatgattttttaccacttatttgtttttattttttcaaataacaaaacaacaaaattttgatcggtttatcaatgtgttcatcaagggggagattatgaaatcaaagtgtgcttgattgttattttgtgatgaacaattgatatgagagacaattggttttaatatttggtggatgattagcgaggtggtgctgactgtgttagcttggtcatacccatcagtggtggccggacaaacccacgtggtatgtgcggtcaaatcggctagcccaatggtttgatcgaccgattttgtattggtgtcgatttcgggctgtttatttggatactcgtgattatctcatgtttaggacttctagaagatttctatatgtatataataaaattgtgtgctaatgttgagtcaagttgagaagaacttatgctcggatatggttgcctatttgattcatgtgtaggaatatcttgatgccatgggagagtattgtcgatgatggatcaggatttaacttgggagaagatgatgtccagatgatcgggatatcatggggatgcttaggctaaagaacaatggacgaggttgatggagattccatgcggcatacgatgggagattgtgtgcgtatggaaagtggagtcaaactccgaaggagtccaaatttgagaagattagagtttaagttggaaagagataagtttgtttcttatacgggaatgtttcctagtggattaggacttcttgcacaagttggattcgtggctttaggctatctacctcgagtgtaagtagagaggggggctaagccctcctggtatcgatttgtacgagttgagctgagagaaaaagttagggtttcgagtttagttgaaatttttgaaagaagtgttgtagttcgcactttgtaaacgctaatataatcagtaaaggttgaaatttttgaaagaagtgttgtagttcgcactttgtaaacgctaatataatcagtaaaggttaatctatttccacgagttatttaatttgtgtttgctcggtttcgagaatcacaccggcaagtatacggcaaccagaccgatggcttaccaatggtcagaccgatgggtatagggcagttagacctgcggcagcgacaggcgcaggcggttcgataggcggtcagactggccgatcaatactgctcagaccggctgcaagggcatggtcagaccagggctagccagttagaccgatctccaacgattggaaggtaacttttaattccgcaaaaacttttggtttttggtgttgctgccattcacctcttctctgatgtgtttagtttttattgtttgatccatgaaataattgtataccatatttatattttgagtgaagtttagtttggacctctctttcttgccaccgcgccttagaccgatcggccaaactgtagtggcagccttaagcaatgatgtagtcagcaacaacagccattttctctatgcacattaagcctgatggccttaatttttcactgatcagttttccctaccggcaaaagaatgacgttcagcgggttatatggctgagaatttgcttgtcgctcaacccgtcatgaaacactcccccatcatacattttccatttccgcatcatcctactcctgtcaggtctctttcaaggcttgttcggttaatcccaaatgagagatagaaaaattgagcagattaattaattccaagtacagaattattttccttcaaatcccattcaatccttttatgttggggattaagcgaataagacctcaacactattatttttcatgttggtttttgcaaattccctgccagtatttttgttgtcacgaaagataggaatcctagtagatgtcagaagcattagcactcggtaacttgaagcgctgactcctgaccaatctgtatatgttttttctgcattggctacatataaaggatatatgtcatatttatgacttgaggaaaatccaatggcccacaatgattatcaattatcatggcttctatttcgcacgattgatcatccatcctagcaatgattcataaatcaaattttgcatttcttcttttctattacaccgggggccgccgacctactatgtacagggatatgatcaggtacagttgtacccaaaaattttgcaaaaaaaaaccccaccatatattatagtatatgttatgtatatgtactaatagttgggtcaaatgggtaatatttgagtttaaaatggcattctagatggtatggaaatttctcgactgagccgttattgtttctgcaaaaataataatataataatatattgtgttgttaacttttatggtaatgcttgaaaatatcgcaactggttctatgcaaactaaattaaaaaatattgcagacaacaaaatacttaaatgattttcttggttacatgctttgaaatcgacattttctacatattcagaataaagatgtaatatcccgtttataaaaaaaaatcacatcaagtatacttttaattttatttttttagtatatattttgtagttctagaaatttattgcacactatactcactttactaaactatgtccatgttagtttttcttatcaaggcatttatcattaatttatatcaagtctatatatagtaccgtctttttttaagaaaaaatacaaagatttttttcttaacttcatacccacattttaaaaatctttcatccaccaccgtattacactagtgatctaaactagttgacatctctttatcacgttacacataagagtatcatctaggtattatgtaagaaatatatatagcttagaatcaataaacaaccaagacatcaacatgcacacaggatcaaaggccaaacataaataaaacatttgatttcatacaacaacaatgctgaccacttacatcaatattgatgcatgcatggagatgaaggtgagctaccatgcatgacatagacgtatggcacacatttttgctgctagctagcggccggggtcatatccagcttattacaaatatgtatagttatactcacatacatcactcatatctgtaggtataaaacaggggagtaggtatcataagcatgcatatataagtaacgtactccctctatcttaaaataaagggattttatccatgtaactgtatatttacatggataaaatacctgatatttgaattatttatatatatagtatatatatatggatgcatgcgatgacatacatgcacatagattatataagtatatataataaaaactcttccatatcttaattatccgcagcatccgggcctactcatttgccacctgagagcattgtgcctggcctccaggttgtggtagctggtttgcaggttgtggtggcaggcttgcaggtttctgtagctgctgtgcagcttgttgtattcgctttccaggttgtagtactccctgcgcttctgctcctcgtagctctcgtggttctgaagcttcatcctaagcgtccggatttgctcttctaatcctgcgatttcacggtcctgcagcctgatgttgcctttctctagcacctctgttgcttgtcctctctgccacattaattgaacatggatggatcggatggatgcaaattaaattaattgtgtgcaatcagaaaaattcatcaattaattctacctattatttttctgggtatagtatatgactgtaaacgtactgtaagtaaatatgagctagagatgaggaggacaagatcaggaagaagaaaggaagtaattataataaccatgttgttgtgagatcgatcggtagcaagttgatcagttgcactcacttggttccttcagaatactctccttctaccttagctttctagttcatttgttatggcctatcagagaccctgaacatcgcttaaatagacatcgcatgaagagtggcaggactaactaattaagtaatatatgcattatgttctccattgtaattaatttactgatgtgtggatggattcgtctcaacatgtagttttctaagatgctcatgttcaaaattaaacaacaaattttgtatgatcgatgcatgcatccacctcaaataccgttagtgaggagttgcgttgcgtgtacatgagcatatgcatgcgtctgtattgagtatcgaaaattggttttgccaaatcccatgcaattatgctgcatttgatttatacattaatttaaggaattatataaacagttttttaaaaaaaaaacacacaaagcacaaacgcaggcactcacaacccatacacactttcccctataaacgttccctatgaacacctaaaaaaattaggtcggcatatcttaagatcgacaaatttctttttttctactcactacctaagctcaggttatgcataccttttaagggcataatgtttaccaagtttgtgcccgtttgaactagatgaagaagctgatgacagttgatgaatgcatgatgtattgctttacaaggatgaattaaacactatataatatagggatagtctagatctcatgcatgcatacgactaaaatttaggcacttctagctcgtatcccccatataaactacttaagcctttctttattagataaagattgaacaaagaattattctaacttaaacacaaaataaatttacaattggtaaaaaatacaaaatacaataacaagactacacttaaaataaactaaaattgcatatacatagcagaatgattttagactaattagcagtatgtaattttaggtaattaaaaaatttcaaatttacttcttacgtttcaaaatataaggcttgttttgttttgttaagaaaggctttgaccaataattagcttattagatatactttttatgacataaaattatttttattcatattgaaaagtactacttatatatgatgattatgtttttgtattgcacagtaatgtcataatagataaattgttggttaaagttttatctatatcgatactaaaatacaccttatattttaaaatggatgtggagtgtaacctctaaatgaacagagttttggataaatcatagttttggaagtatattcactaataatcatatactaagatagccatgcatgcaggagtgctgatatcaccttgatgacggcccgaaattattccattaccccattagatctagatacaagagaatatatgcgccctggtttcattattaataaaccaaaacaattattaatcctacatggttgaatagcaaatgtagaattgtaattgggactccctagctactatacgacaacttagtattatcaattatagattttagaattaaataattaaatagatttaaaaaaaagaaagaattaaaaagtacggtcgtggattctatatataattttgacattaattattttttattttgataaaaaagtatgtaatataaatgtgccatgcgaagacagggattactgcgattatagtatcatagtatggttaattactcaagttgaaagaacatttacctaaaccattatgaagcagtacctatgggtcctaaaaaaggttttttcaactattgcttttacttgtgggcatataggcatatatgcaaagcgctatgttggctttacatgtaaacctgattattaagacctaatttaggagcttcaaaaggtttgttaagttaaactaagtatagattcagacaacagatttaggtcacattgatttagacaactttggaaactaactatataaatgatactttcattggttttcttatatagtaacttttaacttcataagggcacattgatcttttaagggcaaatatgatagtcaattaattgacgttgaccaataatagtgacaaaagagagctgagaactaactgaatagtggcaaaagaaagagttccaaattcttgatggtctttttgttggatatttgcttgcaaattctatatgttttttttctgagaaatataaaatttcaagttaagaattatacatttagagatctattgaaacgtatgggtattttgctagtaaataccttttggtttcaatgggctacactcgcatgccacacacatccataaagaacatcgatctggttaaagagatttgctaaacacgacagggatttgtgatatctgatgttgactgccattacatgcaggtgtgcgttgggccatttaatttggaagactcagaaaacagcatggtttttaaattatgtgatttatagtcctgtaaaaatcttgtttatatgtacgttacgtgttgcttaatattggatttctttggtattaatttgtcattcatctacagaaattggagaggcggcgaagttaaaggcggctgctagaattagacgagtgttagtagtggagggatcaagtgaatcagattcatgccacgtactgtgcatccatccagagaaaattgctacaagattaatctgctatgcccctaaattttgtgtcatccgttacatgcaccagagacttttttcttattggtagttgattgttatttttctttaaataactacatattgcccccatcccatacttatatgctagtgataaaaacacaactgtcaactgaaaaaagattcattaatttgtagaaaaaaggacatatgaaatcagctttgatgaaattcatacaacattttcataaaaagtgccacacaatttagtgcctgtagaaagtgcatctactttcttataggcatgcataaggaaatatctctacgaaaataccgcaaggcatatagacatttcataaaatgtctatttgtttctagagacaattcaccaaaagacatttagggcctctttgaatcgcaagattaagaaaacgtaagaataggaaaaaggtaggattttagggcccctttgaattggaggaaaaacataggctttttggaggattttaatcctatagaaaaatttcctatgatgccctttgaaacacaggattgaatcatatccaatcctttgaaattcctatggaatggacaaccctatagagattttggaggaaatttagcaagagctttaacctcttggtaacttttatttgagtctatctctctcatccaattcctgtgtttttcctgtggttcaatcaaacggtctaaggattcaccaaaagacatttagggcccctttgaatcgtagggttgaaaaaatagaggaatagaaaaacacaggattctgacaggtattgaagtgtaaaacagaggattgcaaaacacaggaatgatcgtttgattggaccgtaggaaaaacataggaattggatgagagagagatagactcaaagaaaattttccaagaggttggacctcttgctgagtttcctccaaaatccacatgcaatgtgtcattccataggaatttcataggatttagaaagtttcaatcctttaaatcaaagggccaaatagaaaattttcctataggatttgaatcctatgaaattcctacataaatattttgattcaaaggggccctaaaaatacaggagtccaaaggatgagaaatgtcacttaagttttcaaatatttaagatgatagcacttttctattgaattttctaacatccggtgtgcagaccatacaaaggctaacctgtttaagagagaaccgcacaagttgctgagatcacctagatggcgcatcgaaattattccgttatagcttggacctggaaaatgccccttgatttccttactagaagtcaattaaaacagtgcaaaaacccacttgtgttaccgtaaagtttatttagtcaagttgaaaagtcttctctagaccactaaaaatctctatatgtgcatgggttctaattacaaacgattgttctaaattcttttttacatgcgagcatatataccaaaggtggtatatatattttggcaagacatctaaaccaaattataaattaagacgaggtgatgtgcaggaatgcacagcacagcgcatagtagtctgcgcatgatcctaaatgtaacattcctattttacttaatttacttataatttaaaatcggagattgattagaattgatgaatcttatacatagttttcagaaagaaaatgaatttatgttacacaatatttactcttttatacaatagatttttttcgtatatacttatcattcttatatagaaatttatttggagcgatgccaattaattatatcatgtttttcttcaactttctcatgtcttcaaaatctacatgccaaaaatatcccaaatttccatttggctcctcgccacaaaattttctacccatatctcttttagtaaaaagttctgctccaaaaagctcctaggatacaccatgtcattgaatgaatattggctgtccgattgagaagacaacaaaaatagagagattcaatattcatcggctgtttccaggttattggtcttcctttctctcacacagtctctgtgcaggtttccttgatctgtcttcctatctcacacactctctgtgtgtcgatcgccttctatttttttctctccctgtcaagagcaaatgaacagagaaaggagaaaagacaaaccaagagagtgggaaaatgtggcaaaaataccatctcgctgctctcaatgcacatgtgaaccatacaaagctaacccagattaagagataagctaccgaaggtcgctgacatcacctggatgatgcaacaaaaattactttgttactactgatctgagaaagtgccccttgattttcttcctgagtgacaattaacacaattacctagttgaatggaaaatgcaaagacccacttgtgttaccatatgattataatagtcaagttggaaaatatccttttctaaaccactaaaaatacatgggtgaagggttgttctaaatatttctttttagatatgggcatatatgccataaaggcgatatatacaaaattatattaagaccctgcttaccaggttacatagcttctccgggaattaccttctccatgaagagagtgaaaattacaggtccaacaaaaagcatctgataaaggagaaatgtgatgggcagacgtgcgtctgcgcttatcatcctaaataaatgtaacattcctattttactcaagttataatttcaaattttggatttattagaattgatgaatcttaatacataattttcagaagcaaactaaaggggattaatttgaataaaaacttttataggggattgaaaagttaaactgatttttttttcatgaaactagagtataatatgtagtttttctgatatacccctaatccaggccatctcgctatttaaatttctggaagaaactatataaaattcacaagtatccataaaacataactaaaagatatatgcataaatatatatttgtccatagaatgtcgtcgtacctgcagctcaagaggtcgtgaggatggcagactaactacagccatacccttattgacctcttttatatacagggtgtgtgtttagttcacgataaaattgaaagtttggttaaaattggaacgatgtgacggaaaagttggaagtttacgtgtgtaggaaaatttcgatgtgatgaaaaaattaaaagtttgaagaaatagtttggaactaaactcggccacaatcaagccctgaagtaatttctcatttggctcctcaccacagaatttccaggtaatatacaagtgaaggacaaaattaatattcctatacatggattagcagagctgagatgctgggcatctgtataggcaatttggaatgcaagataattttggaccctttttatcttgcatataaattaagctttttgattcttcaaggcagagtagttctccataatccctcaaattatatatcaattactaaaataatgacttggcttggatgatagagggggtagatgaagccatgaagatcatgctggacagctactacagcagtgcaggctgcccgtatctatgtatgtatgtatgcagtgacagataacatatatatgtttttttttaataatggaatataacattccggcacagaagctacagcccatcattacaatctagcaatcaaaacaagtgtagtccaaaaataatagcaaccagcgtataaagataaaagtaaccagcgtataacaacaagtatatatatatgtactgaccacactttgcatttcaatattacatccagctgcaggaacaggagaggttgcatgacatcgatcgatcacatatcaatgttgcatgctctagatatatagctgccagtatacatgcagctttattcttcacacacatatacatacagtacactcgcaactctcataggcatgcatatacatcacacacaaccctgcatatactgtatagatacttatacatatattcaggtacgtacgtagggcattcgatggttgtgcagatcgatcatatcgatcgatcaattgtggcggtgatagtagggttgtccgacggtgaaaacagggaatctgacagtggggccgcaattcctgtgggctgcatccaggtctctgtatttcctctccagctctgcgaattctttctgaagattcgcgtgctgcttctgcttctcttccttgtacctggtcaggttctgaacctgcctctccagcgcctcgatcgtgtcgtttaactcttttattgtgtcgtttaatttactgattctgccgtttaagcccttgacttgatccttgtgcgcatcggcgttctctctctctagtacctttgttggcggatcgcccgtatatccccttcttgttgcccggtgctgcatgcatatatagatcatcataataatcatatgcatgtttgataagaatattaactccattacaaaatatgggaatctaaaatcgggtgagaccatatccagatatacgatgaatctaatgctatatttgagatggaaggagtatataagcactccatccgtcccaataaagcactttgcatatcttgtataaggattaagcgagaaagaactcgtagcctagtggttgaaatgctcgagtagtactgggtatgactatctatgtaagcgaatttcaggttaaaaaagatcacttgtagactcctcgtaaaaacgtgtattaagaatgggcccatcatctgaaagacagaggtcttaaaacatgggttaatgacagatcataaggactaatccgcatgtatgggccaaagttcgtggccatttttagccagtttggttgaagctttttcttattctttccttcatcggtcgagttatttcattacaaggattgggaatagacgtaacattaaaaagaaaattaattagtaatgattggtactttggtagggacaagcagctggtggagaaactaaacaaatgatgagatatataagaaaatagctaggtagacaagtaatataagaaaaaaaaataaatttaaacgtttaaagtaactatattttgggacgaagatcatagtagtatatgcgtatagcaagagaagatcagtaccattgtgaaaccagctagctagcaaattcgatcagttgcaaacttgatccttgagttattctaaccttggtcgcttgctaccgtctggagaccccggggcaatgcttaaatagacagtgccaacttgcagggctaattaattaatatacttcctctgaatatttaatgtttaggatcagatttagtgaaacttgtaaaactttaaccatcaatagcttcttactcacattactacaaaacatcaaattggtctcgacactataggtgccagaagtgctaaatctgacacatataggccttttcgcacatgtgggttgaaattgcaaaaaaaacgacatctttaaacaattataggtgccggttctaaataaaaaccaacacttattctataggtgctggtttttattaaaaaaccgaaacctttaatatgtcaaaaaacggcacctttaatccactagaatggataccctcatctcaatcgggcggtaagccccatctcaatcgggcatggcgtccatcacaggctagaagtcactgatgtgatgagctatctcaatcgggcaaacggtcgtcacagatgattctatctcaatcgggccctaagtaaagcccgtcaccgatagctttgacccagacgaccaatcaaactatagcccctcacagatgacctatctcaatcgggccacaactataacccgtcacagatgagtcatctgtgacgggcattaacttatgctagagttaatgcccgtcacatatgagtatattccaaaaataaataaattttattttttggctagccctcactcgtgtgcacccacgcggaagttcaaacttcccggtcggtcacccatcccaaaattactccagaccaagcacacttaatgtcaaagttctttagagattggcttccggaagatacgagtattctattaatcctattatgccctaggccaggatgttaaattggggttattaaatgatttcaaatggaaaagtcaccaaaaccaaagttgtagaactcatcgaggtgcaaaatttttattttggtcatttctccatctgactctatttaaacaatttgaaatttgaaattcaaagtttgaaaagttcaaaaagaattttagatcagtgaacgacttcaactgaaaaagtcatcaacaacaaagttgtataactcatcaaaatctataacttttattttggtcatttttctatataacattttttgaaccgtttgaatttgaatttgaaaatatgacaacttcaaacaacattttcaaatactaaatgatatcaactgaaaaagtcatcaacaacaaagttgaataactcatcaagatctaaaacttttattgtggtcatttcttcatacgacaaagtgatagtaacattgttcacaaaattgacatatctcttatctagttttataaactataacacatatatgtaaaatttatgaataatattactaacatttcgtcagatgaagaaataacaaaaataaaagttttagatcttgatgagttattcaactttgttgttgatgactttttcaattgaaatcatttagtatttgaaaatgttttttgaagttgtcatatttttaaattcaaattcaaattgttcaaaaaaatgttatattaaaaaatgaccaaactaaaagttgtaaatattgataagttatacaactttgttgttgacattttttccatttgaaatcatttactacccgtaaaattattttgctataatcaacttacaaatataaacatttcatatgaaaaatgaaaaaatagtcatcggtgacgggttttagttaatgcccgatagagattaagtatatagcccgtcactgatgagtcatctatgacgggcctagttgttatctcaaacgggcctcaagttggtgcacgtcacagatgatggtcatttgtgacgggccccaacttgaggcccgtttgagatatggaatgttatctcaaacgggcctaaagttgtggcccgtcacaaatgaacgtcatctgtgacgggctccaactttaggcccgtttgagataaca

SEQ ID NO: 7688 - DNA, 9503 bp, Oryza sativa
cattccgcaagttgctacttaggttgattactaatagatgacctctcatcacgtgaaggtggcgtggggaatggccatcccaacggacatttcagggacttaccactgcaggccgattccagcaggatactcgagggttaaagttgagctggtggaagccgtgtacagacctcgagttggactacccaggaggagacggtgagacgcatctacgagacacaagccacaccattatactatggcgcaagcggtacatcatcctccctgggcgacaagcggcgtctcgtgcaccatctcttctggctccgccgtctcctcctgcaccatctcctccggctcctccgccacctcctcctgcaccatctcctccggctcctccgcctcctcctgcaacaggctcctccgcctcctcctgcaccatctcctccggctcctccgccacctcctcctgcaccatctcctccgcctcctccgcctcctccaccgtgtccgcctacacctcccaagacaaggtctcgccaagctccacctcctgccagcacaagggcaacgaagaaggccaaagttgacaccaccaaaaacaaggagccaccgtacggttgcagtcaagaggagcttgacgcttatgtggcaggagaagtgaagaggcaactcaagtctcggagtcttgaaaagaagatacatattgacccgagcatgaagaatttcttcaagggaatgtccaccacaaacaaggaggccttaaagctatcagactatgaccgaacacttaggaaagcctattacaagaagtccaaaccagttcctcagcttggagaacaaccacaccaagtggtagagccgttggtgaccggcgaagactttggcataacggatttcatttcggacaccggtctaaccatcgctcagtaggttggaggcgcaccaatcccgaaggcggaagtggcatacaagtttgaactcagtaaaccgcttgtcaggcctgagcagctgcagtccctaccgacacaaatgtacaaattccatgcacggtacatggaaatgagcgccaatggtagagagatgttcggagcgaggatcagaaaccccgacttcttgcaaggagaagatgttctatggatccatttcaaggatgtcttcgatctgtaccatcgggacgccctcgacgtctctcttcttagcgcatggattttgtaagtatctttgagttcgatttgtttcattcaataattagctcctggcatatatgtaagcaataataatttcctttcattgttgtagaatggagattcaaagggcccgacagcgggggttttatgatactgggttcatcgtccctcggaaaatcaacaccgaaatgctcgacaagtacgagaaagacacagaggacaatctcgtccatctcctaacgcagcagcatttcaagacgttcatactattgccgtacaacacagagtgagtttttgttgtcgtttgaacaaatttcattcccatacatataacatgtatattctgatatttatctcatctcacgcatattctagattccactggtcctgttctttttcgacttggacgcatgcagagtcactgtgtacgactcaatgaataaaaaggagaaggtttttgacaaggtcttccaactgatagacaggtaatataatgccatctattccaaagtcgcgggactctgttgctattatgttgatctcgggtaatatttaattaatcatagcttgcaactgcacatgtagggcttgggatcggttccgtcaattggtccgcgggacttggaaagaaaaacttggacgaaggtttcattttctagtgagtacatgcatgatccaaaattatattgaattgaatctctagttacagttaatataaagagtatattaaatctctcatcgtttctcatgtagtgtgcaaagcaggacaagggaactaacttatgcggctactacgtatgcgagtatgcccactgcctatcaaaccaaatatacaccacacgagagctcgatgtacgtatacataaaccattcaaaatttcattgcgtatcgatttgttaagttgtttattaatttcatatattgatatgtcattatttttcgaatgatagcgtattcacatgagggaaaaactcccacacaaggattttatcatggctgttcaagaacaactgatggggttcatcaacgaagaagtccttaatcccgatgatgaattctactatgacggatcgataattcgtaacgtctgtccttcctcttctaacgtaacgcaagcgtcgaagtcgtagctatagctagcgagcaaatgaattgtactatacatgcatgtatatatatatatttatatatgtacgtatatttactttagtgtcaatatatattttggtaacatatatgtacacaaaatgttaagtgctttaaattataaatatgtgtgtaatatatgtatttatacatatatacataggcatatatatatatatatatgtatatatatacatgcataatatatatattacaatgcatatatatgtattgtaatatatatatatatatatatatatatatatatatatatatatatatatatatatatatatatataatcaaccatgtagcaaacagggccatgcaaataaaaaaaatggtacatagatctttagtccaccaaccgggactaaagatggatcagccggccacgtggctgaccgatctttagtcccggttatttcacccgggactaaagatcgctatctttagtcccggattcgtagtcccggttggacaagcgggactaaaggggggttacgaaccaggagtacaaacgatttctccactagtggtatctgcatattgatcagtgatttgagagagagatgagaagagtaataccattataatgtgagatcagtagtagttgagttgcacacagctcttgcgctaagatcccggtcttgaaataccttgggtactctcgttaacctttagttagtgttgttcacttgctaagatcccggccggccggacatcgcttaaatatacaatgcagaacgatttccagtgtccaattaattaatacgtgttatgttctccattacaatataatgttctgcttttttggacggattcgtcctcagccctttccaacaataatatctagttttataaaatgcatgcactctaacatataatcgttataacagaaaggtaatatacgtatcatacatacatatatacaagttttacatactcatggtcggcgcacagatgtcaaaaaaaatataaaaaagttctactgctactctcagtcaagaattgattgtattttacccgtaataagaaagaaaaaatgacaattctatgagtacaaattcattagaattttctattccccgctgctctttatgtgatgaattactacatctgtctacacatataaaggattccggggttcagatttaatccacaaatatatataagaaattctataatactagttccccccaactaatcacccctcatttaatttccacccaatataccccaaccatatatccttccatcccacatccttaatcctaatctctcaaaaattcctaggtccatatatgtatgtatatatatgtatatgtatgtatgtatgtatatatgtgtatatatgtatatatatgtatatatgtatatatatatacgtatatacatatacatgtatatatgtatatgtatatacatatacatgtatatatgtatatgtatatgtatataggaaaattatatactactactgggagtagctactccctccctgtccgccaccaattcaattcgtttgcctagataacgataatgactattaacgggtttattgaatcgaatacttttacccgtattttttttccctcagggtcaacaagattgtttctgttctgtagcagattcgaaaattgaatcaagaatcctgagtttgttgtagatagaattttgttcggagacagctaaccagagatatttcagggtggttttttcgctctttagtttgcttatccaaagcgagaaatcaggatgattatcccatcgagcagaacattatcgatctaaaatcgttctctgcgttttgagagttcttaacccatctcaactcagattagtagcctcgccggcggctgcgttgcagataacgttgaaagctctagcatggagaactccagttccaaggtttgttgccatattcatctgttattttgcagtgaatgcggcgccggccatggcgacgatgaacagcaccaacccgacattggtacggtatagcagtgtcaagctgcaggctgccggagtggagcgccccaatcttaccggagaggagcgccccaatgtgccgcgtgcacgccgagcgccccaacgccggcgccgtcaaagctcgcggtagccatggatggattttttttcctaatctttgagtctttttttgatcgtatctcttaatagtttgttttgtttatgtttttgcatttgcagcacctttgcagtcctgcagcaggtgcgaatgtttcaggtggtggtggctctagttctgttttcactagagcccttcatgctgctcaagcaagaaagatgcatcagcggaagcagctacctggttctgcagtatcaaattccaaaaaaacaagtggcatcaagggtaaaaaggtagtacaagaaaaaatttacaccaggtgcactcctgctattctctcagatctgttctcaagttttggtgatcagcaaaaagagctagtgaaacagatggggtttgatgggttgctttccatgaggctgactaaactgaacaagcaattcggagcatggattctgtgcaagctagacccatcatcaggtaatctgtttacgggatctagacatgaaatttgtttgacatgtgaggatgtcagcctacttttgggaatcccttgtggacggaaggagattttgcctgcaataaaaaacgaggtaaaagatgttaaggcttatatgtatgaaatcttcgagaaagattcctttgatggacttaccattgtaacaattcagaggatattggagaaaaaatttaacaggacgatgactgttcacgaacaaattgtattcaagactgcttttataatcttcgttgtaaccaaattcttggctcctcaatctgttaacaatcacatatctataaggtatatgaaggctttggttgatgtagaaaatattcacaagtacaactgggcggaatttgttttgcatgacatcaaagatgcagcagcagcattgcaacacaaaatacgccatcggaaaagcattggttacatcaatggctgcattatactacctcaggtgaaattatcctattattcgttcgaattatttgccttttactttctaatatactcgcaacatctttcacatgctataatttatactgctcagcttttttatttggacaatctggatttcgggacggacactcccgagcaggaaaacattccacggattggcatgtacaatgactccatgatagcggaattcattgagaaggatgtaattctcaagaaccggaatcctttccccgcgtatggaaagatgaaggtaaaatcaactctcctgccggtagtatattcttgttgaaatttctcttctgcagaaacttcagactattgacatttttattgggtttcagctgcgaaacaaacatgatgaaaaatacaatattggccatcatacgggtgcaatagaggtgcaatctcatgtagtttgtcaatctattcaatatgaaaaaaatccatttttctataagaattgttgatatatctgtacacaggctatccatgtggatcatacctacgatgccaggtctgacatcgagcccccaagctttaatctaggaataacacaagatatcgaagaagtaaacatggtggcatgtaccccaggtcatgacatatccaatgtggctgaagactctgacaaagaacaagaactcaactttttagcacgtaccccagatcagccaatctcaaagtcagtagatgcctctgacaaatccggagaaggtaatgcagtgcacaaaactccctcttcgcatagaggtaatgatacccacaagcctgtatcagtttttcattttcattcataaccaaccacatgcacataatatgactcactcttactgttttgactcataataggttaccaacaaacaaaacttagtagtttctctccgtactctatgttgaaagagacgagtggggcgtgaggagtacgcatgtacaaagctcccacctaaatccaagaggagaattattggcggtccttctgatatcctattcgatcggccaaagaggtcgattaaaccaagccatttggtgaaatcaccatttctgagcaagcaacactctttcgtcaggcatgaccagaaggcacttgatgatttatgcacatatgcaatttcaatcgctgatgcagaagctcttaagtaagccacctatctgaaacacttgatgatttatacacatatacaacttcaatagcttatgcagaagctctaatgtaagccacctacctgaaatgttcctttctttcaccactaattgtaaagatatcacatttaacaggaaaatctgggttcacatctcccaacctgtccctatgtcattaagcctacatgacatacaataggctattcggctggacactcaaatgcaagaagaaacattcaatgttgcagttcaagtattagtagcggatgcgatacagagatttggaggaactgattttgtaggctggagacatttcttaaatcaagattttgcagtaagtgcttccaattactctagatcgactatttcaatttttaaatatggtgtgttttaacataatatggcgctgtagatgtttgcaacagctggtgatgaccagtggaacccagaggaccatctcccctcattcaaagatgactccctgataccatatgtcgtacctagttgccacctggtttgataattaacagcatcttgaaaaattcagtacatcaagtgcaaatgttcaggccactaacttttgcaatgtcaatattaatttgcagatatttattccactacttcaaccactgcactattctctatacgcatttgatatggagaaaaaaaatatgcattcttgacccactgagagacgcctcgaaaagataagaggatacagcagaaagacacttaaaaacaaaatttcacatttcatctgctctgaaggagtgcatgaagcttgcatttccagattggggcgaggatataccaaactgggtttctaagttcccttcggtcatcccagctttaaacaacaagttccagttcatgctcccaatttgatccaaattaatttttccattctactcatttatggtcattacaataataacaattttggtaggctggattgtgcctttcacgtgctctactacatgcgaaactgggatggaactcgccttgtgaaccccccaaaatccgtgagttttctgtacacactaggttcaacttaagtttcattgaagtagcttcctttataataaataattttctatattaacaacaggatcaacgagatcttcgaaaggaatttctgtccaacttattgtcattcagaaacaacgaagctattctgccggacttcgtcgttcactgcctgaagttatctaacaagatctgagcagttatgcaagcatgccaaaataaacattacattcagttacatcattattatctaaaatttgttagttcccaataatatttgtcttgttcttattcaacatttttcaaggcttcatgttctctgctattctcttcccaaatagatgaatttgtcatttaccttccaactatcataaatttagattttcccaacatcaaatccatgatgttcacctatggcaaattaaatactagaaactaattacatcttctgttgccgtacattacgtgatcagctctcctccgaacttagagagcagatcatgccatgatccaaatcagtgcatgcccagcgaaaaagagacatgttctgctgggcgaacatgtctataacagtcatgttttgctcggcgaaaaaaagacatgctcccagagcagaacagtatgccaattgatttatgctaccacgaggatacatcccaccaaacaatagcagaaactactagccatgtactgctgccgagaatacatcccaccaaaacaacagcagaaactactagccatgttctgctaccgtgctaaaccccaactaaaaatacaccacaagcactcttcatgttctgctcccgatgcagagcatgatgaaaaacgtttttggctcccacgaagattcatccgacactacctccagcagaaacaattagctatgttctgctccaatacgatgcttccaaagactacaactacaccacaaactctgaggcacaacagaaaatagaaaaaaaaatacaaaactagtgttcgcaaatttcctacaatgtttgccaaatgtaaatattcaaaatatactacatgttctgctgacaaaatttaataataataaaagttccattttatgctaaacgaaatgctgacaccaaccctgcagaacattgaacagaataattacactcacttcttcctctcataactagatttctgaccacatgtaatcttatagtggccatgaccaccacattgcttgcagtacctaatctgcttcgttgactctttttttcctttggcgtgattcttcgactcgtccttggaggtactctcactagccttcttctttgctttgctagatgtctctcccttcgacatcagtctggtactcctcggtcgtccacgacttcttctaacctcaggagggagtatgtcttcttcgttgacatcagtcatgtccacatcaactgaatcctcaccagcagaaacatcctgtccaatgccgtcctcatcggctacacaaaagtcatcaggcattccatgctccgagtcagaactgtctacactatcatccaattgcacaccagtaggtttcttcccaattgttctatctccgcaatgaatttccttgttgtttacaacttgcgaagtacacatgacctgaagttctccaatcagctttgtcaacacttccaatgtcttctcatatgtttctgaactagtaccaccaagtctaaccatatcaagtgcagacttgtgcaggagggtgttccgataagttctcgatgatgccgcctccttatccttcaagtatgactcctccaagtgctttgggattgaatctctagcatcttttgtccacctcttcaggatatacttcttcggtatttccgtgaaaccatactataccataacctgcaaaaacactatgcattaacacacaaaaacacaacagcgttatgagaactgcttaatattcaaacttactctgataatatgggagcatataattcccagggctgcaggaat

SEQ ID NO: 7689 - DNA, 15982 bp, Oryza sativa
tttatgtgataagcaatctatgtggagattatatgcatatgatattcattttagaaacccttctgttgaacgtttagcatgccatttaccgaacatgaacgtggtctcttttagattagacacaaatttagcatctatggtttcaaatacatttttacaaaaaacaacattgactgagtggtttgtcgctaatgatctgttcccgcaaggccgtcacctaacatactgcaaatatcctacgatgtttacttgggaagatgatttaaaaagttggaaaataaggcagcacggctataagattggtaggatgtattacatccatccttctgcaggcgaagcatattttatgaggatgttgatcatgtacgtaaaaggcactagaagttatgaggatattagaacatatgacggcgttgtttatgatacgtttaaggaggcttgtgctgctagagggttgcttgttgatgatagagaatggtcgtatgcatttgatgaggctgatagttgggcatccagcggccagcttagatcgctttttgtgttgatgattgttcattgtggtattgctgatgagagtgcattttttgagaagcattggcatgcgatggctgatgatattctgtttaatctgcagcaagccttaaataactcttcgtactctgttcctgatgctcagcttaaaaatatggttttacaagaattgcatacattgtttgttcgcaacggtgtttctatgtcttcttttaatttgccaagcatcaattgtgatagctcctttcaatcagcaaatagattgattgacgatgaaatgtcttatgatatagataatttatgtgtgaatgctccattgctatatgaccagcttaacgttgatcaacgaaatgcatatgatcgtattgtgcaaagcgtcatgacgaaatcacctgctttttactttgtttctggctatggcggcactgggaaaacgtttctgtggaattgtattgttacctaccttagatctcaaaaaaaaattgttcttgctgttgcatcatcgggagttgctccattacttttgcccggcggtagaactgctcattcccggtttaaaattccaatagaggttgatgaatcaactatttgccatataaagcgaggtacaatgctagctgatcttattaagtccacttcacttattatatgggatgaagctctgatgactcaccgtcgatgttttgaggccttagataggacattgcgtgatatccttgctgaggatgatccttctgctgcatgattaccctttggtggtatagttgttgtgcttggtggggactttcgtcagattttacctgttgtggaagggggtattagatcaaaaacaattgatgctgcaatatcaaggtcccctctctggtcacatgtgtctattttagagctatcgataaatatgcgtttgcgttcaagctctctaagccctgaggtacaacatgaaatcgctgactttagtgattggattctttgtatcggcgatggtacaacagctgcaagtgctcgtgatactgacactgaaccaacatgggttgatatcccacacgatctcttagtcatggataatgatgataagattggagctattatatctgcagtctatactgattttgctgaacattatagtgatcctatatatctacaagatcgtgctattgtttcacctacaaatgatatatgtggcactattaattctcgtgtactagagcttgtccctgacgagatgaaagaatacctaaactttgattcccttgcaaaaacaaatgagaaatgtgatgatttagatgttttgtatccaatcgaatttttgaactcaattaaagttaacaattatcctgatcatcaattgtgcttaaaaaaaggtgtgcccataatgcttttgagaaatctagatcagagtgctggcctttgcaatggaacgagaatgattgttacaaatctaggtgaccgagtaatagaggcgcgtatcataactggttccaatattggtcagactgtttatatcccaagaataactctatctgcaaacaataagaaatggccttttacattacagcgccgtcagtttcctgttcgtgtgtgctatgctatgactataaataaaagtcaaggacagagtctatgttcagttggcatttacttgaaaagcccaatattttcccatggtcagctatacgttgctctttctcgtgtcacttcccgtgcaggcttgaaagtacttatcgaagatgacaacgggaattgcacctcccatactcgaaacatcgtttatcgcgaaatattcgctgctcttagatagttggtggttgctgtcgttttgtttattttattcctacggtgtacagatatactcgaaacatcgtttatcgcgaaatattcgctactcttagatagttggtggttgctgtcgttttgtttattttattcctacggtgtacagatatacttgttttgtttatatctaaaagtttgctatgttgttctatggatcatgtatattacctggttatgctgcgcttttgtttgctgtcttactatactctttgccataggtgatgcaccgcatatttatctgcttattttatgctttttttgcccttttgcatgaccttgttttttgctttcctatagatggctttcgatttgctgtgtgacatatccctagcaagcagaggctggaagatccgtgcaaggatagcaagaatgtgggactacactggtacagctaacgatgtgcctcctatgcatgttgatctggtgcttgttgatgagaaggtatatctcattagtccgaatgcagggcacctttatattccctgtccaatttgatttgcttacgatttaaatgcttatgtagggaaatgcaatgtatgctgaaattccaggcgttgaggctgataagttcagaccacttcttcaggaatcgaaagtctacacttttagcaagttccttgttttgcctagcaaacctgcatacaagcccttccctaacaagtatatgatcaagcttactccatggacaaacgtggaacaggtcaatgaagttcctgctgatttcccatcccatgtgtttaatttggttcaattctcagatctaagccagcgcgttgggatgcaagagtacttcactggtttgttctttcctttaccattactttccattatttatgctatctatagcatttatcaatttacaaaccactgttcttaattctttttagatgtgatcggtatgatcattggggtatcaaagctagcctatgtccgaatggcgtctaaaacgtcagacacacctaagagggtcattgctctaagggatcttgcgtacgtagcctccatgatttatttgttgttccagtctttaccagcttgttgtttatgaccctgacctctaatgcatggccaactattttgataaccgttcattcttccgaataggaactgtgaggttaaacttgtcctatggggagagcatgctctcgactttgatgctgatgctgttcatagtgttggccaagataatgttgtcgttggtatctttgttggtactcttatgaaagcatataatagtaagcttttctccttctctgcatgtttagttctctctttattttctggtgccggtgttgtatcttcaatgtacatttgtttttttttgttgtctccacaatcatttcacctatgtattatgtacatgaagaaactcttagtggaggatcagcctgcaaatggtatttaaatgaggacataccagagataaaccagttctttgataggttagttaaagcccctcacaacagagttaataattttttagagttctaccccctttctctaacatgtcgttttccatgccttgattagcctgggtgatagtgctccaaagatccagtggatatcagccggagcaaagtcctttggttcgtcacaacgcccagcacagttggagcataaatctgttgctgaccttaaaaagattgatccatgggaagctgcggtaatcactgtaaaaagcatattatatgctttcgcatatgtatttttcatttagttcatctacaaggttattgctaaacacttcctatgcagggtgctggcttctcatctactgtgaccatagctaagttgagcccatctcagtcatggtggttttcatcctgttcccgttgtcatagagccgcaactgcatatggatctagctataaatgctacagcggttgctcatcagttactgccattccaaagtaatgttctacagcatacatgttcagctccttttttatatgtctgcttggcctctatgacagaaatttcatttttatatgttaggtaccgtctttgcctgataggaaccgatggaactgattcagcagagtttgtgctgtttggacgtgttgcgcagcaagttgttggccgtcctgttatgaatcttatcaaatttcagggcagatcagacaatattcctaaagaaattgctgctgttgtttcatagaaatttacctttgctgtctctgtcactgagcggagccttatgcataggaatatatcttttcaagttaatggaattgagactttctttggaagacagggttctattccgcagcctagggaacagggtccatctgcaggcccttctactcctttggctcttgttgcttctggtatgaataaggatgacgcctctcaatctcatgagttaaccccggtcaattcatctacttcgactgctgatccagtcgatgaacttcctggtgacagcaagaagcggaaatccattgtccgtcatgtacgcccttccattcatatcccatacattacctgttgctttttttatggcccttctttttatatgtctgattgctattccagcctctagcagcacagaaaaaattgacctttgaaacagctccatccagcaaagaaaacaccagcccggttgaccctcctgctaggtacaagtgtttttccacacttcttgttcttcttatatgttgaaactttctctatgttacatctgctttctaatttttatggccaacagtaaatgtggtttgcctctgctacatagcagagcacggtcagtccctccacttcaatcagatataagcatccaacccattctatttagtgaggaaccatgcattatgaacatattaatgtaggttccttgttgatctatattcctaatcatcctacctaggcctaatagacctaaataagtcattgctatttctcttgcttccatatgccattccgtacctctggtctactctgtactttgttccaccgtataaattgcctgtatgctaaatagaaccactttacattactatgacatggcctgctagctaatcgaaagaaacatgctcatagacaactacagaacattatttactacaggcagattagttgcttacttgttatcttttatatgggatgtaatgcgctccaaaatgatctgcatatggcctaccatcttttgctaccactgaccattgcacgcagcctaccagttatatcttttgctatgcataggcatatcatgtaatattactgatcatgatggctatctgctatatttctcagttcttctcgcactgatgaccaagctgctgataagcaacatgctgtgcctcatgaggttgatgtttctcagattgcagctgcctctgctgaaccaaatactcaggttaagcataaatacaccactttccagctaattcagtggtcgaatttttttagtgacactggcaacctaattattcccgttctataggtcaaagatatcctgccaactgaagccaaaaagaaaaggtataaaactacatattccagctgagaacgaataagaaaatccctatttttgtactagcggtggaagcatgtcacattcattgttaaatagactgcaccatttcgctttcgctgctctctcatttttggttcttctagattaaccaggtgttcctctctgctttagtgttgatccaggctctacaggcacacgcaagactaagcctcctgtaccgaaagggaactaaattgctcaccttagcttttgtgctgatgtgagtatcttgttctgttatatatctatgggcacggcattagtttcacctagattgctgatcactttaaattattttttaggggaataataccctacatcagcgatcccaccctatgtctacatatttccttaatcttactgttggcgatgctgcttgacatggcacatcgtatcagacaatcttttgtttacatgattgctggcaccactgtgtccatgcatgtgcatgtttggtcctctacctgctgctctttcgccctttagtgtcggtgtgctttccatataaccgtagcagagacttcctatgaaacgctgccatacgactgcacatcaccccatcttttgcttgtatgttataaccatgactgtcaatgtccatatggtgctctgtcagtcctatgaactcgttcagcaaacccccttctgttatggatcatattaatgcactagcgttctatctgctgttgttctgttcatattacatgccttgcagctgctttggatatatctagcacttgtgatacactatcgtcattaaaaacttatgtttcatgtgctacgtgcctgtgcaggaatttgaaatttgtagcatttccatcctacccagctaatgtgataagtaggattttgtgccatcctttctgtcctaaagaaagggtgggcaaaatttgcagctaaaaatagcatacgcgttggatcgaactgcattttccacttctacagggcaagccagatgcaaatgacatgcaaatgaccatcgatgttctgtagaccacacgtgaatagtcaatgtattcaggaccacttaccagctctaccgccactgctatgttaattagtgttgcaccttaagattattatcataggtactgcagcaccttacaaatatcagacatatgtgtgttagcgctgcaatctatttatctattgccgtctgctttcattacttttcccccaccaacactttttaaccgttcttccctggctatcagcttattgggcggcacacgtgcgtacaggcggtgcgccaagggcgcgccccaacctctagttaaaggtaacagagggctccagagaatcagattcatgtaagattgtcactagctagcatccatggagaaaattctctacgtgctcttgagaatttgcccgatccttatatgtccatgaatttttatctaatgtattatatgcacctgagttctccttttgattatgttagttgaccgttaattttttcaaaggactatattgcccccgtcatacttaatcagttaattgtctgctagcctagtgataaaaaagacaactctcaacaggagtaagattcaattgtaaaaatgaagggatagaattaattgaccacaaatttaataatgaaattaaaattttaaataaatttcaaatgaactttgatgaaatccgtacagcattttgaccaaaatttaaacccaagtaataaataatttttgttctgaatttctagcttaaattctcgtatggatttagtaaaaataataatttattcaaattaagttttgtattttaaatgttgcatatttctgttcgatttgatttgattataaattataatttttcacatagatattaatgagtcatgtagcatgtgagtatgagaaggggtgatatagttatttcaaaaaaatctaatggtcaactcaaggtttaactaatggatcgggaaaaactcaaaggagataaggcaaattttagggtgtcgaaacatgaattcggcaataataaaagggggtagcgcacgagacctaaaagtggatggatgcggagacaaaggatttagacaggttcaggccctctcaatgagaggtaataccctactcctgtttggggatttgaatccgccgagtgtgtattgatctgacgatcaggttgtctcatgcccctagagggggctccctgccctccttatataggttggggggcagggttacaagatagaaaccttaaccaatacggtatcggttttctaaatctactttacaatcttatcaaactaggactttaggctgttccataatatacagggaaacgtaatacccaagtcatgatctgttacatattttatatatataagttatcccctataactagtcggataaccatgccgtgtgggtatggggtacccataatctccacagtagcccctgagaccttcacagtcggaaagataatcttctctcgaactagattactccaaagccgagtgcttcaatcatcttcgccatgatctcccgagtactttttccaaatcagaagactgtggagggctgaaaaaataaagtcaggtgcatcgactagatgcaccgagtggtttcgataattgtagtcaaccaagcgacttaatatgtagcatatgtggtatgaatccctgaataatatgatccaagtgatataccgactgctttgtaaaatatgatgagtgtaacctaaagttggctacatcattgaaaattcacatagcaaaatagctataaagaagcttgtatgttgtgaataaagaaatttccatagtattgggcatacgccatgcgcacactgctttaacagatgtgcttaagtccctagaagacacatggttccaccacacctggaaatatatggcatatgaggtataaaatctgagtaaataaactcataaaggatttaccaaccgcctggaaaatgaccacaatatataatcagcctaagccataatattggtcaataaaaatgcacacttacgtggcaaaaagcaatgatattgtatccaatcaattgcttaaaaacccaaacaacaccatgactatataaaaaagtcagcggggcagctatataaagctttactgtttgacaccttttaagatgcattataccaactcctaaaaagttgagtaactgcgatataaaaggattttaaggtattgggcaattgatcacgcgcactttggcctaagcaaaaagtgcctaagtccctaaaagaacgtgacaggccacacctgaaaatatgggctgcagatatattaggcctaggccaaaaaatatgccttcgacaccctttaaaggatgacgcatgtaacatgctcccgagtaataaatcttttcgggtgatatagaccaagtgtagctcatatgaatagcttctgatctgagtgattatcctttatgggatactccaaaatagatataacaattgaattccgactggcacaagtattcagttgataacccttacggggaataataaatagtccagtctttgagcatagaaaatagacccatgatcatgaattcatgttgcatgtatccggagcaagtccaaattgaagatataatacttgtatttgagctagtaagcccctgagcacgtagtcacaattgttcattgatggtagctgacgcagttggcatagagacaagacgaccaatatagagataatattgcccaacagaggtggcaaaaatattggtggtagtgaagatagtgataccaatcaaaagtgatgaagttgcacagccgtggaggcgaagaaaccagtcagctgttgtagatgcttcacttggaggagagttgatgttgttgcccaactcgtctaaccgaaatatttgaagttgttgaagtagaatgtctgctccgaagcaaagatgaagataatgactcctggagttgactcgttggctgattaattgatttcttcagcttgacataaaatttgtcaaattttgagccttgtatttgtgtagcccccgactctttgatcagttgggaaacaactgaacatagagtcgagaactgtagcttcttgtcatcgaatagtcataacttgagtgaagatatgtgttgaggatgtccgagtagaaatattgaagattggaacaccacttgttgtaataaaataatacggcatcatatttagtgacatatgccgaggtgtcgaaactcttgtagtcgtcgtggttggtgaagtagcaaagcttgcgaagtagaagcaataaagtttgccggtgccgaagataataaagatgaagtcgctccaccatggtgacaaagttgcatagctgtaatgaagtgaacacgagtcggcggtaacagaagcaaaccggtggtgaagacgcgcagttgtgaagataaaagcaccagtcggcggcggcataaccagtcggcgacggaagacgatgatgtccatcagtagtggtagctattagcggtgacggtgatgtagccagccgtgaagaagatagcatcagttggcgtcataacaggccagccgtgcaggcggtgacaccagtcggcggcggacgaggcggccggtcggtgaagacgtagacgcccaacaacggcggcataataggccagccgtgcaggcggaaacaccagtcggcggcggacgaggcggccggtcggtgaagacgtagacgcccaacaacggcggcataataggccaacgtgcaggcggaaacaccagtcggcagcgaacgaggcggccggtcggtgaaaacgtagacgtccaacaacggcggcataataggccagccgtgtaagcggaaacaccggtcggtggcggatgaggtggccgatcggtgaagatgtaggcgcccaacaatggcggcataataggccagccgtgcaggcgaggacaccagttggcggcgacgaaggcaagccggttggtgaagacgtagacgcccaacaacggcggcataataggccagccgtgcaggcgaggacaccagtcggcggcgacggaggcaggccggtcggtgaagacgtaggcgcccaacaatggcggcataataggccagccgtgcaggcgaggacaccagttggcggcgacgaaggcaagccggtcggtgaagacgtagacgcccaacaacggcggcataataggccagccgtgcaggcgaggacaccagtcggcggcgacggaggcaggccggtcggtgaagacgtaggcgcccaacaatggcggcataataggccagccgtgcaggcgaggacaccagtcggcggcgacgaaggcgagccggtggtgaagacgtagacacccaacaacggcggcataataggccagccgtgcaggcgaggacaccagtcggcggcgacgaaggcgagccggtggtgatgttctgattgatccattcctaaagcgtaggagataagcttaaagccatgaatcccttttatgcatatctggatctggatcctacagaacaaacagataggatgagtagtacctgatgtaaatataatactcgagaaaaattcaagcattttaaaatgtttataaatatgtatttctcctcttgtcaattgtgatttccccgagcagatgactccttacgtttaaacactctgcccgactagtcatagtccccaagcatcgggagtcggcctaggcacttcccaaacatgcatatgagtgacatgagttcgtcattaatggaacaaagtttcacggatcagaatttactactcgggtacttttgccattattaagagcagaaaataaatttatctcatctctatgcttttgatttattccgaataatacttagcaccttgcgttactcggtccatccaacgagcccccgggtgctaggaatcagcccaaaggcaaccatccattggcaaaccaaacggaaagcataggaagatagaactccataactcgataggtacttttgtactcagattatgtcgcaagtaatcaagataaatattataaaaaatatgatataacatctgtagcccccgactcactactcaatggaagaccaattggtgtagtgaggcagaggaaaaggaaaaatatcatataaagaataaaataaatgatgacttagctttgtaatattccccttggtgatggcagaagtggccaatgtgggaacaaagtcgtccatcaataacaatgaagacaccagtcggcggcgacgaaggcggtcgacggtgaaagtgaagatgcccactaatggcggcacaataggccaaccgtgtaagcggaaacaccagtcgacggcaatgaaggtgagccaacggtgaagatgtagacatccaacaacggcggcataataggccagccgtgcaggcggaaacaccagtcggcgaaggccagccggtcggtgaagacgtggacgcccatgaacggtggtgtgaccaaccgaccgtataggcggggacgccagtcggcggcgacggaggcaggccggcggtgtagatgacgatgcccatcaacggtggtgtgaccaaccgaccgtataggcgaggacatcagtcggcggcgacggaggcaggccggcggtgtagatgacgatgcccatcaacggtggtgtgaccaaccgaccgtataggcgaggacaccagtcggcggcgacggaggcaggccggtggtgaagtcgtagacgcccaacaacggcggcataataggccagccgtgcaggcggaaacaccagtcggcgaaggccagccggtcggtgaagacatggacgcctatgaacgggggtgtgaccaaccgtatataggcgaggacaccggtcggcggcgacggaggcaggctgccggtgaagtcgtagtcgcccaacagcggcggcataataggccaaccgtgcaggcaaggacaccagtcagcagcggacgaggcggccggtcggtgaagacgtagacgcctaacaacggcggcataataggccagccgtgcaggcgaggacaccagtcggcggcgacaaaggcgagccggtggtgaagacgtagacacccaacaacggcggcataataggccagccgtgcaggcgaggacaccagtcggcggcgacggaggcaggccggtcggtgaagacgtaggcgcccaacaatagcggcataataggccagccgtgcaggcgaggacaccagttggcggcgacgaaggcaagccggtcggtgaagacgtagacgcccaacaacggtggcttgatatgccagccgtgtagacggagacaccagtcggcggcggcgaaggcaaaccgggcggtgacggtggctccagcagtacatgtaaagagaaaagcaatctctaattagcatcaagaaaattaatcttgtgtacgtaagtctgcatatatgaagcatgcatatattttttgattggccgattgatctcctgtagcatgaacagtacacacatccacacatgcacgtcaccagacagattgcaggctgccatccgtgcgtacagatcacggtccgagtccggatcaaatccaacttggaggctttacgtgatgggaatcagactcaggtgaccatggcgcatgcaaaataaggaatcacagatcaaactgagattagaaaattaatctaatctaatctagttagtacacactagaagattaattagaagtatatgcatgcatgattaggtagatcgtgcatgtatgttaatctgctaaatcaactcatgcatgcgtgaaatttctccgagcaagctataggcggctgctcccatgtgcccgtggtggcgtggtggccgcaacgcatccgtcggcgctgctcctggcgatcgccgtcaacagctccgttttaacctcagccgaccagcccatagaaagcaaggaaaacaccagaagagcaaatcacaattagaaattaatctaataacagttagatcaaaacaccgaacccgactgaagatttgagccatcgagattaatctcgccgtttcttctgtagttgattccatcacacttttcgatgggtaattcgacgcagcccctacctggcgcgccaactgtcgaaacatgaattcggcaataataaaagggggtagcgcacgagacctaaaagtggatggatgcggagacaaaggatttagacaggttcaggccctctcaatgagaggtaataccctactcctgtttggggatttgaatccgccgagtgtgtattgatctgacgatcaggttgtctcatgcccctagagggggctccctgccctccttatataggttggggggcagggttacaagatagaaaccttaaccaatacggtatcggtttcctaaatctactttacaatcttatcaaaccaggactttaggctgttccataatatacagggaaacgtaatacccaagtcatgatctgttacatattttatatatataagttatcccctataactagtcggataaccatgccgtgtgggtatggggtacccataatctccacatagggcatgaatgagattgagaaaaattgtcaaggggtacacactagtttggataggaagatagggaaaaaaaggagatgaagatcgaggacgtttttcccaagatggaccgtgtgactgatatatcgaaatacaagcagtacacggtcgcaaggtctccaccacggagatcaaggatgccttggccgttccacaccaaatagtgatgatatgctcatgcatgtaacatcgtggagtcccaatctaaatcaggtttaacaatttgggggtgtgtgtctggggaggggggagcggtaaaattagaaattgtagattttttttccaaaatttggatcaaattttttgatgaaatttgagccaatttaaatacatttccacaaaaatgaaactttctacaacgatatctatatagtcccttccccggcgcccgcctccgcccctggagagcacggagacattggtgtaacttcgtgtgatgctatgcctgttttttttttattctcgatgcgaaactatgtcttctctctcttttcgccgatccgaaaatattaaaataataaagacggtgtccagtgacaaattatgacatttacagagtgtcttcttctaaagtttaacttggtgtcttacatgtaaaactgtaaagtgacaatatcatatagcaaatttaccaattaactgcgcatataaaattaattattttatatccactgattatactgaccagccaattacatattgatctctattacacgcatggagacgaaggagagctagcatgacccttattgcatatatatctcgcatgcattcaggttacatacgtttagacgtactactacgatatagcttgatcagtatacagctttattctcggcacacacatatatagtatactcccatgcactaatagtacgtaggtacatgcaagggtatatacaatttaatccattttatcaacgacagttgctgtgctttgctttgagcttcttatatatggtttccagttctgcatactctttgtgcttagcctgcctgtaattctccagtgcttgtatcttcatctggagggctgcattttgattcttcaaggcagcgatttcagcctcgtacgatttgttcttgcttattgctagctgaccacatgcttcatcctgcatacatgcataataatgcattggtatttatatatatagattcaatcaaaattaaagtacatatattaattctacatttgtgtagtatatgtatggtagctagttctacatatatatgttacgactgttatatactgagagagagagagagagagagagagtgcatagagaggaggggaagaagaagggtatagtatgtaccattatattgagctagatatatcgtagctagttctgtttgcagaactacaacacttgttcagtggctaacttagcatgtttctcgcttcctacgtacgcttaaatagacaaagcagcatggaggcttgcagttagttttcgtttcactactataaatccccaggttccctagggttaaaattcgttaccttgtagtgaatttgtccatgttgtcaacttcttcttcctcatttttcatacgtacgttttccgaatgttatgttttattgaaaatttctataggaaagtagctttaaagaatc

SEQ ID NO: 7690 - DNA, 18530 bp, Oryza sativa
cgcgtggcggccgcttgagaactagtggcccccccataacatgttcagcagaaagtaccatacaccgatatatcatacggaaatcattaaaaaaaacatacattggatgtatcgtgctcctcaccgtcttccgcttcaatcctatcattgtagaaattctcatacctctttgcaaatccatgtagcgaagaggatggtttttcatacttcttcagaacatgattcatgctctcacttctttgggtggttgacatcctagcaaaaaagaattccctgaagtaagctggagcccattttttcttcatgtcccacatcctgcgcaaatacacgctagactcgagattgtactgctccattcaatctgaccatgccttctcaaactctgcctctgtttggggttcatttaacacccggtggaactcctgtgtgaaactgcttcttttactgtaaatgttccccaagttctccttagcactcttcagaatatgccatttgcaaactctatgagtagtttcaggccaaaccgctttgatcgccacctccatttgatgacagttatctaaaaaataagttcacaaccattcgagattaaaaacagaagacatatcattaaacacaccactgatccatcccaaaaaacatatacctgttaaaattgttgcaggcctcttcccatgcattgcatcagtaaatgtttggaaaagccacttgaatgcttcgattgttcgattgtctcctccctcaacaaagcgcaaccaaaaattgctgtttgaaaatggttatttacaccgacaaaaatcccaaatggcatgttgtacctattagtctgatatgtagtatcaaaagtgattgcatccccaaaatgttcaaaacttaatctggacagtgaatgacaccaaaatatatttttaatccttgaagcaccatcaatctgtatggtgtaaaagaaattcttactacggcattgcatttccctaaaaaaattcagtgtcttctgcacatgatagctacactcatcccttctgatggcatacgccattcttgtcacagccctccttgtaaagggggttaaggacggcccgccgagcatacctgaaagtaatccatacatagctgtaggtgtcatcccattatctaccatttcctttatgttcctctttgtcccttcatcaatgaaattatgagacctgaagtgcttagtatgctgcaggtcccgtttcatttcatggttatgctcactaatgaatgcagaaactctccacttttgactttcagaagaacgatttaacctgaccatagccttgcagcctatcctggtcggcggaccagtgacagaattatctctaccctgcataaattacaggaacaccttactacgtaaaacctatcgaatgatgatcctacgcatcacactgtagaaacttgccaatcctacgagaatacgaaaccatggttttcaaaaaaaaaaagaacacactaaagatttttacctcacgaatgcagcagaactcttgcatggacttcacgccttcatctttgtatctgttcttggatctccttataccaaaaccagtgaacctagcgtacagattgtagaacgcatagccattagagtcctcattgaaggtctgcccaatttccggcaacagaatggctgggtcagagagtgaaataggcagcagatcactatcttcctccccctcaaccacgatcctaggatcaaaaaacgagaaatcaggaaacaatgcagaaaggggaattgtacactacaatcacactgacataaaaaaatacctttccaacggaactacgtccatgggttgtccactatgatcctcgccacctttctccggccagccttcttcctccatacctatctccgtgaatattgtttctgtccagcacggactctggtagctaccccttttggcaaacagaatttgctctagggtgtccttttttttcagctggttggatatatactgacaaataattacggtttattttccaccagctgctcaacaacctccccgaaaatcaaggctcctacgtgcgaagcatgttattggactctggaaagtcagccactagcaacattaacgaattctgatgaaaccataccgccacaaaaatagcatctataacaaatattccgaatacgcaacgctacactcacagaaaccaattcgaaatctctgctccattcttgtacaatattctgctcgaagaacttcatcttggtgaaggattgcattcacgatgacaacagggagtttgcagtacacacaacttaaatagataaatgaaaggataacatctcaattttatttcacttcccaaatagcagaagatacagatttctcaactcagatactactcgcttttttctcatagaatataccatacaaaactagagacagttcgtacgactaatctacggccgtgcagaaagcaagcccttattacaattttcctgatcatcacactattggctacatattttccttggacacatgttcgcaactattactgttgccccgggttgtttcgttgcttctgaaattcacgtcgcaagccacgcgaatatcacggagtgagcaccaagcacatctcttcctaggattcctcatggaaagaggatgacatccatccaaatgaatgacatatttctggagggagtggttcatcacttcactccgggcagcagtatccatgcaacgcacaaaaccattcctgatgaccaaataacgcaataaccagtcagagccaaacaaacaaacaagagaaaaattttcaacagaacataacctaaaactaaacttctatgtgtacctatctgcggcaggcttctgctgcttgtcaccattagctgtaatggttccattttcttccttcgccagattgtgctgcttgctactactcactggcgacgacgcgcctacggccaccaccgacttctgctgctcgacatcacgcgccgacgagcctccgcctacttgcgccgcggaaggcgacgcaacagacctcgccgacgacattctgccctttccaccggaggggttctgctccaccaaaaacctgcagaacaaaatcttcttcctcacaaatccgaaatataattctgctcctcattttctgtcctacatcaccgtcaacttaaatagagtatcaacagcaacctccacactaactactctcctggtcgcacggccatgcatgcgtgcgggtcaacaatccatgcatgcagaacattcaaaatgactcgccatgcagaacaccacgcggtgatacgaattttcaaagaaaaaaagaatattcaagtttctgcatcggtggatcagtggatcttttctcaccaaccgttagtgagttaaagcccgaaaccctgatatgagttgggcaggtgtccgatggttacaataggagtacctactacagggagtagtatataggcttcctatgtatatatatatatatatatatatatatatatatatatatatatatatatatgtatgtatgtatatatatgtatgtatgtatgtatatgtatgtatgtatagatataaatatgtatgtatatatatatatatgtatatataaatatatatatgtatatatatatgtatatatatatatatgtatatatatatgtatatatatatatatatatatatatatatatatatatatgtatatataaatatatatatgtatatatatatatatctatgtatatatgtatatgtatatgtatatgtatatgtatatgtatatgtatatgtatatgtatatgtatatgtatatgtatatatgtatatatatatatgtatatatgtatatatatatatgtgtatatgtatgtcggagaatgaactcctccaccagggaaccgtgaggcccccctttgtgtgttcggccgggggcagcgggtgagattcgagggcttggtgagcggagctgtgtgatcttgagggggttagccccccccccccaagacgatgagacaaaagaggtttatacaggttcgggctgctgagaagcgtaataccctactcctgtgcatgattgattgaatgtagaacacaagtgcttggggttgcgagacccaagcgccagttcgccccgaagtcccccctccaccactaggcctggacctccttttatacctcaaggggttaccacatgggcccaacaacctaacctaactccggtggagaagtattataatctttgcattaaatgcatgtcttgtctcttgacttgggaagccaagcacacgtcgtcttgatgatggggcctgtcaaatcttgccgcctgacatggggggtgcccctgtcagtcaccatttaatgggtgaagacttctaggctcctattacaccgagaaacgggagccttgcttttaccagagcgggaggactgactctggctgggataagaggatgagaacctctcaccatcactatttgatgggacatgtcaggctgcacgccgcctgacacacgagcagcgcacaggcgcactagccagtcccattggtcattcgaccggtcacagaccggttgagtgcactgcacgccacattaaatgcagcgtggcgcgactactcgggatgccataaatgcgggtaggtgggcacttggaggcggacacctaacctaccgtacgtggtgacctagagaaggggtcgggggagcccgacccctagtcacgagaaggggccgccgccgcccgacctcgggcccgattccccctcgagggggagccacgtggcgcctggggcagccttctccctctagtctcggccagggagtggccgccgccctacctcgggcccgacccctctcgggggagggccacgtggcattggagggcagcctcctacatctagtctctgggaaggagtggccgccgtcctacctcgggcctgactcccctcggcggaggaccacgtggcatcggggggcagcctccaccgactagtctttggggaaggaggggccaccaccccacctcgggcctaactcccctcgggggaggggcacgtggcatcggggggcagcctcctccctctaaacatgatagccccgggcccatatcaccgacagtagcccccggcgttagccctgaccaaaaccttccccaggtggtcagggtgacgccactttcctagtctgatgataggtgggcccgatctcttattctttctttgctggtactaggacccatgcgcctttttcgccccaacctaagggcgactcgctagcccataccttaggctgtgaaattattttatgtatatattcagcaaacgttgttagattctctcgggcccgtgaccttacgccgcgtacctcacttgcccctgccatttgttaacctttgttcatgttctacttcatctattcaaacaattattttcgcgagtgtgaggactgaactttccatagccagcaatcttcacccgtgatcaagctaagctgggcgccatagccagccggcggggccaaagccagccgctgtggaagagctagcataggagggcccgggtgtcgacggtacccagagcttgacgcaaggctaggatagagctaggaatcgtagcccccgtactttaagcaaagaatcgtttgaatggatgaagcgaatacaaactttttgttaccaagggaggcaagccggtgcgcgacacataggtaccgcggagaccgcgaggaagagataggcgagagataaatataagcaataataattttatgcaaacgattatcttcgcgcgagtgtgaggactgaactttctatagccagcaattttcgcctgcgatcaagcgaagctgagcgttgtaaccagccgatggggccaaagccagccgctacggaagagctagcacagggggccccgggcgtcgacggtacccagagctcgacacagggctaggatagagctaggaatcgtagcatccacacttacagcaaagaattgcttgtatgaatgaagcaaacacaaacctttagctcgaagagggccccccaccatgggttccgaaccatcttgggaagcctgtgaccacttagcaaacgaggttaggttcccacgagcctgtgtccccacactacacattctgtttgctctttcctttcggtggcctccttccaatctcttttccttctacatgcacgattactttcgcatgagtgtgagagccgaaaactctagagccagcaatccccgtccacagttgagccaggccgggtaccgtagccagccggcgggaccaaagccagccgctacggaagagccaacacactgggtcccgggcgtcgacggcacccggggctcaacttaaggctaggataaggctagaaaacttagcccccacacttagtgaagaatcgttcatgtagatgggggagaggttgggctcttaccaccgagggagcaaacaaatgcgcaacacgcgggcgtcgcagggccatgagaatagaatggggggaaagaaatataagatttcaagctaatgaattgaaaaattgaaaatacttgaagcttgaaaggacgatcagttgagccgggccgggcatcgtagccagccgacgggaccaaagtcagccgctacagaagagctagcacagggggtcccgggcttcgacggcacccggagctcaaaactgcaagagtcctcccaggagtgaaccgaggcagcagcaggttcatgggccaaccccgcgcttggcccctaagggccatgggaatgacgttcgccatgacccggtcgccaccacccgccacctctatgatcgccgtgcagatctggagggactcggaggggtcggcgccatcgtcgtacttctcggtgaggcagggctggagctttgggggccctcggacattctgaagactcgccacaaagaccaggtagccaagattacctggtggggatgtggggggccttgccccctgcctggggtggcacgacactcctgaggatgttgcgccttccccagtagcggcggcgcgacactcaccacaccggcgctcgaaagaacctcaaaaatcacgaacgcgccccctacctggcgcgccagatatcggagaatgaattcctcaaccagggaaccgtgaggcccccctttgtgagttcggccgggggcagcgggtgagattcgagggcttggtgagcagagctgtgtgatcttgagggggttagccccccccccaagacgatgagacaaaaaaggtttatacaggttcgagccgctgagaagcgtaataccctactcctgtgcatgattgattgaatgtagaacacaagtgcttggggttgggagacccaagcgccagttcgccccgaagtctcccctccaccactaggcctggacctccttttataccttaaggggttaccatatgggcccaacaacctaacctagctctggtggagaagtattgtaatctttgcattaaatgcatgtcttgtctcttgacttgggaagccaagcaaacgtcgtcttgatgatggggcctgtcaaatcttgccgcctgacacggggggtgcccctgtcagtcaccatttaatgggtgaagacttctgggctcctattataccgggaaacgggagccttgcttttactagagcgggaggcctgactccggctgagataagaggatgagaacctctcaccatcactatttgatgggacatgtcaggctgcacgccgcctgacacacgagcagcgcacaggcgcactagccagtcccatcggtcattcgaccggtcacagaacggttgagtgcactgcacgccgcattaaatacggcgtggcgcgatcgctcgggatgccataaatgcggtaggtgggcacctggaggcggacgcctaacccaccgtacgtggtgacctagagagggggtcgggggagcctgacccctagtcacgggagggggcggccgccgcccgacctcgggcccgatccccctcggggaggagccacgtggcgcctggggcggcattctccctctagtctcggccagggagtggccgccgccctacctcgggcccgacccccctcggggaagggccacgtagcattggagggcagcatcctccatccagtctctgggaaggagtggccgcggtcctaccttgggcctgactcccctcaagggagggccacgtggtatcgggaggcagcctcctacctctaaacctgatacccccgggcccatatcaccgacaatatatatatatatatatatatatatatatatatatatatatatatatatatatatatatatatatatatagacacgggataggaatgaaagaacttcttactctctccgccaacccaaaaggaaagaaaagaacagaacagccggaggaattggtcaactcatcatgctcatgacctgaagactgcaggtttgaatcgggctgatggctagtctaaagacattgaccatctggagcgaaggacaattggcgaagttagttagagaaagcttgaaagataggattttctcgtgtggtaactcgtgaaatgccgagttggtacgaattctgggaaatccttccttttactctctcttttgaatgagtcgtggtgcgcgtgaacaaagcaaccctattaataggagggctagctcgggggcaaatctctagtattggtaccgggggccggtgtctagggataggagccgtcaaagggctagtcatcgctagaaaatccgaaacaaggctatcgctagctttattggggaatttctaatcttagtaggagctttccaaagaaatggaaaagtaaggaattttctcgagattgttttcgcttaaccaaagaaagaaagagaagaaggaaccatttttactaataaaatactataaaaaaatttatctctatcataaatctatctctaccataaaggaataggtctcgttttttatacaatgttctacgtcaagtttaaaattttttcatgaaaaaaagattttcaatttgactggacttgacactggattatgttttctgagacagaaaatgaacgccttcgttcaatatctatagtattctcggatatgatagattcatcgcttgttcgcacagtcttattgaagaatttggaatgaaaagaagagtaatgcttcctagggtcttggcttatacctttgcttctcttctctagggatctatacttggatatgcaactttaggtagtcagacagtcaccctcgtatcggctggatatatatagatcagtggtcgtaactggttatgcttaaggaactgtaacaacaaaaaaaggttcttcgtttttcaactggctctaatgcaaatttaaaaaataaagaagagttccgtcaggcgtactgaatctcaagacgttcctcaaaccaatcatatactttattgagataggtaactaacccgaaccccagaagtcatgggtgataattggtctgatgcttcgggcgaagccaattcccagggtgtgacgggcggtgtgtgatcatacgtctataatgcattgtatgtcctagaatagggcccttttggcgttccttcgtagatctacggatttcacccctacacacgaaattccactctcctctgtctcactcaagtgaattggtttcgagagcattccgccactttttggtgactttcactttcaacccgattcacccccaagacgatgttggcgcagaagcaataaaagtatgatctcgttgtcgctttcatcaacccggaacgatagtgtaggcgagcccggatgtagagatggatgatgtgtaaccaaagaagcagtgcccaaaatgcctctagaaagatcagacagaagtaagacgagctgtaattgtacgtacatgtaaaggagcttagtatggagttgcctggattagatcctcgttggtccttgaagaagaaggcggaagacttaaacccttcatttcctaatttttggttcggctctcctaaagaattgacttcctagagccacatgtttcgtcgtggtgctgatcgcgtggtttgcctcttcgtccaattttagaatactttttgattttttagtcccttatcaacatttcatcaatatctccatcttccttgtcaagttccctaaccccctttatagcttcacgctgtttgaatagttccaattaatggaatcaaagtcattacacgagtgagtttagcaagtggaatatctgactttgaaggagctgctgcgaggtgtatggtttgagtacaattaattcatttttttatgtatatgtatatatatgtatatatgtatatatatatatgtgtgtgtgtgtatatatatatagacatatatatatatatatagaagaagatcagagtcaatactagaaaaatcatttttctagacgatgacatttttttctaggcaggtagggctctcagagctaaatgaccacttgcgaaaattacaaccgtggggtgaaatcgttatccgcctgcaaaaatctattttcgcaggcgaaccacttaagcgatccgcctgcaaaaattccatttatttttgcaagtggacctcttaagtggtccgcctgcgaaaattggcgtggcatataaatagatgcgacatcaataatattttttctaagtcctatcctctcttctcccccagctctcctctctccctcagccctcagctctcctctccctaagctccctcagcgaccgtgggcgttctggggggcggcgacggcaaggcgcggggccggtgggcaacggcgagcgcgaggtcagcgatggcgaggcatgggtgggcgacggcgatgcaccggggctacggcatccaccctcggcgcggctccccttccctcccttctagatgtggccaaagagggaggggagggcggtggtggctgcggttccactacctcccagatccggccggagggaagggggagggcggcggcggcggttcccctccctccccaggtctggccagaagaaggggggagggcggcggcggttccccttcctcccaggtccggctggagggagggggagggcggtggcgagcggctccacttcctctccctctccctcccaaaaccctaacctagatcggccggaggtgggtaggggcttgggtgggattaggcccataagtttgtatacccaagcactatatatatttcactaattatccttgccaactcttatctaacttgtggctaaggattacatagtcagataaattgtgacatgtgacaccttagttgtaaaagtttggtaaattaaaacaagctttcgaacagcccattcttcaacaaaaatatttcgtagaggcatttaattattagccctgcagaatatcgaaaactacaatttcaatacaatggaaagtacatttgtagtttgctttgttttatatttttacattaatcttgatgtattgttattattttaaaaagaaaatcataatctcataacagtttacaacaagtaaaccttgtttttccacttctaggttagaacattattcgcttcaccataagaaaagaaacatacaagtgtgagttgtttgtattgattcggtgttaaataaatgattgatagataagaaaaatattagccacttgacaagtagactcccccttagaatatttaattaactagatatgttaaatattattttatatttaactgtccaagctcgaataattcgtagtaccataaagctatccctcattatggtagcaacgcaagagtgctgaggtcaccttgatgacgtttaagaaaaacagagagatcacccagcttgatgacgcagcgaaattatcctgtttctatattgaaatctaacaagaatcagaaaataaaaaaatattggagcggttaccatatgatcagcaatttgtcgagttggaatagcatttacctaaaccactaataaagcatatacatatgggttgtagaaattcaaagatatgttttaactctctctttttttatgtgggcatatatgccaaagatgatatgttggcaagagacattattgaaacctaattattaatgacctgtttaggacttcagttagcttccccaatgtttttttttttttttgaaatgcacatggcattctcttcatctggaagctagactggaacattttgagctgtgccttttggtttcaacatatgggcaacattcccatgccacacatccataaagaacatcaatctggttaaagagatttgataaacaagacagggatttgggatatttggtagtactagcattgtacgcagtggcgttttgggccaattggaagactaaaaaatacagtgcatggttttaaagtcatgcgtatgtgatttataatcatgtaaaaatattgtttatatgtgttgtttactattggattattttggttttaatttgtctttctacagaaattggagaggcagggaagttaaagacatgctgttggaagacaagtggcaggctgacagcagaagtttcaaagaatcggagaatattaaggacggcgggatgggcgctcgctcgctgcgtccacgtcggattttgctacagtagctacagtgcgcgcggggtggaaattatgcgaaaaagccctccgatttttcgtaataatgtataggtccctagcgtcctgtgtttgaagaggaataatcgcggacaggggcttttttgtgatatgtgaaagaagaggggcttttccgcaaaacagcatccactaacgcataccccccacagccctagctgccgcctctccctctcccaccacccctcccgcgccgccgccgcctgcgcctaccctcgcgccgccgccgccgcctcccactccccctcaccccgtccacgtcgccgagcgccaccgccgcctccactcccgccgctgcgcctaccctcgcgccgccgcctccgccccccctccccctcgtcccatccacgtccccgagcgccgcctccgccccctcgcgccgccacctccactcccgccgccgccactgccgccgcagagtgccgccgccgctctccttgtcccgcgccgccaccgagtgcctgccatctcaccctctccctcttcttctcccaccgccgccaccgccgccgccgtcaccgagtgcagccgtctccacctccaccaccgccatcgccgtcgccgagcgccatcgctgccgctccctgctatccctttctcaccccgcctgcctccggtccccctgcttaccccgcctacctccccaatgatgtggcggcggcggtggcgacgacgacgacggtcgatggggtcatttcctccccacagaggtgggggtccaagctggctgcggcaaatttagtttgttcacgctgttcagaaacggtggttgcgtttcatgtgtacgggctgcgttgattggtgcatgtgaaggcacgtgtctttgagtgtgtccgtggcagcttgggcggtgcatccgtggtaaagaaggaaggggacggcatggcattttctggatgcactcgcatttcctcttcgtcgttggccgcgccattccgtgcgatttttgctccgatatcagcggctccattgttttgcccccctgatttggtattgaatcgatgctctttctatctcagtgccaaatctgtatgcctggtgtgatttcttcctccttatacattttctccctggtaatggatggccagttaattggtgttggatgtttgcttgctgttcttcctcgcttgtctctgcatatcatagcatggtacaaatcgttcagggtgcctgctcacaccactcaagatgctctgattgggccattgtggtgtatgccagtcgagtctcgtcgctgcgggagggtcccaccagtgcggccagtgtcaggtgcactcaccaccactcgtcgttcgagggcgggacagagaactcgagcatgcctagtcaatggcagccggtcatcggggctgcgaggtgattggtggcgtctgtgcgtgttctggcgagtagtcggtcccacggctttagccaatcatgctccactgttgttcgggccccacgtagtcgtggtccatgccaattgcagttggccgttgtagcaggctccgccgatgtgccctttttccggcgcagtgttactgctcggtgtgttacgtcggagagctcgaggatggcctccgtcagagcactgatgtgttacgtcgtatgctgtggctgaccgatggccctgtcatctgtggggtcctattgacagcctctgagtatgttgttttttatgttacatatttttttgttttgtttaccagtataagtagctcattgcctgccaatcttctctttcccttctgctttttcgccatttcctttgcattgccttttggtgcccgttcgctgttcttcttgtcgtctgttctagcccattctccgctgttgtgctttcttcgttcgatcatgaaccctggggggtgaacgcgtgtgctggtgggttttctgtatctagcctagctgccttcctttgtgtctgtgccgtgtgtttcctttttatcctgtgattaggcttggtgcatctcaggtagccatgtactggcctgtttgttgcacgagacttactgtcacagagtttttaggttttaggcgattttccccgtgttcatatttcccttttcacagtggatcattgcttatctctgttgttcttcttttagtaaatacttctttcagtaaatagatggtggctattacatagatgaagcacacggtcgttagttaatgacaaatatcattgctttttttttcctggttctgattcattattggatcatgtttcgccactcagagtgtgtcccgtggtgttttcttttcgtgcagaaccatgtggttcatttgcatttttgagtctttccttaagtgcatctctgtacgtttacatgtttttttttgtcccttcacatcgattttttttggcgcaggtgcttattgtcgcggtcaggtccgtgcgatacgttcgttgctgttgtgctgctgttccctttaccatcagctcctgttcaggtgagctttgtttctttgctatttctttggggcagacatcctttttgttttgtagtttatttgtgccttgtggtttggtgtatgttctttcttttatctgatatccagcttaaattacattcttattccctgcaggttgcggaccgcatctcctgtgcccgtacatgtcggctaaggtataacaattggcctttgttgcttcagctatctatacattattcgagctgcgctgttccttgtgggttatatgttctatatgtgtgcacgacatttctgtttttctatgcgtttagttcctatatggaagggggtcgtgtggttaggcctgctcgttgacgggatcgccgattgctagagcgtagcagcgcttctcttagatgtatggtttgttgcggtttgttttttttagatgctttagattttatatcttttcctgggtggaaagattaaatcgtctgttgcttgtttagcatcttcctctaattcagctgccagcgaatatgtttgggagactgttgctccaccccatcagggtatgtgatttactgatctgtgtgcgactgttgttgtggcttgtttatatttatgtagtcgttgctcatatatttttctcgctttagtagacgatggatttttccctatctaccctgcatggtattcttcaaaaagacggcaaatgtgttcaaaaaaattggccatgaaacgattggaggctacaggtttttccattggatctttggttttctgcatatgttcttgctgacatggcttacatggatgttatatctccttccctataggcaaaaaaccttgccgtattgctcctgtctcttgcaacaagtttgacagtgattatgccaagtttttaagaggttgctttcatctctgattcgtttccattcccttgtttgcaatgccagcacgcttggtttaaacataaatttctttttttgaatgcttgcatagagacttcaaaggataggtgcgattatggccctcctgagtatcgctgccgtatgtgcgctgctcagttctggtaccaggaacagtgcaagaaagattctgctattaccaagcgccgtgtctgttacaacctttgttgcaaaggcgggaaaatttttgtccctccatttgcgcagccaccagaacctttgaattcacttcttaaatttgatggagatgctcgaagtaaacattttttgcaacacatacgtcagtacaattcgctgttttctttcacttcgatgggtgcagatattgacgatagtttaaaccagggtggtggtccttatgtctttaaaataaatggccaggtctatcaccgtataggttcgctcttgcctaatgaagataatccaccaaaatttgctcagctgtatatttatgatactcaaaatgaggtccaaaacagaatgcttgctgttcttggtgaagagaatggtagctgtgatctagatcctgagatagctgctgaattgctagacatgctagacaattgtaatcctttggttaagcagtttaggctcacgagagatcggctggctgaacacggtgatgaacaattagcaattaagattgtaggcgctgatgaggaagggcctgttcagccgatgaactagctgggttaattgtaagtgatttttcattggaaaatgcaaaacgtgatataattgtgcagagcattcctggtccactccatcatgtatctagcttgcatcctgcttacatggccttacaatacccactgttattcccatatggtgaacgtggttttcagcttggtataaatttgaggggggttgatttaaatcgcactgatatacgtactaaggcttccatgcaagaacattattgttactgttgccactatcgtcgagaccagttcaacccatatttatgttgcggtcgtttgtcctcccaaagtcaagttgatggttttgtgtgttttgaggagggtagattgacatttatagatgaacaccagggcgattttagatgcgaacacgttcaaggcattgcagatgcagtcgccaaaggttgtttagacggtaatagtgttggtaagcgacgaattctccctgcaagtttcactggcgggagaagatatatgtaccaaaattatcaggatgcggctgctatttgtcgtgtgtatggtgcccctgatgtgtttaccacttttacttgtaatccgaaatggcctgagattgaagaagcattgcgcattgagccagggcagcgttcgacagattgttctgacattgtttgtagagtttttaaaatgaaacttgatgagatggtttctgatattatggctggtgttccatttggtcgtgtgcgtgctggttagtgctctttttttgcccttaacttagctgtgctctttatggtctattgttttattgatttttatttggttgttttgcctatgatatgtttgtagttctttatagcgtggaatttcagaagaggggccttccccacgtgcatatactggtgtagcgtgatgcaccaagcactgacgccacaccatttgttgtggatacatacatcagcgctgaacttcctgatcctaatgaaaatgagcttgattacttacttgttgaggaatttatgatgcatggtccttgtggtgatgccaatagaaagtgtgcttgcatgaaaaatggggtttgttctaaaaagtatccaaaagattttgcttccgagacaactgtagatgataaaggtttcattgtttatagacggcgtgacaatggtagatttgcatataaaaacaatgtgaaacttgataatcgttcagttgttccgtacaatatagcgctgctgcgtaagtttgaggctcatatcaatgttgagtggtgcaacaaatctaaaatgatcaaatatctttttaaatatgtcacaaaagggtctgatcatgccaacataaagtttaccaaagtgagaaaaaggaagttagggcgtgttgcagttgacgatagtggtacaccaagctctagcaaaaagatgcgtggtgctgatttcactgttaagccgccaagggatgagatagctgagtttattgcgtgtcgatatttatgtgataagcaatctatgtggagattatatgcatatgatattcattttagaaacccttctgttgaacgtttagcatgccatttaccgaacatgaacgtggtctcttttagattagacacaaatttagcatctatggtttcaaatacatttttacaaaaaacaacattgactgagtggtttgtcgctaatgatctgttcccgcaaggccgtcacctaacatactgcaaatatcctacgatgtttacttgggaagatgatttaaaaagttggaaaataaggcagcacggctataagattggtaggatgtattacatccatccttctgcggccgaagcatattttatgaggatgttgatcatgtacgtaaaaagggcactagaagttatgaggatattagaacatatgacggc

SEQ ID NO: 7691 - DNA, 52746 bp, Oryza sativa
cgggcccaaaagtgcccgattgatatatggtcgcacagacatgttagatgggtataaaacttaagcccgtcacggatgacacctatcagtgacgggccacaactttaggcccgtttgaggtatggaatgttatctcaatcgggcctaaagttgtggcccgtcactgataggtgtcatccgtgacgggcttaagttttatacccatctaacatgtctgtgcgaccatatctcaatcgggcacttttcggcccgattgagatgacttccttatgacggcccgctatttctaagcatattagagcccgttacagatagaaggatctgtactagtgatcattggtgggccccacaaaaaccgagccgagccgagtccgcacaagaccgcaagtcgtcgttcttatccatccactcggctacatctctctctccttgtctctttcttctcctcttctcctccactcggctccatcttctcctcttctctttcttctctctctccttatcccgggcggcgccatggtgggaggggacgtgcggcgacactcggtggcgtgaggtggcgctacggtgggagggaggtggcccgctcccctcggcggcaggaggcggcgtgcagcggcgggaggaaggcaacctgcgcagccgagtccctcggcagcgggaggcagtcggacagaggtggcccgcgccaaatctgaaggtgcggctcggcgaagacagccggtgtggaggtggggccgtcggcaggaggtgcgacggcgtcggtggcctaaccagagtgctttcatcaagggccgctcccttcatgacaacttccgctatgtccagcttgcggcaagggcgctccacgccaaatgcgttccccgacttcttctcaaggtggatatcgcgaaggcctttgacatggtcagctggcctttcttgcttgaggtgctagcccagcttggcttcagtcaacgttggcgtgattgggtctccctcattctcagtgcctcctcttcccgggtgctggtcaatggggtgccaggtatcggagaggtcttcgccaaggagatcctctttcccccatgcttttcattctagtcatggatgtgctcaatgcgatgctccgcaaagcctctgactcgagtagttttcttcccctcaatgattgtgctattcgacatcgtgcatccctctacgccgatgatctagttctcttcctttcccccgttcggtaggaccttgagttcatccaaggcatcctctctatcttcagtgccgcttccgggcttcagaccaacttcaccaaatgcttgattactccgatccactgctcggttcttgacctagagctggttcagtcctcttttccttgctcgatctctgagtttccctgcacctacctcggcattccactatcagttcgcaagctgccaaaagcggccctgcaaccacttgtggataaagcctcccatcggctccccccccctcgaagggtcgtctcaccactctggcgggtcgctcggttctggtccaatcggttgtctcttctattctggtacatctttctatggcgatcggcttgccaggctgggttatcaaagccattgacaagaagcgtcaccccttcttgtggacaggtacggactcggccaatgggggacaatgccgagtgtcctggacgaaggtttgccatcctaggtatctcagtggtatgggcattccggacctcaggatagctggctttgccttgagagttcgctggctctggcttcagcgctcaggacaccccaactggtctgatctgaaggcctctgttgagcggagcgtctccgacatgttcgcagcatctaccttcactaccttgggagatggtcagtccacgctcttctggactgacgatggattgatggtcggtcgctagcttctatagctcctgacctcctccatgtcgtgcctccacgtttccggggatcgcgcacggttgctactgggttagcgaacaactcctgggttggtgatatacgcggtgccctcactgtcccggtcatctctcagttcctgttagtttgggacgcggtgcttcctacccagctctcgccgggtgttgaggatcgcctcgtctggtgttggacgggtgaccagtgctactcagtgcgattggcgtaccaggcgttcttccttggctagcactcttttgcctgtgccgacctgctctagcacgcgaagggccctgctaaatgcaagttcttcctatggtttgcatttcagcagcgctgctggactaccgatcttctccagaagcgtggtatcgatagccactctgcttaccccttttgcgcttaggagcttgagagggtgaaccacatcctcattaattgcatgttcgctcggtaggtctggctccgtgtgatgtcccctcctggctgggttgccctctctccccctcgtggcagctggctccaggattggtggtcatcctccagggcccatttacctgagcacctccgtatcggctttgactacttggtactcctaatctcttggcagctgtggaaggaatgaaactccagggtttttgactctgcgctcgcttcggtcccagtgattttggagtccatccgctcggagggccagctgtggtctttagctggcattgctgtttttggggatttcttgggagtgtagtgtggctctgccccctcctgttgtttggagtttcgttttaaccatcgtagtagttcctagcttcaggttttttattaagccaatctggctgattccgttgtgtaacaaaaactcttttcctgctaatattgacgtgcaatccttttacgcgttcgcgaaaaaaatcgatacatattaaaattgaaagtcacttaatatttaataatttataattacataattattgattcagtaaaaaatttaattgagattcaaaagaagattaaaactttgcatttatatcaatattggattgagaaaaattttatgaggaaaaataaaattaatagtacgcaccaagtgcgaagatgcatttcctaattaaaggtccatgttagtcatacgatgttaattattaagtttaattgcaagaattaataaattatgaaatcatcgagactccaagattacttgctagtttcaaattttatactctagcttcgattttttctaggcaaacgtttttttaggtttaaccaagtttattgcaacatttagcaatttctacgacactaaattagttttattaaatataacattgaatatattttgataatatgtttgttttctgattaaaatattgctatatttttctataaacttgaccaaacttaaaaaagtttaactagaaaatagtcaatgcgacttataatataaaatggagggagtacttagtaaatccagaaaaactataagtgcgatttcaaaccatgttgctttttttttatttattctaaattttagtattatataataagaaaacatataaagttcaactccacaatatgtacaactttgtaaatacaaattttgaattagtaaatttactaaatagaagcaacaacaaaattatttgaatggttttgtgtatgttgtttcattaataatttaaatttagagctgtttcagatatatgcaaatcacgtaatatgagattacccgtggttatccataggttaactagtccccgtataaaaacagttactcaagttagaagaatatttacctaaaccactaacagcatgtacctattggatgctttgaaaaggtcgttttaaattttatttacttgtgggcatatattcaaaggcgctaatggtgattacacgtataaatcaaattattaggaccctgtgtaatcttcctcggggagctggcttctccgaaaaaagagtgaacatttagaggtccaacaaatagaacctaattcagcaactaaacaagagaaaaactggaatgttacatttgagattgttctgaattattaaattgggttttaagttttcaattgttgaatagtttcatattagttatgaaagggtaaaagacctagtatagcttgtcacctcattggtgaactttaggggttgagaaaggtcatttaggatcatacatcgaatttgtgggatttttcatgaattatcctacagttgactgggattttcttgattttgtattggctcagaaaatttcatgaagttagacgaagtacaagttccaggaactgattcaggggacttttaaaattttcaggcttatgttatagtagtatattgctgcacgtattgacacaatgatacattagaaaaggatttcttctgcagctacctccttggttgagccgttgaggcacttatcatgaccttcaagtccatggtctatttccaaggttgtcagtatcccgatacgtataccagtatactagacactacgatccaccaaatcaaaatgatattatctcatctattatcctaattttcatagtatctcaatcttactaattgttttcgcacgttcctacgaaatcttaggtagtatcctaattctactatccctacgatcctacaaaatattatttaaaaataggtggattgaaaataatatgaataaatatgctcaagtttacattaaaaaccaattaaatttatcaaaatcaatattatatgctttaatttatacaacatattatatattttatataaaaatatgtattttctaaaatctaatagtatctcgatactgattatcttgtatatttttggccattgcccatatgtcttttggtattaaaaaaatgtctaagaaaaccgtaatctaatttttttgaattgaaagggtagttacttacttgacattgttttcctcttttcttccacctatatattgtcgattgctctctattgaattgaattatcaaattgaaaacgagtagcacttagtataacgtaagagggttaattaactagtgaaaataaacagcagcaggtcatgataaatttatttttcattagtcgtgagctcgattggggttgggtgggggggggtgaccgtccacacgatttttcattaagaataagtcatgacatcttttttgcccagaatcaagactggtgctaacttgaaactctgagtccaagtttatgtttcaggtaacctcaaactcataatccaagtttcatgggtaaggttaacttggaaattagtttatggctgtgtttatatccaaagtttggatccaaacttcagtcattttccatcgcatcaacctgtcatacacacccaacttttcagtcacatcatctccaatataaaccaaaatccaaactttgcgctgactaaacccagcctatgaccattgcccaatatgagggtaactgacgaaaatgaacagcagcaggccagtcatggtaacttttttcactagggtatacagtatggttcaactgagttttcataattgtcagagtctcaaaaataattgctctgttgaatcctggagtaggtcttaatatttactggtacatgttacaccaaccagtggtcaatagggatggaggcttgagtctggggcaaaagagttgtcatgaaaggccctcataatcagttatgacttttcgaatttgctgtcaaaatttagttatgtgttgaaaatttcagctgttaattctttcaattattgtccgcccgcactccgcgcaggatcatgctttggacttgggatgtacagtatgtatgtttcaggtaacctgaaactctgaatccaagtttcaaaattgaaatgtctagccattttttgaatcattcaattgagctatctgtagacttggaccactgaagtaacaggatttcacttcagaggttccgaactgactgctgaagaacaaaaccctggaactgcatttcctacagatgtgaaactaattctacatgtattggataaccattcttgattaatctgaagtggaacaataatcctgagcatctgcatagccagattaggaatgtaaggtaatcttggatctttattcaacaggcatacactgaacactaacaaaacaaagccatcaagctttttgcttctgcaggttctagttcttcctaattcctcagctccatctacttctactctccaaaaacaaaacaaaaagaaacgaattcaaacagcctatccttctcctcctcttccccccattcatttacacagctcaccacctaccatcacaaattcacaacaaactcgcatcaaattctccaccacaaacacatgtaagatcatcaaacaagcccaagaaggcacaaacatttttcttatgttttctgttcagagttatatggtggtttcaatcgaatggcgacttggccttggatgatgagttgtagatcatggcggatgagccggagaagctgctgctgctcggcggcgtgctcgacgacgtcgacgtggcggcggcggcggcgcgaggcggcgaggcggcggcggcgccggacttgaggaggaggtcgacgttggcgtagtcgtcgcggtcgaggcggatctcgttgagcatggcggcgacgtccttcatggcggggcggtcgtcgggggaaggggcgacgcagaggagggcgacgcccatgacctgcagcatctcgtcgacctcggcgtcggagcggccgcgcagcgccgggtcgagcacgtcggcggcgcccttccggcggcggacccagtcgacgacgtgctggccgtcggggatggtggggtcgatgggctgcttcccggtgagcacctccagcaccaccaccccgtagctgtacacgtcgcttttctccgttatcttcatcatgtacccgtactctgcaatgtttgttaatcagaaggtgaaagattgaagtaacttttgtgacatagtattgaaagccactgaactatatgattctgttcaacatttgtgcttaagatgggtggtttgtcctttttggttgcgtgaattttaagcggagtgggctcaattggttgtaccatcttgatgtaattgaataagtttcgataaagcttccattatcttaaagaaaaaacttacctggggcgatgtagccatatgatccggcgacggtgttggacgagcggccaaagtcgccgtcgtcgacgagcttggcgaggccgaagtcggcgatgtaggcctcgaagtcgagcccgatgaggatgttgttggccttgatgtcgcggtgcacgatcggcggcacgcagtcgtggtgcaggtacgcgagcccctgcgccgcaccgagcacgatcctgtacctcacatcccactccagctgcgcgccgccgccgccatggccgccatggcggcgctcgtggagcacagcacccaggctaccgttcgccatgtagtcgtacatgagcagccgtgtcgtcttgttccagcagcagccgaggaacctcacgatgttcttgtgccggatgcaccccagcgtcctcacctccgccgagaacgagtcgcggacgcgcccgccgccggcgacgtcgtccttgtcggcgccgttgcgggtgcttggccagagcttcttgacggcgatgacctcgccggtgtcgaggccgacgcggtacaccacgccggagcagcccttgccgatgatgttggcgtcgacgaggttgcgcaccacctgctcgacgctgaagctcagcttctggaacggcgtgaactgccacggccacgccaggtcgccgccggactccgagtcgctgctcccgccgccgtgcccgcccttcccgccgacgatgcccatcccgcgcgcccgtaggatcccgaccatgcccagcaccatcgccaccgtcgccgtcaccagcagcgcgatggcgagcttgagccggtgcatccgctgcacctcctcctcgtcggcgctcatcaccggcctcccgctggcgtcgatgctgacgaagcacacgtcgccgcccttggtgcagagcccggagttgccggcgaggcacgacgtcgacagctgccggaacagcttcgtgtccgggaggtagccggtgaagttgttgttggacacgttgagcgtgacgaggttgtcgaggccggcgagcggcgcgaggccgccgtcgagcgcgttgtacgacaggtcgagcaccgagagcttgctcagcgccgagatcctcgccgggatcggcccggtgagcccgttccggctgaggttgagcgcgatgtcgaggccatcaatggcgcagagttcgtcggggatgcggccggagagggcgttgtcgctgaggtcgaggagctcgaggttgcggcactttcccagcgccgccgggatggcgccggagagcgagttgccgctgaggacgaggcggctgagcgcctccagcctcccgaacgcgtcggggacgccgccggtgagctggttgtgtgacacgtcgatctcctgcaggccgcggacgccggcgagcgactccggcagcgcgccggtgagcgtgttgttgctgaggtcgagcatctggagctgcgagcagttgccgagctcggcggggacgccgccggcgaggcggttgctgccgaggtcgaggaagttgatgctcctcatcccggccaccgccgccgggatcgtcccggcgagccggtttcctcctagccgcagccgcacgaggctcgccgccttgccgatctccggcgggatgacgccggagaggtcgttggagaggaggagcagcttggtgaggttgcggagcaagaagatcccggggggaatggcgccggtgaggtggttgtgcgagaggtcgagcgcctggaggttggcgaggccggcgagcgacgccgggatggagccctcgagctggttctgccacgcgaacaccacctgcagcgcggcgaggcggccgagctccggcgggatgaggccggagatggcgttggtgtcgagctggagctggacgagcgacgtcgcgttcgccagcgccggcgggatggtccccgtgaggttgttgtcgctgagcatgaggtcctgcagcgccgggaggcggccgagcgacgccgggatggcgccggagatggcgttgatggagaggtcgagggagacgagggaggtgaggttgccgaaggtgtccgggatgggccccgtcagcgagttctgccatagcagcagcttctgcagccgcggcagcgcgcccagcgacggcgggagcgggccggagagcgagttctcgtagaggtagacgttggtgaggttgccgcagccggcgagctccgccgggatggagccggacagcatcgtcgtgtagatggacagcgtctgcaagctctggagccgccccagcgacgccgggagcgcgccggagatcttggtgtcggcgaggccgagcacgacgaggttggagagcctcgagaacgactccgggatctcgccgccgaggtcacggttgccgccggcgcgcagcgactcgagcagccgcagctcgccgagcgacgccgggagctcgccggagaggcggttgtcgaagagcaggaggtccctgagcgacgcggcgaggttgccgagcgacgccgggattgggcccgagagctggttggagttgagcgccagcgacgccatggccgtcgcgttcccgagcgaggccgggatggggccggagagcgagttgccgctgaggtcgagcacggcgaggcggcggcacaggtggaggtcgtcggggacgccgccggtgaggttggcgtcggagacgacgagcgacgcgagcgacgggagcgcggcgcagatgccgggggggagcggcgcggcgaggtgcaccgactggaacgtgacggaggtgacgctccccgtggcggcatcgcagccgacgtgcgaccacttgcacggcgacgacgccgacggcgaccagtccggcggccgcgccgccgtggtgttgagccattgcgtcaggaaggcgacctccgatgaagccgaggcggcggtggaggaggagaaggagaggaggtggagtaagaggagaaggaagtgcatggggcttggcaacaatggtggcaatggcagctgcatcaaaaatcgtgctgtgcttgcttggggcagtgcacaatacactatgctaaccaagcttgcttggttcaagagaggtgatgatctctatgaacttcactctcactcttcactcactcaccatggttcaagagtgaaaacaaacaccttgtttctctctctctctctctctctctctctctctagctactctctctctcttttcctcctcaaaacactcaacaggttgagctgtttgcttgtgtcttggtgcttggttgcttgctccagatggatagtggtggtggtggtgtcatggtgaaatgtgggtgcttgcttcaatgcattgggcttctccccaacacaatttaacaaagttttgcttcttctctctctattcaattggtgatgtgtgtgtagagagagagagagacaagggggtgcattggggggagggaagaagggagaagaaaattgggtgtggcactgacaatgggagcttagctactctagtctctagtgtgcagctgccctttggctatgatcaagtatttctattgtcaaattgcaaacaatttgcaatgctacactcatgtggagcatgtacaccatgcttttggtctcaatcgcaccaatcttgatgtgtatcttggctttgtaaatctatggttgagattaaaatcttgacttagttgtcaactacttaacttaatttgtgcggctgcgtcttctcccataatcagaagctctcacaaacagtacatcttttggtccagattttgagaagctgtagttctagaatccagaaaatgaactaaagccagaaactggaaaacccagcttttccagatcctcagaagctggctatcaaccaactacttctcagaattttaagttccaccaaacaggccgtaagacatgtttgattggcaactacaggttgctacctttttatcaatagaaattatcaaacttacctaaggttatgtgcttaaaatcttggtcatatcgtagatagaattttgcctctctttttagttattattaccacgtgcgatctaatttgttgaaaaggaattttaccacaattacgaatgcaaccaaacagttagtatctgtatttatcaaacttgtctaactctagatatggtaaattgtgctaagctgtggctggcaactaaacatgtcctaattgtgtgctctaataaatgttatttgtggctttctgtggtactggtgttggttgatgggggtgatcttcatggctttagaaagcaagcggcttgtggggaagccagtcggtgttgtgtcccctgcacaagtcgattgaatgttgacaatttaattttgcttgcttcatcagtgagggcaaaagcagcattaaatcccatgaaatgcgcggcaaaaaggtagggtttgtttccgaaaattaacacccaaaataattataggcaatgttcgaccgtacaaaggctaatgtatactatttttttggccaaatagtcttgaagtcaagtcaagggagtatgtacataggttggtcaggattgtatgtattcagagggggacaaaacgttaaaatgcagtttgaaaagtaagactgcaggtttgaagtttgtatattcagactgctatgatcaaatgtctaattgaaaatgtgtaaagagatcacataattgacctaattaatctcctatcatctttagtttggtcgaaaaaaacatgaaaagacttactattttgttaaaaaaaacattaaggaatcctctcaaatggaggattggcacgagatttcaattcccaatggattctttttcatgtaggctcctttgattcaagggaaggatttgaaaatcttcataggattgcatttattatcaatttcataggaaaataagccacattaagacttttcttcagttcaatctttcttggaacaaaatgtttcaacaagcttcgcaagcaaaccaatggcttctttgacttgcacctgccgggattgcaggctagacaatagacctgattgatcaacttgtcggggtctggagtgccattcaggctctacacctggtagagcacgaggaggacaatataacatggaagcttactaaccacggcgaatacacgacatcaacggcatataacgcacaactccttggaaccaccgctaccaacttcaacaggctaaactggaaagcctgggcgctgcgtaagtgcaagacctttgcctggctaatcatccaaaatagagtctggacttctgacaggctagcgacaagagattgactaaacggttccatctgccccttacgtcgccggacccatggaacagccctgcacctcctcgcggaatgtagatacacaagaagagtctgggcggaactagcggagtgggcagcgtgcgagcgactacaatctagccaatggcggcaaacttcgatggtgctagattggtgggaggctaccgtaaatatacaagagacacctaagaaggcactccgcactttggtgttgttggtcgcctgggagatatggaacaaaaggaattgcataaccttccaacagaaggagatttcagctacctccctgttagccaagatcaagaaagaggctaaaacttgggccttagcaggagcgaaaagtcttaataattggctttcttttagttagctcggatggaaggtcctcagcttcttttttttcctttcgttttgtaaagttttccttctctgttcaatgaaagtggcactagtcaatttgttaaaaaaaaaggtttctctttccgtttcgtgtgttttcgattctatacgattgaaaaaacatgctactttatttttttcccaactgtttttcctattgagcatttcaaaaggggcctaagagcctggctattctgaataacgcatgcttgcttgattgtcgcaagtaaacatagtagaatcccattttgtagtactccaattaacagagtgttaactaggccggagcctctagctagttaattaattagctaaatggtaaatttccagcatagagatgtcaagatgctgtatgggttattccaacattggatcacgtgtatatcacgcgcacagcaggcagctgcagattaaaattacagtaagccaacaaaaattagtacaccattgtttaagattgatgcagggaaattagagtactaatagctttttacagtgccaattaaccgtgtgccaaccttgaggtttacattccggttaactactagagcactcactgaatggtgggcctcatcatttacattaatctctcataggacccacatgtcagcgagtaattaccagtggctttgcttgtttaattagtaaagaaaatcatatagattcgcgctagtgttgagttggatgatgaggagcgacccgcacacgacatggggcatctctccacagtgacagccttcattgcgtgcagccactagttattagttaattaattaattaacgtgataagtaaacagagttagtggtagaaattaagaagcatcactctaattaagctggtcagggctagctggttaaaatgaggcaagcatttttctattactttccacattcacaattcagtccctctaatttatctgcatctatatgtacttcacctgcactacataattggagctgctataattctagagaagaacaagaagatcaaatctatcttgtttcaatcgattccaattgttaaattgtcaattcaaatcatggtttcaattaatcctatgtgcattgtatgaacaaatcctcatatatacatctattagtagattacaagtagtatcatgtttggacttgcaaagaaatcttgagtaatccaggatgttctgctaaacacatacatgcatatttaacaatgtgatcaaactgtcataaagtaaaagaaaaattaatgttaaaatcagaatgaaggtggtgtaagtgtgacttctgagaggtgtttaatactttaacaactttaccacgttggctgatgatatcttattcctaaccgagtactactactctctagcctctactcttaattaaccgagtacttgaattaacagtgttcatacaagctagagtctaaaccccagctctcgttgtctaatctacacaaattaaatattaattagcagctagctagtctcggcttagggcaagtactataatagatgtaattgttacctccaaatttatttatggcattcaccaataaattaagatgcaagatatacaataggtcacccctaatacacaaatatcaatgcctttagtactctcacatctttcttggagcttgtgtggaggctacctcttgatttaggggtggttcatcatctctctccttacttctctcctccacctcatcacccaatcctatgtgtcatttttaggggcagcacatgaaccattatagcacttgcccttagatggctcaatggtaagcttggtcttgggctttgagcttgtggctacctatttaaattggcaccatgttagggtgcagctaccagtcaattgtaacctagaaaggcatctcaaagtgtttttgattcatttgaatgttgggtttcttttgaggtatggtgtcaagcagaaggcattggtatgcatcaaaggattaggatgacttgtggtggggttaattctcctcctcactgtccccaaaatatagggcccatcactgttaagaataatagagatgaagtaaggaataacctagtttgatgttccatttctttttgtaaggataaatgtatctaatatgtttgatcgatgttccattaattgtagagtatgttgatcgaggtactagaatataaaggacatcatgtaaggttttacaaattaaatgagcatcctcaatcacgatggcaaggttgtcattcatcaaacaatttatatatctcaatataaacttttgtatgagagtgcatcaaagaagaaaagaaccatctttaagaatgtgtacgaaaagaaactactaatatggagtgaggacaaagagacttatctatctattaaattaatttaatttggtcagcagaactttgtgaaaggaaatattgcaatggtaagaaaatttgaaaataattagtggatagggaagtaagtaaataaaggatatgccggattcacaaaacataaatcatatagaatatcataaaagcatataaatttggatcgttgattctttagtactcttttggatgatgattcttattgcatccgttgtgcatcttacaacgaattatcaagtccatacgtgcatgtgaactctctatcttgttggcgcatgaattgtctatccccaatggtttttgcgaaccctggtcgtcacagttttaaattagttacacactcttaacggtttgtgtttccacaaacatatgtatagtaatgaaaacagcaaacaagacccagagttgtatggcgaaaatccagaaatggccaaaattggtggcaacaatgaccccaaaaaactaatttttcctctaaagtccaatcaatgactcctggtacaagtaataggaaacaagccagctggccaacttcatgtcaaactgtcaatataggtttaggccaaagttgagcgtggttgtttcaaaaaaaaaaaggaaaaatagtttagtgtggttggttgtattgtcacttgattggctatgggtcaaagctagttcctggttttggggagttaaagagcaagtccacattggaaagtttgggatggggacccatttgacggccagatgatctcctggatagcgacaagacaatgcatggtgtggtgtctcttcatatggttctgcactcgtgtgcatttaagacattatgattgggttgaaatagctgtgtaccttagagaaaacctttctgttttcttaactttttcagataactattaaatgtaaaaattgtctaaacttattttggaaataaatcttttgaccacatccctttgaatatgcaggcacctaaacctctctatattccatacagttctactccatccgtcctaaaataacttcactctttatcaactagtttgacccaaataacctcatcctttaagcaattatcgcattagaaatttgtgaaagtgagcaataaatgcattacgatttataaaagtgacagacaattgcatattgaagtttgttagagtaaagggcattctaggttttattttttttacctttgtattggtatgtgtaggatgtgtgttaaaattaaagttattttgggacaagtacactgttacaacactatgatgtgctgaaaggttcaaatctagacctaatatctatgtgaggatttatatttttcatatatatttttttaaaaaaaatgaaaattcaataaatatgtttatgttgacgaaaacatgcccaatcttataaaaattcaattatggtcatagtttcgtccaaaacttgtggctatggttcatgtttgcaaagctttgcatcgatgctgtggaagtgtggagagatgagcatgttcatggtttcaagtttcaacaggccataaggtcaaaatgtcaaatatagtacaacgatgtacatttaaaataatcactaacatgttttttaattatggttaaggtatcaaagctatatgcaaatataatcactcggtatatatgacgagcacaaaacttatcacccaactacttctataaaagtgcattttagtactaatgctaacactgtatatatgaaccatagccacaaacatgcaaatataagacactaaatgcaaaatattataaataatggttacaaagaccatcaaatgttgcaaatatacgaagttttctgcaacggacgcaatgtttcatcatttcctacgtcctcagcatttttattctaattaatgaagcacataagaagttccaaacttcaagaactgatctaaacttgcagcagaaagaatcatgatcggttgtgggtaacacaaggagggatgtgaagacatgctccatgtagaaattaaactgttaaaaccccaagaactggatcatgcagtgcatgtggatgcaggaaaaagtacaaaccgatcgagctgtaaaaattctcttaccggatgtcactaaattactagcttgctctgcagccctgcaggcacaaagctagcaggtttagtggtaaaaacaagaattctagatcccaatgcaatggctgtttgtttaggctcaagtcgtttctcagatttaatttacttaattaccacaagataggtgtaatagacatctgtattttttttactgcctgaattatttagtactacacactagtagtatttagtttacacagaacatggtgggtagagactaatatatgaagtatgatatgattcactcttagctgtagtttacttgggtaattacatgcatctatagaacaaaggcactactcctatgttttagaggtaaatggagatggaagaaagtaactagagatgcccatgaacttgtgctggtaaaaaaaagagtagtagaaaacttaaagaacgccctaaaaagcatctcagcatgcagtgaccatgctgtataatcaccagccacactgcacaccatccatcccggtcagctgctgctgcttttgaagcgagtttaaaggttaaaacactggcctctctccagacggattaactatacacgcatcccaaggttaattaggacgtcacatgctgttagattccatctcacaccgcttaacccacttaagtttatcttaccattccatctccatctctttttcaacgtgtattatgtactatacaaagctacaagcaagtagctaggctcgtagccacgtggaaccgccgccaaaagatccaaatttctttgtgcctattagcaaaacattagtatgcatgattatattaatttctgaattgggcataggtcttaattttgttttgtaggctgggtgatactgatgttcatgatagatgtaaaatctgtttagttttatccttttcaattaaaagttctaattcctgggatgtacaccaactagagctgtacacggacattacacgtaaaactaaaacctgtatttctagcatggcggtcaataattacagttaagggcaaagagtgcctaaaccagtggatgtatatattacatatatgctcctttgataaaggtaccatcaatctcattggtagaatggagtagaaatcacctagtattgtttagatggctgtctacactgtgatttcaattatctgagaatttaaatgatgtggtgactggatttcatataaacagtggtttccactgtaaagttacccctactatcttaccctggaagcgctggtattttacggatatttctagctgttatctaaagaactcgtgtaacaggataagaactttactggaagtactagaacaaaccatagagaaaactgccgttcgctgcagaagataaaaggctcggtaaatagcgtactagtacaagatagaccgcttagtgcaaagagaaattattcttcgtatatttacaaacaggaatttaggaaaccaggatacatactgccaagaaagccctacttgtaatcttgtatgcatctccatcactgatcaagtagccagctgttaagcaagtccagtgttagtcggatcagatgtcctagaaatacatatagtaaacatttcagtgcattttttttatgctagtactacgagcagaagtctagctacaatgagattccagtaaacctaggaaaccaagaaatttgatatagggatgactgaacagaagggtgaaactgcaaattgtcaacaaacctgaatatggcttcaaaagtccacctgagtctatgacccatccatttccacgaccacaggagcaaactgcattcagatgaaaagaatgttttcactctgagtgcagcaaagaaatgctatcactcgatcatgaatcgtgatccaaatttacctcatcatcttcatcaattagattcaccgtattgttgtcaagatcccatccaaatgtggtctccagaagtgattttagttttcgagtctgaatatatggaggtaaacattagaaacatcttttgatattattccaacattacacaataataaagctgaaataaattttctacagaaataatgaggctggctgctcaatggattgaatttgcagcatactttgtctgcaacgtactctagttatgaataaaataaaaaaacatttttctctgatattactctcctctgttcatataaacggcaaccacagaccaatcattcaagtgcacgaaaatataactccctcaaaataactggtcaaaggtccataatttgtggttttgtggatattaaaccaggaatttgaagtaaccaaaatactagtccagctagggtattttcagagaaagtatgaagttctaaactcagtctaaatgtggtaattcaagcatgggctacagaattgcttatgtggtatgtgtaaatgtgagagagaaggtataggaatgcccacccatgacagaaggtcaccatcaacaactgtagcttcaagtatcaccgcaaagaaatcctgacaatagcagaacaagctattcagcttctagctgtgcttctaagcaaactgtttcttactccataattcaaatatgcgataagaaatcatgcttggtcatgattaaatataatgattccaaaataaatcatgaagtcaaatgaactgaacaatatattcacacattttccagatatgcaaattcacctctaccttgatgagtttactattattataggtgtttaatagtcctcgagtttaaaaatgtacgaatgttagggtcctctgcattacgagtcccaaatggacgatcaaacttaagttagcaatgaataggcacactgcgctgctgcttactgtcttcacaacaataaaaaacagtaaacatgtaactaattgaatccaggatatgtctgctaactatacacagtgaagctaaaatcgttttacttcaggtccaagcagtgcattcattgcaattgctaaggacccatttaaatgcaattatggagtaatcaatataagggtgaaatacagtttcaaatgaaaagagcagtgatagaggagagatgaggttttactaactgttgggacatatctggtaggagctaactaaaatacgaaaaatgactcgatcagtagccagtgttggacagtggtgacttgttgtggttgtttcaagatgtacaatctgatctagagatcaatattaccattacttgatttttcgtatttgacacaattaaaaattatataatgttttttcttagtcatacaactagttttaggaaatatttaccttaaacagtaagcatatatcttgtaaccaagaagattttgtagggttatcaacaaaagatggtaataagtaccttagaaagacgatagagaaatatgtctcttgaaaaccatgcttcatctaagaacagagaattccccatttcctcaccacttctattatcctgtgtgtgctgaaagccatgcttgagttgatagtaaattgccctaataaactgaagcagcacaaaatgacaaggaaatggttgattagtcattatcatttcagaccatctttgccctgataaattcagtaaaacgtgcccatatatgaacagtagaataagggcaaatgatacctttacaaacaagttagtccttgtatgaagaggctgtcaaaaggaggaaaaattaaaaaaaaaaacttataagttcatgaatatacttgtgccatcatttcttatgacttatgaggtatgatttaactcggacagtggtatgtgcattataaatttgtagtagtactatatagtgcaataaatcctcaagaaggtaattataaactgtcatgtcagtgcatccgttcgcttcattgttccacactcccagcctcaagacaccaagtaaattcagtttgttaacattgacggaaagcattcatgtcttgaagcatgtgctcagcttcatcaagatgtaccctaagatgacagttttaaccaacagaatctggttactacagataatgatgagttgttgaaacttttagacagcatattcatggaatttggttgaaccaatgcttacagaagcacggtagcttcttcatcaaaatgtgtcctgagcagtttaatcaacctattacatgtctcacttcaaaaaagaaatggaacctctagccatctgggtacaagcgaagctctatttttgcagaatgcagatgcaagcagccaccaaaaaaatgctcaatgacactattttgtgcactctgatttttctgttttgatagaaattagttagcatgtttaaataaagagtagcactattgagtaggcagtacaccatcgatgaagcaaaacatgtacattctatccatcaatttgtgaagatgcagtaaaagtgctgcttaatattaacagaaagttgagataaattagtacttacagcttcactacagctcaaaagaagactaactaatgctttccattgcataaaagcctccagtgactgccccatctaaataactcaaaaatgttaagagaattatgatttattgaatgtctttaaagaagttggtttttttcagtagtaccataaatgctatgaaagcaaactgcagctctcccaagagtaaatcctcttggccttggtaattcttggccaaaacactctccagcaagcatgtctgagaagtataatagcttcatcagcaaataataatacaatttttcgatttggtgcaatttacatgaggcatgtgtgaaaggaatcaatccaagcaatccaccattagtagaaattactatgcctaatgtagaaactagagcatgagagcatatctaacatgaagcccagaatattactttgtccagatttaatgcagttagctcatccccagagatgttactatgcttaattgaagcagggatagttgtatagtagcatcctctccgctcagactgcacaggagcattctttgcaaattttccatcttttagttggtccattaaacgtctctccatgtctgtttgcggagctttatccatccatgatgactcccatgcaattgtaatttctccaccaattggctctggagatatcaaatataaatcaaatatgtaataaatgtgccgacttccaaaccaatatgagaaacaagaaggaatcttgcataccaagacgttcaatgacactttgtggcaagtagcttgagagttgtttccaatctccaaatgaatccaaattatatggtccaagctgactgtcaaactcgaaatgtcttactgcttcagaatatctgatttcctaccaaaaagtaaacttcagtttcctaaacgaaaaaccaactgggcatatctgttatgtgtatttttgtcaagtcatagtgaattttgcagaagcacaagtctgtggaatatgtacaagttaggggtattagacaaatttaattttacctgattcatgtaatgtacactgtttctcactaacaacagtggcaatccatagaaaaacaagttcaaacttcaaacataggttgagtgcattttgtctagtcctttttttagggaattgtctagtctaatttccactgtcatttatggtgcaagtatgagagagctgcaattccaattttaagcaatgtatcttatacctcattataaactgatttagttattcacaagttgccatgtctgtcttcataatgtacaatcacaatacaattgatacttggcatactttacagtttaacagcgcatgaaggaaatatgaaaattacaggatttaaaagaacttgaagctactataccaacattcagcaaaatgcactcttttatcttctgaaatagtggcttttcaagacacttccatctcagttcagtgcaatgtagcctttataagaactagaaagggacaggtgcttctatgctccacatactttaatttgcaccggtttcaaagcaatattaacattgcacgcatcggaggatcacttggatcctagtactggaagtggatcaattggttgaaatataatgctttttgtttcaaatggtccattagcaacatataaaagcagatttcctggttttcagttagcagccaaacagaatgcctagcaattgaaggatcaagacattcatcaaaggaaacaaagcaatggaggaccaatcaatagtccgtatgtctacactgataaccattacaaaagttactagaaaaatataaagtgatataatagattaaagacaattctatcaatcagatatgtcacctcctcttctggtagttttattaatctctcctcctgtgcatgccacttccgaacaatcacctggaaatagcatacagaaaatggtactgtaaacatgcaagttactgccatcatcagaatccccccccccccaaaaaaaaaaaatcaaactttgacttccttcaaaattttaagtacagttgagaatattaatcgtcattcactgtgacaacaatcacaacattcattttcatctcttgcttcagtacatcttacaagtgagttcttctttgttggcttttcttctgttcattctatagaccaaattagattttttttcttttagccaggcatacatatctatatatatacaatacatgcaagtttatccattatttgaaaatgagtggttagatccacgcattcatgtaactacacttcagcaaatcatatcaacagtatcttatttgctaagatgaaaataaaaaagagaataacatacggtagtaatgcaactgtagtaaaaataaatacaatactactttatttagcaggacagggttctacattttgaattcaccgccctatctgattttccgtggctagcactgataaaagaaatattagctattcacagaataataaatgtagtggatatgttgatggttcatccttccaacccccattttcagtaaaactgacatgttcacatacaacagagtagcacaaaacaaaacccaggatgcagaattcagcattaaccctagaatggataatatctggtgccatattatctctgcgggcaatttaaacttgatttggggcatcatgaaagagtacctcagatgggtgagtagtaagaaagaatccgacagtaggtgcgaactcatttgcgtgcctgaaaggatcacagattgtggaagaataatcaatatgtggcttctcatgtaagttgttttggccataactgaaagacacagaccatgcaggcgaaatggaacagaatgcgtaaaacaggcacaagtggtttcatcatcttaacatggttttctgaatgccataactccagatcaagtaatcaaacgtgctgctactgatatatatcaagaccggtttacaaatgttaatcaagatcggtaccagtgatttcaagtcgtctagtcgggactagtcgtaagggcaccgactagtcgactaatcgcgattagtcgcaactagtcatagattagtcggtgactataggctagggatatgcaggataatgtacagatgtttataagtattaattaccatagtatactagtatagtatagtacaaactaaggataatcagattttcacagttgacagttcacacttgacataaggtcttaaagttaaatcatttacctgtcctagttgcaataagtccttcatcttttctcccctctctctcgtgactagatctagatggctggttagggttagatgaggggtacaggccttcttgggctgggcaaaaggcctgccactgaagtgtaaagtccaacacatatttttagccctaacagactagtcatccacgactaatttgatcgactctcatgactagtcgtgattagtcggacgataagttttctggtcaaactaatcgcttcaaagttcatgatcgaggtcagggtagcgataaggataactaatcatgattagtcgcgactaatcggacgacttgaaaacactgatcagtacacaaactgttgtgacccaaagaagcactaggtagttaattacgcttcgctaagattgtcttgtcaaaatggaaggtagaatcgagctatccgatccaattgatgatgctacactagtacactagcaaggttcttttaataatttttttaaaaaaaaatcaaccttacatgcatatcactcagcacttgctggctaaacaactctgcacaagttgactgacggtgtgataaatctaagaaatagagaaatgggatgacgcaatgcaacctgttgggggagcagtagtagaggaaatgcggccccggaggcaccatcttgatccccttgaacttgggcccgacggagaacacctgaaccgaatcgaatcaaaagcagcagcacgcaagaattagcctagcgaggagaaaaggtggggtttagggtttagggaaaccaacctgggtgtcgacgccgaggagggtgcgctggggcacgtcgaggaggaggagcgtggcgcccttccgcaccagctccgtcgccgcctccgggtccaccgccgccgccgcgccgccgccgctcgacatggtgccgcccagaagagaatgaaggacccagaaaagaaaaatcgaaacgaaacctggtcgggcgggtggatcttctgcggctggactcaactcgtgtactcaagcgccgattagttgccgtgtattggtccgttaacttgtgagagagcatctaatgcactcacctcccccttaaataagcaggcaggtttaaaaaagtcacacaatattgatcaatttgcttcttcaaataaaagagtacttcaaaatcatggtgttgttggaggagatggaggaggaagatggccttcagattcttcctcatcagtaggagggcatcggttggaacaaatgggagagagcaatccagaagagatgtgaaggattcataaatggcgatgcagagagaggagacacagcaacgagctcacgtagaagtgagggaggaagaggcaatggagacgaatcaagagctagaagcagagcttctcgccgggataggggaggtgaggttcaagctagagctcaagcggctgattcagggagatgctatctctctaagtatggctcttcctttgcaaattctcatctggcaactaatagaaatgtactccctggtggcgttagggtactagcagtgctatggaagaaaatgacaagctcttttatcaagaagtggatgatcgagctcaatcagaaggaagcaagtctcagtttctccacagagtcaagtcgcacctgactttaggtatggcttatttggctggggctcaagctgctaggaattatggttctcctgctacgatcgggggatgttgttctgtttctgggcatgatgtggctagcgttcctcgaggaaaacttttgcaaactcagcctcaagatcagcttcttgcacatggggattacttgggattggagaaaggtcggctcacttctcaagggcagttggcgccagcccacaaggtgccacaggcaccatgactttcttgagctggaactgccgaggtatgggaggacacctcggcaggaggaagatgcagtacctccgtagtttgatcagctccactctcgctcaggtaatatttatttctgaaacaaaaaatgattctttcacttcctctgatctcactgatgcttttcatgtagataatagctatatagttcctgttgtccatgcttctggtggtttgtggcttttgtggaataatgaagtggacctcactgcgatgagtagttgtgccaattatatagtagctgtaggtgtttcatatccctagtggcacgatgtttaatcttttgtatatatatggtgatcctactcatcttagttctagcagaatttggcaggaggttagtacttttgttaatcaaagtagccatcgtgccaccatctgtatgggacacttgaatgatattatgaaccttgggagaaatatggtaatgctccccctaattttaatcgcatctctatgttttataatcatttgagacatgttggtttgatggatatgggttaaatatattattaacaccagaataacggattgatgattttatcaatgagggtaataacgtcataatcatggaacggggttgtgatacttagcctgagacggtcaatatcggtgtgagaggaggaatgcttcacgcaagtagagacttcggtgacgtgattctcatatgagggtatcactgcgactaacaaataagagtaatatgagggtatcatttttacttggtgttaatttgtacattaatccttaaaacagctaactttctggcattgagggagtagttaagttggtattttgacttttgtggtttataagccaatagcttaaaacccacaaggtcaagagtagtttcctaactccacttcacataataagccaagaaaagcaactcaaatctagctttcagtccattaatgtagtagtaacctatagctttagaagggaaaaaaagcctttagagcaagttttatgtagaggtggatactacatctaattttagccgtgttatctactcttcactacacatacccttataataagggttaattggatccatgccactgcaaatatgtcaattcggaaaaatgccactactattcgcgatatcggctacgtgccactggaatttggcgaaattggaaccatgccattccatcgcattttccgttaaaaatccatgttagaatccaactgcgcatgggacccacctccctcccctctctttccccttcctctctctcacccgcatcaccagctgccgacatccatggcggagaagcacgccggccgctgatttcctcgacgacggcggcgagagaagcgcatctaccggtggggactatgaaggggagggcttgccggcatccaagttgcagcagtggtggtggcgtcgtcgtcgtcagcctgctactgctgctgctgccgccgttcagatccacagcagccacctgcggcgcgtcagatctaggcgtcaccgccgccgcaagccgctcgagctcacttgagatatccgagttgaagctcgagtagtcactgaaatcccgcaagagctcgagcatctccgtggtcgcggcattggcggatgacgacttggccaccgccgccgggcagccgacggccacggtgcaccggtaatacgcacgcgggcaagggtttcccttcgccatcttctacccatacttcctccattggcacccatcgctgatctgctcatcaccatatcgacatctcaacacaaacatccatgcgaagaagaagaagaacactagctgcatatggaacatgatcgagcacacacaccatgggtgcatcggagcgagctcgaacggagacacgggccttccgcatggagtgccccgtgcggcattgcggcacaggtgggtgcagaacgtggggtgcacggaggacgcgacggcgttcgtgaccctcgctgccgccatcggccggctactgctgctgctgctactgctgttgccggccacctgctgctggtattcgtcggccatgctcgccgaagagagatggggaaggaaggagagaggggatggaggaagaggatggagctgacatgtgggtcccaatcccacactgaagtgtgacggcgatggatgaaaaatgtgacggcggtggcatggatctaattttacaaagttgtaatggcacctagcagatttcgtgaatagtagtggaattatcctaatatgacaaaattacagtggcatggatccaattaacccataattttatattgttggttcactttcacactattacactttctctttacacttttcttggagattgcatagatattgcccgttgtatgagaggtggctcgtcctctctcccttctcacttctctactccaccatcacctaatcccatgtaacacttctagaggaagcacttaaagccttatagtaattgctcttaggtcttgagtcatctttgtttgggcttattggtgtagtatttgcagtccctggtgtattgcttggccatcgtaaataagtatcatttagtgggaatagtgagtactacaaaacctatcatttaatgaaaatagcaagtgctatctctacatgtaaataagtaacattttaaatagcgatacagtcaccaaaacgctatatatttgtaatcagagggagtgtatctctataaaacaatctcctgtatacaacatgaagtcataaaaatatgtgatgttttatataacaacaatatcaccaaaatattagttcttatcattttgtagtacacaaccaatgagaaatgtaggatatatattattggtgttatgaataaggcatatataatacttttgtgttagactcggcgaggcatcatatactaaatcttatacggaattaagcctcatatatagaaggtgttccgggtaaggactactcggataatatccgtacttgactccctaattctacttagataaggggacacccgaggcgaagagagacggagacaagtcaagacagatctagataatctaagacaagcctagacgaactagatacagagctacagaggtcgacaagagggatctaggatgacctccaatctcgccaagttcatattcgagcaagcataaagtagattagatcatcctaaatattgtactttctcgccccttctatatataagcaacaccgacttcagctaataaggagtaagggtattacttgtcagtttaggggctggacctctataaaaatccatatctcccttctcttttacatcaatctcacgtatatcttagcaccaatgatcggggggaccctaatgggcatgtgatcgctgtgggcgatcaccccccatccctcttacacgctcctctcccccttcctcctccacttcttctcttactactacaccataaattttaaaaaataaaaaaacaaagttagaaaaaaaattaaaatagaaaaaaaatctaatactcttattttatgtgcatagactctgtacttatgtacagactttataccgtaaacttcgcatgtacaaactttatgtatagaaaatactatatataaaaaatatttgaattcaaattcaaatttgaatcgggtatataaacttttgattataaattttgtgtctatgaactttaggtgcataaactttatatatgtatagaaataatatatataaaaaaacatatttgaattcaaattcaaatttgaatcaggcatataaacttttaacttataaactttgggtctctaaactttaggtgtataaactttagatgcgtacaaactttaggtgtataaatttactaaaatagaaaagtaatacggtgaaaaaaaagaaaaccaagtgcatgtttggtacaactccaactcctaaatttagttccaggagttgggtctgaagtggagttgtagagctgcctaaacccagctccacaactctagttcattttgtgagagctccacccagctacactcccatttttggtggagctgaaactgtttggctgagctccagctccaggaagggtggagttggagctggagctgtgccaagcaggcccctcgtgaggagaggcgatcgatcgatcgcccgcccattaagaatttcgccaatgatccccacactctatcaatgccataggcgcttatatcttaccatactaattcccctttttttcagtccaaatgccgccacctcacagttggggattggaattcggaatttggaaaggagaggggaaagtgaaaagaaaaatttaaaaaaagagtaaatttcactttgggtcaccttttattaccagtatttcactttgggttacccttcaactaacgttttcacattagactgggtaatcttacatttgtttcactttggaccaccccgattctcttctcaagcatatgaacgacctcgagtacgccagctcctatttgtcaataaacctccttagctgtatttagaccgtttctttaacatatgacaaattagatgtagatgaataagagagttgagggtagtccaaagtgacacaatggtaaacatacccgatccaaattgaaaacatttgttgaagggtggtccaaagcgaaacaccggtgtcggagatatgggcccgggggtatgcaaagtgaggggaagttaccttcccatccagccacgtgactctacagtctagccctccccccacgcctcgggagacgcaggggcagccagggggcctcggggtgccatgttacgccccttaggcccccgcgttgacttgccccgaggccctcgcccgaccgccatgtggcggggggagcgagcggggaggagacccaagccaagccgctaccaatgcgcgcggtgccccaactgcccctcatcgcatttaatgcggtaagggcagacaaacggtgccgcccgactgatgcacgtcagtcgggtctgaccagtctgtgaccggcctatcgtcggtcacgtctgactggacaggcggccgtacccccacgtcgcctctgtatccggcggagtggaggtaggtatgtcctgtcacatcggagcgtcatccggagttctctccacgtaaggagagcagccacaagtctccgcccatttaagagcgagtgacagggctgtcccccatgtcaggtggggggtggcgccgggtgacactgaagggcggaccgctttttagcttccgggcgaaggcacgaatcacggtccggtcaaggtagagtgggtccccctcccgtagaaagagcaggtagaagcggtgcatgtggtatccccttgaactataaaagtaggaccttgtccaccgggaaggggaacgccactcagtaggcctgaactctagggaaagaagagcgagagtgctctccggagtttaggaacccttgtaacactcgaccataatctcacacacaagagtagggtattacgctcgatagcggcccgaacctgtataatcttgttgcccatacgcgattagcagcattcagggtggatacgcaatctcgaaaagcgagccttttcccccggccgaactcacaaaagggggatctcacgatctcccgctagagaggatcactcctcgatagctggcgtgccaggtagggggatttcgcgcgctttgaagacaagtcgttttcttctgccccaagttttcctccgccttcgacgatcatggtcgaggtattggaggaggaggtggcggtgcacacccccactagcgggagccgcggcccccgtcaccgtcgccgcaactctcagactccgccccgccgcgacccctcgcggagggaggattccacccggtcgggtggctcggcccactccccgcctccgggcggggggaagccacgtcgcgtcggggtgcgacaccgcctcacttatggcgacggcggctcgccccgaggcgcgcttcaggcggcgggtgcccttctacggcatccccccgtgaactcagggccagagacccccgtccagcgatggttagacgacgtggccaacctagtcaccactgcccagcggcagttggccgcggccggccggcccaccgctgctggtacatcgcgtacccccaccaccctctcctcgtcagcaaggaggagggcccatcggtcggccacggcctcgaggcgatccacggccccaacgtcgtcgggggcctcgggaagtcgaagacatcacgacggcctctacggggaacaggacgctcgaatcaacatcgagcgacgccgggatgagcgccgcgctgcccgcatgggagaaggcgcctcctcgtctagagtgccacgttcctcctcgcgaggcggcccgccccccacgttcaccttggagggactggttgtagggccttcgttgcgagtctccggaatgtccggtggcccccgaagtttcgccccaacctcacggagaagtatgatggcaacatcaatcactccgagttcctccagatctataccatgatcatcgtggcggcggggggatggggggggcacgaccaggtcatggcgaattatttccccatggctctcaagggtcaggcgcgcggctggctcatgacccagccccccgactgtcgcgaccgggaaaattgccttttcccgaacgctagtgtattaatccccgtcccaggaaaagccggggtacaccatacaaacatgatataaaagacacatctttattacatcgataatatttacattattacaaaggcacataaggcctgacaatcaaaaataaacagcagcggactagcgggcctacggctccatcttcacaggcgctcaactggggtataagccaggactccacctaagacatcttctccaaagcttctcttactgaagggggaaaagattgagcaagaatgagtacaaccacagtactcagcaagccacaccggcggatgcataattaatgcaagggaggtacaagggaataataatataggggttaagttttgcagtaaacggcatttaaaagtcacttagttgccccaaagccattttataaagacgatcctagagctacacagtattattaatcaaggccgtgaaccctcacgaacctgccttaacccaaggcctacgatgattcagaccgaactggcaacccgaccctgggtcccagctcgtcccaagccaacccaggccaaccattccatattttagttgttgagcaaattttaagaattagaacactgacttgggtacattgctcggcttgcccataaccgagggcgcggctattcgaatagattatactctgatcagaggtgtacatctttacccacaagacacatcttcctcacgtgcaaccacgtgccacataccaccacggtatacggacggaagacgtgacatagttcccaacccatcctagccataatcaagagtaccgacccaatcctcctacggccgggacacccgggacaggcaggcaggactgagccccctagcagcagggcaccaaccctctgccatatgacatctcgactaccgggccgcagctcgtgtagccttcatttgccctggagaatgtccatcgacccccgacttcatccatctccaatccgtgtacttttgtttatgactagattgagccacaaactaagccttacccactagacatgtggaagtacggtagtgctttgcaacagaggcccgagcttaatccttatagtggccggggtgctacttcccacaactggcatgcacccaaaccccaccgaaaataggttttaggggttttgaaagaggaagagaggtgtatgtccaattccaccataaaccaacaattcatagtgtccaggtgatatgaatattcccaaagtctaaaattataaaaccacctaatgttgtcctattaatcggcgaagcatctacctaaattcatactagtggaaccataaatagagtgtccactagttggggttttgtttattctagggtgaacaaggtaataataacaataacaataatagtatggtcctaacaaaggtaaataggcatggctaaataaaacagtgataacgcgggaatttaaataaagcgataatgcattaatttaaatcaaattaattttataaactgggattcaatatgctcaaggatgatgtgacttgccttgctcgctttcccaaacgacggcttcgacttccacgaagagcggatcttccgaagctgcagcgtctacacgaccaacggaaaagaaaaaggcttttactctaataaactccacataacagcagaaacaaagcacaaaaatgggttcttgacttcttaaggaaaaattagagacttgaacggtccaattccgagttcaaatggccaagatatggccatttgaagtttatatgctctttaaatggatatttgcgaatttcttcatttaatttttaattaaaaatcccatttattgcgtcagccgagggagcggcgcgcggaccgggtccacgggaagtggggcccacgcgtcagccccacggtccacggtggaccgggcgcacgcggctggcggcggtcggcgccgtgggtcccgcgcgtcagccgcacccgcgggcgcgggcggctgacggccgggcccacttggcagccgcgagggcgcgcccgagggcggcctcgctggcgcggccgacgggagcggcgcgcacccgcgctccgatggtcgccgccggcgaccaacggcgcggcggagtggcacccgagagagaggagggaagggggaaaacgaacggcggtcttcggctcaccccgggacaacgacgacgacgagagcggcggccggagcggaggaagacggcggcgcggttcgggatgacgatgacgacggtgctccggcggtcggcgggcgaagcggagcggcggacggggtcggcaaccactcggcgaagcggacggaggtgtcgccgagtaaggaggaagtccggagcggcgacggcggcggaacggagctcggcggcgatggcggagagagcggagcacggcgcgagcacgattccgacggcgagagcgagcggcgagcggcggaaacggaagagcggagctcggggaacgtttttatagcgtcgggagggagagagggcggccgggcgaagggggaaacggccgcgaaagatgcggccgccattgatgccggcgaggtttaggggaaagattccgagcgaatccgagggagagagagcgggaaaagtggggggaaatggcgagggaatcacggggagtaattccccccacttcaatgcgcgcggggacggcgggatgcggcggatttggcggcggcggcggcgctagggcacgggcgggcggcggctgcggcgcgaggagggagatgacaggtgggtcccacccgtcagcgagagtggcgggcgggcccgcctgtcagcggcgcgcgcgcgcgagggaggccgatgggccgcgggggaagagagagagagagggagggactgggccgagccggcccaagaaggaaaaaggggggggggggaaagaacttcttttaggatttttctttttataaaccttttcaactttgtttatttcttttcaattattatttgtgctctgaaaattccactaaaatttgagggctccttttaggccaaggagaatttaacaaaaattctccgggccacatttgaatttttcttgtacgtattttagggtttgccaatttcttttcgaattttaattaattctattattccttttagagaatgatttttatttcgggatgaatttatcaggacgtgacaccgactccatccactcctggaaggacctgtgccagcagttcattatgaagttccaaggcacgtacccctgcctaggagaggaggcggacctgcatgctgtgcagcggaaggctgatgagtccctccgctcgtatatacatcgtttttgccaggtccgcaacactatttcgtgcattccggcccacgcagtcgtttatgcgtttcggaacggcgtgcggcacaaccgcatgctagagaagatcgcctccaaggagcccaagaccaccgccgagctcttcgagctggcggacaaggtggttcggaaggaggaggcgtgggtctggaactcccccagcaccggcgcggcggctgcggctgcccccgaatctgttccccactctaagcggcgagataggaggggcaaaaggaagccggcccgctccgacgacgagggccacgtccttgcggccgatgggccctcacgggccccgcgcaaggagaaagccaccggcgacaagccaagctccaccgctccctctggcgagggtcggtcggcagacaagtggtgctcggtgcacaacacttatcggcacagcctcgccgactgccgctcggtcaagaacttggctgagcggttccggaaaaccgatgaggagaagcggcagagtcgacgggagggcaaagcccccgcgacccctgccaatgaccggcgaggggaggccaagaagaaggccccccagatgacagcgacaacagtgaggatctggaattccaaataccttagggaaccgtcaccactcttgataggggggcttgcgctcacacctcccgccgcggtttcaaggccatgaggtgtgagcttctggctgccgtcccaactcacgaggcggcacggaaggcgcgctggtcagagatgaaactcaccttcgaccagagcgaccatctgacagtgctcgctcagggagggaagttggccctcgtggtctcccccaccatccacaacgtcaagatgaagcgtgtcctggtcgacggagggggggggcagcctgagcatcatctcctcggctgcctttgatgcgctcaagtccccggggatgaagctccagccgtcattgccgatcatcggcatgaccccgggtcacacgtggcccctgggtcatgttgagctcacggtgacctttggcgactccaccaacttccgcaccgagcggatcgacttcgatgtggcggacctcaacctgccctacaacgcggtccagggcaggcccgcgttggtgaagttcatggccaccacccactacacctaccaccagatgaagatgccaggtcccaacggccccatcaccgtctgtggcgatgtcaaggtcgccctcgcctgcgcggagcagcgcactgataacctggcggcggccacgaagccgcaggccccggaggcctctgcgtcccgcgcttccaagaagcgcctcgcctcggccgatgaggtgcccgtcaaggagattctccttggcgatgatccgtccaagaccgccaagattggtggcaccttggacgccaaataggaaagcacgttcatctccttcctgcgggcgaactccgacgtcttcgcgtggaagccgtcggatatgcccgggatccccagggaggtgatcgagcaccgcctcaccgtgcggccgggtgcgtgacccatccggcagaaggtacggcgccaagccccggagcggcaagccttcatccgcgaggaggtgacgcggctcctggaggccggcttcatccgagaagtcatccacccggagtggctggcgaacccggtggtcgtcccgaaggccaacagcaagctccagatgtgcattgactacagagacctcaacaaggcatgccctaaggatcccttccctttaccgcgcatagatcagatagtcgactccactgcggggtgcgaccttttgtctttcttagatgcctactccgggtatcaccagatccgcatggctagggaagataaggaaaaaactactttcattactcctgtaggcaccttctgttatacaactatgccttttggcctcaagaacataggtcctacttttcagcgcatgactcgcattactttgagtaatcaaatagggcgcaatatagaggcgtatgtcgatgacttggtggtaaagacacgccaccaggacacattgttgcaggatttggccaagactttcgacagtcttaggtccacgtgcatgaaactgaaccccgaaaagtgcgtgttcggtgtgccggcgggcaaactcctcggttttcttgtctcctcccgaggcatagaagctaatcccgagaaaatacgcgtgatagagaggatgcgccccccagcaaacttagggatgtgcagtgcgtcacgagatgcatggccgccctaagtcgattcatatcgaggctgggagagagggcgttgcccctattcaagctcctcaaatgccccgagccgtttgtgtggacggtgcaagctctcaatcagttgaaagcttacctcacttctccccccatcttggtggccccggggccagagaaaccgttgctgctctacttggtcgcgacctcccacacggtgagtgccgcccttgtagttgagcgcgacgagggcgacccgcgttgtgagcccatctatgagaagggaccaggggcccccttgactggcgatggcccctcgtcgcccgacagcctggtgcccgaagcccccaacccccgggagggccccgaggcccccgtggaaggaagagagactctggcgggtggccccgaggcctatactcccgacatggcccgagatcccccgaggcccctgagcacgggcgccccgggccagctgcccctaacaacaaggaccggccccactagaaggtgcagcggcccatctacattgtcagcgaggcactccgagacgcgaaaacccgatacccacaggctcagaagatgctttacgcagtcttaatggcctcaaggaaattgcgccactacttccaagcgcatcggatttccgtcgtgacatcttaccctctcggccaaatctttcacaaccgggaggggaccggtcgggtcgtaaagtgggccattgagctcgctgagttcgacctgcactccaaaccgcggcacgcgatcaaaaaccaggttctagctgacttcatcgcggagtggaccccggtggacgaccctgttccgtctaatgttcccttcctccccggagacggaggagacccaaacgccgacattcgcgccgggtactgggttatgcacttcgacggctccctccaccttcagggcgcgggggtcggagtcacgctgacttcgccaagcggggatgtcctaaagtacgtcgttcaactcgatttccgagccatgaacaatatggcggaatacgaaggactcctagcaggattgagggcggtggccggaatgggcatccgacaataatactcttcctgagggtcgcgcaaaacctgagaagctcacgcgtatctctaagcaatacgtgctcgtagaagggaccctctaccggcgtgccgccaacgggatactcttgaagtgtatttctcgggagcaaggtgttgagctcatcgccgacgctcatcagggtgagtgtggggcctattcggcctcacgcacattggtcggtaaagccttccgacaaggtttttactggccgaccgcgttgcaagatgccccagaatgggtctggcggtgcaaggcgtgccagttccacgccaagcaaacccatcagctggcccaagccttgcaggtcatcccgctctcttggcctttcgcggtcttggggctagacatcctaggacccttcaaagcggcccaaggcgggtattagcacctgtacgtcgccatcgacaagttcaccaaatggcccgaggcttacccggtcgtcaagatcgacaagcattccgccctgaagttcatcaggggcatttcatcccggttcggggtgcccaaccgtatcattacggataacggcacctagttcaccaatgagcttttcggtgaccccaagagcaacggccaagtcgagcgagccaacaccaaaatcctcaaaggcctcaagaccaagacgtacaacgtcctaaagaagcacagggattcatggctggaggaactgcctgccgtgctgtgggcgaatcggaccactccaagtcgccccaccggggaaacgccctttttcctggtctatggtgccgaagcagtcctaccttccgagctctccctaggttcgcctcgcgtcgtgctgtacgatgaggccaaccaggatgatcttcgccgtgacgatctcgactatttagaagaatgcagaaggcgtgcaaccctgcgagcggcgctaccaccagcgccacgtcctggcccgatcactacaagtcggcgacctcgtcctatgtcgcgtgcagtcgcgcttgggactgagcaagctctcaccaatgtgggaagggccataaaaagtgttggcgttccccggccgggctccgttcgactaaccacgaggacggcacggggttgcctaacccctagaatatcgaaaacctccgccgtttctatccatagggtcgcgcgtctttcgctttcatggtgctcgggccaacccccgcacatccttcggcttgtgcgggcttggcctggggctaccactgttaaatatgttgtatcttgttccttccccagcaataaatttttctgctcaagtggaagccgttgtgtaccctttcttactccttcctatggcttgtccgggtttaaaggacgattcgcgcttactccggaccctaagtggcattgggcggcctgaaaaccgccgaaagggagcctaaacgcgggccgcgccccgggctgcggcgaaccctgggggctcggaagggccttcacacggccatccccgacccccggtcgccgtagccccggtttggccagacccgctgggcagctttctcggggcgacggcattgcccctcgccacctaggtaccacggaccgagcgtgagtttcccttttcaccagaacgagcccgaggggggtataaagggggtaagaacgacaacttaatcataagaaagttaattgaatacgttcgctttggtttttccttctctccttgccgcagacattgaaaggcggaagcaagaacgtaaaggtgcgaagggtaagctttatttgcaaacaggatggcacgatggcctaaagtttgaagcgttcaccgcgagtacataaccaaataaaagaagaaaagcggggatagtcacggagtgcccgggcccctgagtccggcgccgctgaccacctcgtcccagtcctcgccgccatcatcgccaccaccgtcctcgctcccgctctcctcgtctgaagcaagcgcgaggttgaaccgaggggccgacccgtcgaagctggagacgattacgtcggccgcctcccagacttgctcccgagccctcgcctaggtccccggggggaagtcctcgagcgcgcgccacgggaggaagtcgttgtcacgagcttgatgacttgcgaggaccagctccaccatagcctgcgccaaagctgacgacgacttcacggtttcgccgacctcctcctctagcctctccaaatccgccgccatcccatccagccggagcacgactgccggctgtgtgggcgggagtttcctgtcctggcgcacggagatgcctattcggcgccccgcgcgccccagccggtcgacggcgtcggagagttggccaggtccaatctcgttggtgaggcgaagggctgtgatctccccgacttggtcctgcaccaggcgccccaggtcggcgagagtgctttgagccgcggtgagctggctcaccaactccgcgccagcgagttgcccgcctacctctagctccttctcctgggcctccagctcggaagacctcgttgccattgcctcgcgctcagcgcgggcactttctagatgccgggcctcgtgcccggtaacggcctcctcgcgcttcgcgagttgctcacccagccagcgcgccgccaccccacggcggttctcctcggcctcgcgtacggcaagcgtggcgtcccgttcctggcatgcctcctctcgaagccgcagctcctccgcgcgatgggccaccgaagcctctacggcaagggtggtccggttgcgctcggctgcggcctcctcacggaggcgaagggaggactctgcctcggccgccgttctctcgtgggcggccaaagtggtctcgcactggtctagcatgcgcgcccgctcttctagtgcccgggtatgctcctccagtgcccgagcgtgctcctcaagctcccgggcttgctgcgcctgtttccagctgcgctcgtcctgctcgcgctggttacggtcaaggacctcaattcgtcgatggatcgtggcctcgaactcttgcgcggagcgggcacgctcgtctaagaccttgcgctcggcctcgagcgccgccgactgagcccgcagcgaggcgtcgacctccgacgcccgccgctcttgggcggcagcagcgtcgaggactccgcgggtgtcttcgactctcttcgccagatcctcggcgtgggtctcgtactgcaaacggatgtcgcccagcgcctcatccaagacgctcgaggcgatgagcgccgcctgccgctcctcctccgtctcccgcatgaccgagtccagcgtctcttcacgcgcctggatctccgccggttgggcttggcgcattttgtgccccacctccaccatgtcgtccacggcgcggcgcccctcgtcaacccgtgcgcggtccgccgcgagctgcgcccactccgcctctagggccgcccgctcgtccgccagggcttgaacttgggcattgagcccctcccagacgatggagtcggcggcggcgagcacctacaggagtggctctatgctcgcgggagtcagggaagaaaaagtcacggtccgcccccgagatgacagagtgctgctggaccccccgcgggactgggggctgctctcagccccccttccgcgcggccagccccgagggcgccccagatgcagaggggaacagttgcccccgtcacccccgcctcgggccctcgggcagactcggcctcgacctcgacctcgggttcgggcccgcccccggcctcggcctccgggtcacgccctgcctcggcccccggagcgcgttccacctcggcctccgggccgcgatcgcttcggcctccgcccccgagtggcgctcctcgtaggtcgcaccctcgggatcggccctgggggggacgccgccaccactgccatcgcccgcgaatgggtgcacctcggctgtggcagactcagagccaaacccggcatgtgtcctgtgggccccgccagggtactgcgaaggccccgtggcactgggtcggccgggcccctctcgatctggtcgctcagattttgacccctgcgagggatcggtcgccgagaccccctaggaaggaatcccactacaggaggaccccgatcacgttaagaaaaaaaacagaaagaggaaggaacaggagcccgagatggatagagagcaccgagtcggatgttggcgatcgtacctgcgagggggggcgtttgaaggtccacttcgggggctcgatgaaactcccccggcacggctccgtttgccctatcttccggagccgcttcttcttccttccagcctcggacgcggcggggcgcttgtggcccgccggcggtctgtccgccactcgctcagcgccccctccgcgcgggggagagggtggccgagattcgaacatcttccgtttccctttcggatcaccggccgaatctcccccgggcccacggctcggaccaggtgccctgaagtcgccgtccccgccggagttgccggttcggctgccgcctgcggacgcgctgctgctacccgcgccgacggcgccgccaccggcgccgccccgacgggaccgacccctgccggcgccgacggccgacatcacagccaggatactctcccggtcgcggaagctgcataaggggaggatcccgtccggagtcagcgtttgctcgacagtgtccaggcccagcacccgccggatcaccgtcttcgcgtcctcctcgcccagtcccagtgctcacccacatgggtgcgcatgggatcgttgtacctagtgtactcccacgcgccgcgagaccgctcctggagaggcgcgatgcgacgacggaagtagtcaccgaacaccatcgcccccgttaggccctggcttcgcaggcccctgaggcgatcccgcactgcgtcgtactcctcgcctagttccgaaactaccaaccacgtggcggatcgttcgggagggccggcggggagccgaagtcgtggatggtccggcagcgcggtgtagaaccaatccttcttccaatcctcccacttcttgcataggtgactctcaatgtattgccccgccgtgcccggccggggctggaagcagcatccccccaccaccgcgccttgcagcagccatgggacgaagaaggacaggaactgccgcatcgtcggccgcaccccgatgaacatctcgcacaagtgcgctaagatggccagagtcatcacgacgttgggcgcgaggtggaaggcgtgaatttcgtagaaatccaaaacctcatggaagaacctggaaaatggtgggatcaaccccaccatggcgaaggacaggaggtgcacggatcgtcggggtaccgcggccgcagccgcgactcccccaccctcacggcggcatcctccggcatgatcttgcggatgaggctaaggtgcctctccgccgtgatgcgcaatgccggaaggacggcgtcaccagcgtcttgggccatgatggccggcgggaaaacggcgaggagcttggtgtatggagcagggtggagcgagaggagcgctagggctttaggagcgagtatgcgagtatgcagttggcgagagaaaggggacgaactctccgcctccccttccttttatccacccctcgcccgcactcgcctcctcgtttcacacccctacggttgccccctcgattcctgcgcctgcggttgcctcctcaaatctcgcgcccactcatcacgttgccccgcggagcccgcgtcccgcgtttagtgcgcttgtcagcggcacactcggcgtggggcgtgcgatgctcacaggcacggttaggcgggcccgccattggtcccatcgcatgcttgacaggcgggggagtcgaggcggcgtaaatagcgattctgggcatggtctgaccaaacccccgattttcgcgccctaagtgcccccatcatcagcgtggtcagtggcggtcaaatcgccattttggctaatgtgccatcctggttgccgccggcaaccgtctggagtcctcgtcgggcccacaacctcggcacggtaagtcgtgaggcgccacgtcagactgccctcaggggaccaatgtccgacgtggtgccgggggctactgtcggagatatgggcccgggggtatgcaaagtgaggggaagttaccttcccatccagccacgtgactctacagtttggccctccccccgcgcctcgggagacgcaggggcagccagggggcctcggggtgccacatcacgcccctcgggcccccgcgctgactcgccctgaggccctcgcccaactgccatgtggcggggggagcgagcggggaggagacccaagccaagccgctatcaatgcgcgcggcgccccaactgcccctcaccgcatttaatgcggtaagggcagacatgcggtgccgcccgactgatgcacgtcagtcgggtctgaccagtctgtgaccggcctgtcgtcggtcacatctgactggacaggcggccgtgcccccacgtcgcctctgtatccggcggagtggaggtaggtatgtcctgtcacatcggagcatcatccggagttctctccccgtaaggagggcagccacaagtctccgcccatttaagagtgagtgacagggctgtcccccgtgtcaggtggggggcggcaccgggtgacactgaagggcggaccgctttttagcttccgggcgaaggcacgaatcgcggtccggtcaaggtagagtgggtccccctcccgtagaaagagtaggtagaagcggtgcatgtggtatccccttgaactataaaaggaggaccttgtccaccgggaaggggaacgccactcagtaggcctgaactctagggaaagaagagcgagagtgctctccggagttttggaacccttgtaacactcgaccataatctcacacacaggagtagggtattacgctcgatagcggcccgaacctgtataatcttatcgcccatacgcgattagcagcattcagggcggatacgcaatctcgaaaagcgagccttttccctcggccgaactcacaaaaggggatctcatgatctcccgctggagaggatcactcctcgacaaccggtaataaaaggtgacccaaagaaaaaattactctaaaaaaatgaaaaagaaaagaaaagaaaaaagaaggagaagagatcacagcagagcacgcacgtagcaacacagcaaagcaaaggcattcgatttcagagacgcatcttcgctttttgcctcggcgtcggtgctccacggcggcggcggcgggggcggcgccggagttccaccgcgcccgcctacatccgcgtgtgtgagagagagcggctacaaatggcctccgccgccgaggaggccaagggcgtggaggaaggaggaggaggagccagcgccaacggcggcgacaaccccgccaccgccaccgcctccgcctccgccgcggccgcggcctcgtcgtcttcccccgctggtgatccatccatccgtaccccccacaccccgcctgcctctctcctttcgtcttcgttcgtgtagctttgctgcgagaggcaacctagggtgttgggattggtggcggttgctttgccttccctagttcagcttcgcccccccaaatctgcggcggcttctgccatctccgctcatgtggatggctgctagttgcgagcgcaccttcgccttgttggtggacactctgatggctgcttcactgtctgtgtcacgctggttgctgggaatgctgcgtgtgagggtttggtgtgggggtttggtgctgtgttgagtgctaattttaggcgttgactccacgactagtgggtgatggcctgccttctcctagattttacctttctgaataatggttttctcaaatctcttcacaaaacgaagccgttttggagggttagattacatcgaaaccccaatgaactaaacttattgtaattttgtttacactgtcaagcaggttgtgctcttcagctctggttattacacaatattgtaggtccattgcacagtgtgaaagtatgctttactcactactcagggtaacactgctaggcttagttgtaccatgtggcttgtgagttgtgttcaataggattatgcagtggtgtttatagttgtatcattttttaaaggataatttactgcagcaaacctcaaatcatagtgcaaatatatcttttgttgatacattttaatctcactttgttcagtaagttatgatagtgtaaaataaaaggaatgttgtcatccatatttttcaaaccatcattatgtttttgtagatgacaggggcctccccagatcaagcactatgccaggtgggattaataatgttgaaataaccaatgaaactgctggtccatctaatctggaaagatcaagaacagagaggcgtcgacaaaacaatccagctgatgatcctactaaacagttatttgatgataaaatttccctaaaaaagaaggtgcggataacatagtcctgttgcctatgtcttgcctttccttcatttgcaatgcaccctgtttcatctatttacccttgtagcttccttttcttcatgcatttgacctttgaaatttggagcatgtatatgttcatataagagaagccattttgaacagtcacgtgaactgttagccttatcttctgagcgcggacaagatagctatatctgaatttgatacattttagtataatgcagcattgtgaaaaagggctaggagcctgttgcagaggtgagggctaagatagctatatctgttaaacgattatgtgtgatactgctgattaatcagaattttgatagttatgctctactaatttatttatttataactaaagtcaattaaaacatgaaaattatgacatgttataaccacttaaaaacagcacttgctaagcttgacatgttgtattttgtgcttcactgcttcatctccaaagcaaacactactacatgagatcagagattagttcactgtaattagggagtaaagtctattttacgattaaacttgagaaacattccaactgattgaaaaatagttgattattcagattattatgcagccaattcagcctttttttcacaacaattgtgtattgtgatacactgcatggtagcttcgaatagtcaggaactcagtgccagatgtactcttttgtatctggatgcttgatgttgttcaacagttttttgtgatattttacattttattgtagctcgaaatgctaaatcggatagctacagtgaaagatgatggaactgtggtggttgatgtgccaagttctctggaaacaagtacaactgatggtgtagcatatgatggctatagtgatgttactgttgaggaaccattggatggagcagacatatctgtgaggcctcctatggatattgttattcttattgtgggcacaagaggtgatgttcaccattcattgctataggcaaacgcttacaggttagatcaaaagctaccattgtttgttaatttcacattattttatctctcatcaggtgaactattttgcttctcaagcttaatgtttctaaatacatggtttctgtatgactaggattatccattacctgttttttttaggattatggacaccgtgtgagattggcaacccatgcaaactttaaggagttcgttctaacggctggtctggagtttttccctcttggcggtgatccaaaaatacttgctgaatgtatgaaaataaatccttgtattcacatagttgattttttttcagtttctacgtcacgatgattaatatatttggtatattcatatttgagcagacatggtgaagaataaaggattcttgccttctggtccttcagaaattcctattcagaggaaacagatgaaagaaattatattctctttgctacctgcgtgcaaggagcctgatcctgacactggtattcctttcaaagtggatgctatcattgctaaccctccagcatatggtcagtatatcttaccagctttggattgatttcttgcgctttgctttactttctctctaccttacaagtgtaactccaagtttgtttattatatgctcaactaagtacctactactctaaaaaacaccaatttctgacatactcatatacaaggttgtgaggatcaggatccaaggcaggattttttttttgtcctgacatgcttggagtcttagtattgcactgtgaaaattgttactgtgaaggttatatgttataagttactaatttgcatggtcgtcagaattgaaaagatcctatgcacgttaggatccaacgggatcagcgtcatcatattttatggtccagtcaagatcatatattttttaaaacgaaaagatcttaaatttttataagtttgctcatgtacaattctttcttactgcttcaatttggtttatttttctgatttgaggcatccatttcagaacaatcatttcttgattcatgccttatgatggtggtgcttttctttggtgtgcaattaataggcagactgacctagtaatatacttgggaagttgacatctttaaaagctctttctgtttcgccaatctttctggaggcatctcttttcaggatttttctgtgtttatcactttggaaccaatcatagtcatttccagctcaaatgattaggcaatgatgtgtttacaaggtgctctagtgtgaatttttttgcatgttttgtattttatggtccagtagccaattgcaattcacttctatgaaaatttataaatgtttctttgctgctgaccttaacgattattcaggacatactcatgtggcagaggcactaaaagtacctattcatatattctttaccatgccatggacgtgagtcactattgttctgcttcctctttgaagagcacatttgctgaggaatattctcatttggagatctaacttgtgctgcttgttcaggccaactagtgaattcccccatcctctttctcgtgtgaaacaagcggctggatatcgagtgagtttgcatcttacatatttattcaggaaatattttaaacttcttctcttagacacatttgttatagttgctcaatgattaaattaaccctaccggcataacccagctgtgttagctaaacctgattttgtttttggcagcaaacttagacagtttaaatgcaattgccattaggctagatatgtggttttgcttcattaacagtagaaaaaacagaatcattagtgcttatattgtggtggttagcttactctatgccttttttggtgggtagcttaattataggtttgagcccataaccatctcttaatttgaaccaaacccacagcattggcacatactacaaactaatactgtggtgtaggccattctggatcattgtaaatttcacagaaaggataaacaacacatacttgaatgatttgtctgggaatgccctttctaagcctcatgaaagaacaaaaagagatatgagtatctatggaaatatattctaagaacataagaaagaaaacactctgctgtttgctgttatacattttcgcatttatagtttaagttcaatattttcaaggtcagtagatctttaatccttgaaccttatagttgatttagaggggtatttctgatttgggacatggaagaatagaagcagcattctaagggctttagacatttcccatttttcatcaaccgcgtctaattgattaactatcatattttgtgacacttaggcttattgaaaactgcagttggttttatggcataggcctcaggaatacttctttttggagtaagcaactaagcatagcgttaatcatatgttagaaaatggcaggcaaggattgatcttcgatttcccatttcttagtcagtatgctaattgatgaactgaaagaaatactacaaaaaaggttgccgggagcttacattctcttttaatcaatacataatgatccttatactattaaatgcggcagacactgcagggaggatagctggcagtgtcagctgcttgtgatgagagaacattatatatgacgaacacttagatgagattagattttatttgttctttcttgcgttcgattactatatctggctgccttcttaagtaggtgactaacccataattaagcaaagaccttatccaactgaacaatgtgccaacagatagattaagatgcagaacacctggctgtaatttgtttggtgtccagatggctagtctgctggccatagccatgtgcacgcttgtgcatatgtgtaataataggttgtccttaacatgttcttgcccacggatgtttctgaactattcattattacatttgttaatgccagagtaaatttcagaaagtgcaactattctgtcaaaactatcttcaactttagctgggcatttcaaggaactgcaaaaagtgtaggttttattagagaaccgacattctgttagcaacatgcaatagggcctttacagattgggccaacctattggacacaaatggggatggagttgcagttttctgataaaattgtgcactaatgttgcagttttctaaaatattgagctaaagtttatcagaaaacagagattggaaggagagggagaaatcaggatgatcaggagagaagaaaaggcaaagaagaaaaaaaaaagagaaaaaaaggcttgggaccttgggttgggctgggccgggggggggggggtctacaatagttattttaaactcatgtcgaattggatacgtaccaaaattccggtggaaacatcttcaatttttataatagtagagatatttgaaatggcttgaactgttattttgtaaatggcaatcagacaataggttttgttgtgcttactttgtttgcattgttgtgcatctctgggataggatcccaactctgacaattttggcctgcctgcttgtgctcgtttgttgttagactgatttgggtggtaaactcaagtgagttactgtatgcaaaaagttagtttctggcttcattcaatgtggctggtgttcttgggagtg

SEQ ID NO: 7692 - DNA, 55792 bp, Oryza sativa
atacatttacattggttgatgatcgaacaaagagtgtgctgcaaagagcctttttctcattgggtgcttgcatcaatgcttttgtgcattgtcgacctgttctatgcatagatggaacttttatgacaggtaaataccgaggtcagatattgacagcaattgggtgtgatgggaacaaccaggttgtacctatggcttttgcatttgtagagagtgagaacactgaaagctggtactgattcctagagagagtgcacattgcagtggtgcgtatgaggcccaacgtttgccttatacatgatcgtcatgcgggtatgttgcgggctattgactacttgcagaacggttgggatgagaagggacttccagctaagtggcctgatgttcggagtcggtggtgcatgcgtcacatgggtgcaaatttctacaagaaattcaagaacaagcatcttatggagctctttaagaggctctgtgcacagaaccaagagaagaaatttaatgagttgtgggacaagttggatgagttgacaacgaagcaaacagatgagcaatctcgcagaccacaagttgaaggtgacgagcctcccatacctcttggtgcattacatgatgacccaccaacaatgagaaggaggtcagggtcgtccatcagaaatttcactcagtggattgagaatgagcctaaggagaagtggtctttattgttcgacaccgatggatctcggtatggcataatgacaaccaatttggcagaggtgtacaactgggtaatgcgaggagtttggatacttccattggttgctattgttgaattcatccttcacggcacgaaagcgtactttagggatcgatacaagaaaattggtccgtccatggccgataacaacatagtgtttggcaacgtagtgacaaagtacatggaagataaaatcaaaaaggcacggagacatagagttgttgctcaaggcacacaagtgcatcggtatgaaataatgtgtgttgataggagcaggcgtggtatctatcgcaagcaagccgtgcaggaatgtgtcttgaaggcggatggtggatgtacctgcagttgtatgaagccgaagcttcatcaccttccttgctcacacgttcttgctgctgccggtgattgtggcatatctcccaatgtgtacgtctcaaattatttcaggaaagaagcaatctttcatacatagagtgaggagatatatgggttcgggatctcaggatcttacacaacgctgagtgcccaagttttttacattccagatccatctaagttaagggtgaaaaagggtcgacaccaaactagacgcatcagaaatgatatggatgagtcagaagcaggtgggaggactttacgctgcagcaagtgtgatctgcgcggccatacttacaagaaatgcccgaagaatgcagaagttccaagcggcgcagatgctagtccatctggacaggcaagtgatggtaggcgaccacctggtgaaggaacaacaagcaggcgcgcaaggccaaggcgtcgtcgcgcagcaggcgattccatggtgtaacaatgctatcgatttaggaaataaaatgctgttgtgatgtgatgagtgttcggactaaatacttgtatcgtgtaatttcaattgaatgttgttgtaatgagtacctccgactattgttgtactagtagtattgcgaactattcggtgttgtatcataatgttatcgtgatgagtgttcggagcgtcgatccctcgcccacacggtactttactttttattaatactattaaatacctgtatgaaactgatggtccttgtccagcaggatttgcagccgggatcttcggtactggggcctcttcgtctcacgccggtaggactggtcctactagccagttctacgacgacgacttgcacggtgcacaccaccacgacgtactaggctcttcttagcttggaggagctccagaggcgcacactcaggagcagccagaggtcacacctgtacaggcaggacgggttggccgtgccgtacccccggaccgactcacgtactcccaggggcacattagggcgcagggtaggagggacaggggtgagaggcctcgtcagtagtgttctacctcttcagtccttatgtgaccgtttcttttggcttacaaacttgtaaagcagtactacttttgctattactactgcagtactacttgtgtttgtctcgtctacatagttcttttcattcatatggtgctagaacaacttatgctcacgacaacacactttcggcgcttcacggtagtgtcagatccagtagcgcgcacagtccacaacagcacacatgaaaagcggcagctcgagttgttactatcaactttcggcgctgcctgttgacataaagtgaatcacgcccactcgtgatcgtcttgtcacatctaatgaataatgtatctcattgagttcacatatattgcagtgaaaacaacgctatataactgacaatctgaaggcaacctcttcatatcttctttcccactagcacacaacacacgaaaatggaagcgccattccttgagcgtctcaactggcgaagcgatccttttgctggttggtttccaccatggtgtgaccgtcctttgtgcgattgtggggatggatgcatactcaagtcttccctcatgatacaaactcggggcaggagattcttccaatgcgcgaactttcatcaggtatgcttcatctattcgaagttcaaatggataaaaaaactaacttcttcgtacacaattgtaacatcttacgcagacatatcgtccaatgtgcaactttatcgagtgggtagacatggagaacccacaaaacgacggaacccgtgcttacccacgtagtgaaacaagatcggactacctaaggtggaaggatgagcatgaacgtcgaattgctgctgaggctttagaatggcacgtaaatcccctaggactccccacgtggcgtgagcgtccggagtgtcgttgtggtgaccgttgtcaggtcataaggtccgtaaggcaccgaactcgaggacaaaggtgtttcttgtgtccaaacattgtcgacgatgatttcgtggtaattacaactattcttttcatcactcctcagtactatcattaacttaactatcccaaaataaatgtacataggaggatgtaaggaaatgtcaattcgtacaatggattgacacagtcagagttacttcaagtggcgggccgataacgcaacctgaaccgaccatacagttcattcatgcttggatggagtacgaacgttgggtggaaattgcaagcttagactggaggaacaatccattagggttacctaaatggtccgagcgtccaaagtgtgggtgcagagatcgctggcaggtggctacatcctttgctgaacaaacatttcgaaggagatattttgtctgccccaatgtagacaacgatttcgttgtatgtctaaccatttacaaaatccgctatgatttgcacaaaattactacccaaactgaataacattactattttttacagggcaatccaaggatgggtggatttactcgatggatcgacaatgtcactccatcatatcatggccagaagataacagagtcagaaacacaagtagagtatcaacgattgaaggaccacgagaatgcaatgcattctgaccgacctagaaggtgccgataggttaccgcatgcttgattcgtcgggatcgacaaatttgtaccgtgtatcgatggcacttcttatctatcttatcattacaatgtttaattatggtggtgatttttttgtatgcgtaagactaagggcctatttggattgctaccaaaaacatgccctaccaatattttggtaatttgaatagtacttgtgtttgatttcgattgaagcctattcattggtaatacgtaatctagatttgagattatgtagaacattcttcactacaattttacattttggcagcaaaccaaatatgatcaaatgcaattttaccttaccaaatatttggtagtgccaaaacttgcttatattttggcactaacaaaatatttgtacggtaacattccaaataggccctaaaaaataataaaattgtattttaccagtcttggagattttaatcttgtatagttttcaatataaaaagatttgataactattgatatttatacaaaaatataaagcacagtataaattcgccctcccccagggcggcaagggggccgcctgcaaaattccaggccccccgccgcccatttgcaggcggccccccgcacagtacaaaatcgccctagcggagggcggcaagggggccgcctgcaaatttcgttgacggccgtcgcccgagagcgaacggccgtctgccacgtcactttcgccgccctctgggatggtgatttttaaaaatcgccctcccagagggcggtaggcgaccacttctgtcaattttcaaaatgaaaaattatttttgtaaaacttttaataaaaaaaattaaaaataaaaaaaattcgcgcttctgggtactacaccggtcagggtgttgggctggactatttgcatgggctacattggaggcccaatttggccgaaaagaaagtggagcttgtctcaactcttgtccaaacagatttcagatgtgcactcaccagtctcattgtcagagcttgtctcaactctttcatggaccagaaaggatagtagtgatgatcctctagggtgtccaatagggaagatacaagagcaatagggaaaagaagaaacatttcagggataacagtaattcaatgtgcacctaccattgagtgtttaattattttttttgtaaaaaaaatcagttgtaagatggtttttcagtgccttctagattcaggatcattcgagtgagcattaaaagatggagatgaaattatatattcaagagaataaaataaagggatgagctcccatgtttgtttgtttttttactggcaacagctattttcatagcttgtgaatttccatttaatagtcatccacgaattcttgatgacatgaactgtccttatatccaaatcaatgttattcagtaaaaaaaacaaacaaacatgggagctcatctctcaaaacatgcaatatattgaaaccctatccaaattagacacgccctaagctagtaaattgaatctgccacctagtaagctaaaaatgggactacgaggaaaacgatttttgtggacgaggcccttccatttttccaggtggataagtttttttggcaccatatatccgcctgtgaaaaaaattgattttcgcagacctttttctacaggtggattggcagttcgcctatgaaggcggttttcgcccgtctggcaaaataggttttctagtattgtggtcacatgattccatgagatcaaattaatactcaccatctgtactcaattgacatagcctattcgtcagttcaatgtcagcgaccatgcattttggtagaatcaaagattgacaaaattagcacaagagttcctgatgcctcctaggcctaccactgcaaaagccataggagctagcagactgcatgggctaatgtatgttcctctcattgcttgcagcatttgtgtgcttctccaccctgcatgcccttttatggaccaaaacatatcatcatgcatatcacaaaaggatgaacgacgtaccatttgattccatgcatgcagttattcagtgccacatggcatgtgcttgtgttcagatattcagttgatcaccttttctttatcgcatgttaccaatgaaaatatagttcactccgtgagttaaccaggcaaggtgttgggggagtggctccggattgaggagccatcctccgaagggttgaagcgctccggagaccatcctcccagggagatgaccgtggatcggggccatgtcggtccccgaccgaggtggccgctccggaggctaccaaggatcccagataatcggatcccgtggacggcgagagccccggagcctggaagggatctggagatcgccggaagggctccgggaggccgtaacatccgtgggctccggagccccaggaagcatctcgagctccggaactcagagggtttccggagcctagcaaaagaactccggaggcggccagggacttcggagctccggaggcctccgaagctcgagatgctgcccggggcgaatcgagcctcaatatgccctcaacggctcaagttaggaatcaggcgactagtgggttggaataaatgcacactttgcgccccaaccacctctgagactgtcgatgatgaccagacggagcacgatattacccgggggatgcctttatccaggtaatagcgggctccctcgggaaccggcgctgctaccttaataggcgcctcctccttgtcacctatgagattactaatagacccagggctgacccattggccagcacctcagattcctcataggcctaggggtaccgaagtcatttcctgttgtataccccatgtattaatatgtaaaaaccgctctcatttgggtggattgaatgcagaggaatatatttacatttgttgagttcttgcaacaactccaggcatggaacggccatcattgcggtcatttgttgttgttgtagacagagtttccctggaactacagcgcacaggcctgaactaacaaaagaaaaaggaatggacggagtataatacatgattactcttcttctactgttctacatgtgtacgtattgatgtgttaactatattttttatcaatttttgtctatgaattgatggcatatatatactgatgtacactacattatcagctcaagggctcgacggtcttgatattttattaactatttatttctttggatttttaatgcatgccatattaaaattaataccacacaaacaatacttaactcgttctggagttagcgacaatgctgtttggtaaaatcataggttgcccaacctaacacaagggctccggtgcctcctaattaagcttaacacgtacggtaaaagccacagaagctcacagcctccatgaacagaactagctagctctaattgctccaagcaattgtgcttattcataaccagctcttttatagacaaaagagagataaacatatcactcaaggatgtattgctgtttgattacaggttgttagtttttccatgcctaaatgttgttagttaatctacctcagctcctttttacttcgcattttgttggcaaaaatatagtccaccgcgctgaactcaggaacgtatataccctcgaagagctaccgaatgtgcatgtttacaaggcaaggcattgccatcgtcgccatagatggtagacacttccatgtaacaaaacgaaaaggcaacaacaaaaatagacctgacaaactgaacatgcacaagatgagtatcagagtcatcagacgtgaggtcgttttgtttaattgttagaatgataaatcaaaattcggtggtctattctctgttcatgtcctgtacttgagtaactgaaacaaaagcagttgcctttggtcacaaggcttgataaactctgcctttcagaaacagagtacagagtgttatgtgtgcagttaagaaaaaaccagatcgaaattcacactgatgcatcattccattaagaaaattctcagtagttgcctcatacaagttaaacactgcaactcttcgttaaactgtctgtttcgcacatcgagctcgtgcgctttcagtttatgaagagctgcaagagagagttgctagtgttctgtgtccctcaatgccacgtccatgacttcacgcactatgtcaacttctgctcgatagtggaaagctcccgatgcctcctaggcctactcctgaatgtacaatctggtcttgtttaaacgttcacatacattcgtttgatggtattttataaccatataattttttttgcgaaacatgatacaaactaaggcgctcatataacaagaaggacggacctgccacctgctaacttgcataatctctatcagtctctcccattctgtagttttgcccctttctacacttctcggaattcaaaatatgcgacatggccccatgatctcacatactacacatgtgtactcaattgacccattgaacttattggttcaaattcgaggtcataaatttgtaaatcatgcctttttccagaatcaaagcttgatgaaggtaccacaagagctcctgaagcctcctaggcctacaacaacaaaagcaacaggaacagagtttttctattaggcctttttcggtacgttgggatattccttccgggggaaatcaaaccatgtggggagtcggggaccgcgttgatctccatttccacacccaatcccctccctcccaatcgccttccatcccttagcttgtttagattgcttggatggacagtggattggaagggattgctactgtttcaaacaatcaaaacaagaaaatggcagggaaaattcgaagaaaccagaaaattcagaaagactttatatatgccgctctccccaactccagaacatggtggtaacggttgccaaaacaattatatgtatgataaccattaattatgcattctcttttggttcctaattgaagtctttcctgcaatcctgctggacagtatatactgcatatgactcttccagttgaacaatacttcagaagaaaatttagggaagacaaagtacaggcacacaactagctatgactttctcgtgattttcttcattgtactgatggaaagaatagtagtaggaagaaacagccataacgcccctatcttattccagagcaaaaggataagcaaagcaatattagacacatgtaaagacatatatagatcgtttgagggttgttgagccgtccaaaatcatcagcatttcagtgggatgagatcactcattttcccttcaccctaagacatacgttaacctgtacaatacataatcaaacaaaattaaagtacacatcaaatcctagccatttcgtccacaccaactattgagctgatcactgaaagaaaggaaaccagctagtttgcatagcttgcaaagaaaaggtatagccatgaaaaggattctaaattttgctcagcttgcagcctttgcaccgataatgctcagccatcagaaggattccagcgtttgcatatggaagattgccgacgccattgttgttattttgagatcaagaacatggagcccttctgctttggtgaatgcatagaacttccctggcaagaaggccatgtctgaactctgaaatcgtaatacgcttcagtgcatataattccatgtggccgtgtgagtatcctgtttgagcaggagatgatggtgaccacaacaatgtgtaacactggtgatgtggagattgggttcagtagggagcagccgacatatatcatcgtgaatcaggaagatcaggttgtcgacggcgaagcagatgggagcaccaccgaggctcccatcttcttcgtcagccacggctgtgacggcggtggtggcagcgggtggctcgcggtgtcagtagtaccagcctggtactatactagttaaggtatggaataagttcacttgtggtcccttaacttatcaacgaatccaattttcgtccttcaaccggaaaacattggaggcccatttaagatattgggctggactatttgtatgggccaaattggtggcccattttaccccaaaagaaagtagagcttattgtttggactaattaaagagagagagagagaactacaatggaatcaatttaagcttaccaaattttaccaacgttcgatgtatttggtttggagcttaccaaattttgatcatgtgttaatgagaataaatttccagaaatgccaatttttatgtcttgtttggcacagctccagatcttagattcacgtttgatttaaaatttatatgttaaattatagtggtttaaaatcttaaatttcaattaaaatgcgaacataatgatttatctaaatgttatcaacgtaatcgcatatctagatccgtggatttatgtagcttgaaatatatagctccaaaaattcttggatcagagctcaccaaagatggccagagagagccgttagtatgataacaatgacaagagcttgttcaacttgctatggtaccaaactttagtaactcaaaaaattagcaggttaaaagtggtggcaaactgaacaagcccatagtcgtttatgtaactttttaattagctttgaataatgttccacgtgaaagaaatccctcaatcatacagtgatttttcccctgaattgaacagattatcatgctaccttttctctataaaagatgatacgagtgagtgcaagtgccaaatgctggaaatgggaatgagagttgatacatagggtgtacggcactatgatgtatgcgatgtctttgttttggtaggtttgggaggtatggggagcatttgctttacattagagagttattttcctgcacaaacttcctagctgactagaaggatcagcgagcacagtcggctctttgctattcagggtgtttgagctagggcagtccaccatttctccacggtgtccatggtatcccattgatcgattcgcatgttatctagtgcccacactgctcccatatactctttgtaacctgacagtgagcaaggatgtgtatttccatctcatcgctgatcgacaaagtgagcaagtcctttgtacataatgcatttcactaggcaatgtctgaaatcatgttcatcgtgcattatttgtgcttgcacagacaagcagggctagaagtagggcaagggtgccagggcttagtttcttgtttgtgtgtgtgaattaaaagtatttgctccgcaccatattcttacaccttccaaatgtggtctaaattttgttctaccgaaaactactctactttaaattcctttatcttacctttcaaaacgtagctcatcagtggttaggtcttcaaaagtttggtatttctttttctcaaacagttctagccaactcaagctgatcagtgctagaccatgatctagaggcagggatgaaaacggtcggaaatggtcggaaacggtatcattattttattatttttttgaaaacgaacgaaaatggtcggaaaatttccatatttatgaattcatctattagtgtcaacttcaatgacatgctgatagaaattaaaaaaaactaaattttgaaaacgataaccatcggtaaaaatattattattatattagttttgcggaaacggtatcggtacggtcgggaaatttccataccgttttcacccttatctagaggtgcatgtggacatggaggaaccagtagctatattgcccccctttgaaatgcaggattatcaaaacattggagtaggaaaaacatgagaatagaacatcatattcattggattcctgaaggatttgaaaacataggaaagtttgattgtcacacaagaaaaatgtaggaattcaagatacgggaagaagaaaacaagaggtaagacctcatacttacttcctccaaaattcctccacaatagttcattccataggaaattcaaataaatcggtaggaatcactcctttgtttcaaaggtgatgcgggggaacttgtgcaacgcacctttcaccatgaactcacaaaacaacacactttgataggttgattcactcgaccatgcaaaattggatctcttgctagctccctcaattccctgcaaggaaaagcaagaacaatctatggcagaactcccaatcactatccctagtttggcgcctgacagcacaaaacctaggaaaagaacaagagcagatacatcacaatatggaaacctctcggtagcaccatcagtttgttttggctcttgtggtggaaccagaatgaatttgtgtccgtgggcctctccatcatgtgggccatgaagtttactttccaacaagtgctcacacgtccaaaatggacttcggacgaagagaaaaaaacgttttagtccaagcatatccaggatggcccaaaccgaatccaagtcaaatattttctttcttatcttcaaactccttgttttcgaaggattcaatccatggggaactagtggatggagtccatcccaaccaaagatttgccttggaaatagatccccatccaaacatgtcgtgcaaggcccatgttcatcatcagcgccgctactcgcgcgtcaaccaatctatttgcgcaacatgtcttcattttgcaattgtcggtgatagaaaactccgaatgatgtgccattggatcctttggaaagtagacttgacaagctttacaattatgtaagctacatctccctagacccacgtgttgtttatgcatgccaatggttcaaatatctcatgtctgaaagtaatcaagtgacaaatattttgtaacatcaaattctcatatatttcatgcttagaatttgagaaaaatgatatcaccttttgttctaatccacatgcaaaggacaatgtgtgcaattggttggcagatccacatcatctcttcaagaaaagtcgttctcggcttttggtaatcacaaaatgtgctaaacaaagagaacaatgtgtacgcatgatatgtgtatatgccattagtttaaaggttcccttttttacccatagtacaataagcatagcagccataggatacaccatacctggtttgtgcaaataaacttatttgtatcaacatttgcacaaataagtttccaattgtttacaccatacctgctcatatcgaaagggcttcatagggtacaaatcctttggaattcctatatttttcatttgttttaatgggggccaagatttaaccgaatggcggcatgttcaggtcattgaattccctcaggggtggaatggtgatcaaagtaccaacttgacagggccgtctccaggaattgggggccctggaacgaaatataatttgagatcctaaatttacttttgattgagttgatcatttaaattagtaaattatattcatggtaatttgatttaaaagaagagtactgaaacattcaattgaccatgcatggatacatgcatgcaattcaacaattcagtatttgacttaattaccagttgtccagtcttactctaatatggttgacgaggtagtcggccagctgctcaaggtgtcattgttgatcaaggattcaaaagctggtttcgcatgcatgcacatgaacacacataggacgtcagttgtatatgctaaggctggctggttgtgctggtcactctgatttgggggccccaaatttttgtggggccctgcgctgacgctccgttggcatgccctcgttgacgggcatgcaagatcacttcaagtaacaagagaactcctggtgcctcctatcccaagcatagcctcaaattctcagagtctctgagagtttattcagctttttatttagaattttgccacgataaaccccagatggatggggcccttgatgaactgttcatacctcagtttgttacaattattctgaagttcagatcccttctctgtttattcatggatcaaggagagattcgaacatcacatatgactatgagagtgtattgtttgacccctctcagttactcgtatatagaacctgaagaattgtccagctgcttttcatagacgtgcatctctccatttagtggaagcattaggaaccttcacagccatccaatcaaatgttgagatgtaattaagagaaatctgcgaacatgtctaaagacaaaaataggcaggaaagttctctttgagccacacaaaaacagcactcatcacaccaagtcaggcgtaaccaagaatgtcaaggtatagtaaccaaattgtatcatcgaaacaccagaactaagccaaaaccccaaactttttgcggaataaaaagttaccctcaaattcgacggatcacggcctgaccgaaggtgttgcgccggtctgaccgcctggaagccgtcggtctgaaagaggttgtatctccggtctgaccacctgatcagctgccgtcgcctgaaaccgccgtcggtctaaccgccttcactccaccggtctgactgccgcgatgccgccggtgactcgccggttagaccgccgaacccgagaaaacacaaatcgaagaactcttaaagtagatgacaactttattacttctctctgtgtttacaaagtgcaacaataacactcctcacgaaaatctcgactaaactcgaaaccctaactaaactcacagctcaatgctctcaaaagtgataccgagaagcctcacgctccctctctatttatacatgaggtaggcagcctaaagccacgaaccaaaatcatactagaagtcctaatccacctaggaaaccttctcatacaagaaacaaactttacaaactccaatcataccaaatttggactccttccaaatttgacttcgcatcccatacgcacacaatacctccatcgtatgccatatggaatcttcaccaaccatgtgcattgaactttagcctaagtatcccgcatgatatctgaccatcatggacatcgtcttatcaccaagctgactcccgatccatcaccggcaatactctcccgaggcatcaagtcacctacacatgaatcaaacaaagaaaccatattccgagaccaagctatctccaacttgactcattagtagcaaacaacagtattacatacgcatagtatccatctagaagccataaatatgaaatccaaataaacaactcgaaaccgaaaccgacacaaagtcggctggtcagaccgcgcaatacaagccagtctgaccggcagcacatgcccggtctgaccagaccacatattcagcagttcctgtatatcacatgtaaatcctatcatctccaaaaccacttcgccaataatcttcaaatattaaaaccaataatcacagatgccaattgttcatgatagaataataataaaaaacactttgattttgcacaaatccctttatctgctagaccaaattaaactgaattccaacaattattcacatgtgaactttaccacaatgatctacttcgtgcattcgtcacttccgcagacacaaggagcttcaccgcagcaccatgagttcttcgagttgtacggtggaacagtagtggtctttgtgaattcatcacatggctgccactgtcccaaccccttggaccataaaccactctacatggagcatcgacatcggttatcagtcaatctgcttttataaacaagaggatttgcatggctgcaccgcagagagaatactagctccaacattccctttctgaatgagaactgttcataattctgatgaaccgctatgctcaagcatttgtcctctacctcttgctcgcagatcctgtacgcaggatgcaatataacagttatttgcgcaattttagtttaagcatgtagaacggtgaaccaactatcgacaagctaggtaaaagtaattaatagtgactatgtaggaacttactgaacatgattcttgtggcatggcaactcctgatgcatcctattctgaccaaagcaacaagaaatgtccatctatcatctcttagcttgagcatcgctgcagctccttcatcgacagtctactcttccatgtatatatagagctgtaggtaccattgaccatagcaatgttacatttctgtttcaatgcagcacctaccactaacatacgttatgggaggtgttttacactggaactaatttaaaacgtttcctttttctaattcaatggatcatatccatttatactattactaccacgcatctactacgtgtagtagaattgttagagtttgtaagtttttcaaatggtagtataactcataaatcaatggttgacatcacttctactacaataatactgatagtagaatactactagtagagatcaccgtaaatgtactccacgtacaatacaacacataataggagctggacattaccagactgtggagctttgtatcagtaggattggcacctactgatggattgtgtttttgccaagcaagtatggagagtgctctttacgcgcctatgattacacctgccgggtacccatgctttcggggcatagatggccataaggcccgaggcccgaaggctcggcccacggcacggcattttggcctggctcaagcatggcacggcccgacttgggtcgggcctgtgccgggccgtgcctgggcctccccaccggcacgctgggctggcccggcacgatgggccgccaggcccggcacacaaagtatagggactaaaaatagacatataaatgtcaccgtccaaagaatagggatgttaaatagacttattttagctatttatagatcacagcccaataggagggaggaaaattacacttattctgaggaaaaacacgatgcgccgtcgtgccttcgggccggccgggcatggcccgagtcgtgttgggccatgcctgggccgtgagtgcggcacgtgggttggcaggcacggccggtgcatcggtcgggccgtgctggcccgacaagcctcggcccaggcacggccaggcctaggctgtgccatgccgggcgggcccatatggccatctatatttcggggggtgatatcctacattggtgggaaacctgcaggagaaagctagtaaaggaacatcgaaggatatttgatggtgtcatcatatacacatcatggtgcatttggctgcagcgaaatgataaagagttttcaacaacgtttacaatgagacagtggaagatgtggtcaacatgtttattagcctgttcagaacaagggaagaagtgcttgctcaaatgtagcttcctaaagtttttagcctaaagttgtcttttttttccttactgtgttgctgctcctgtaaaaagggctgtcaaaaattatatttctaccagtggagcaacagaattataggtcagaaaaaagatgatggaaaaattcattatctagcggtatactgatagaaaaaatatttccgacagctattgccttgcacagaaaatataaactggtgtcagatcgatctgtgaaacttgacgctggacgtgtaactgtcagtaaattttcctgtcgataatggcaccatcagaaaaaatgctgttcatcagctaggttcagagttcagacgagcatcggagcatgcagttaatcatttaagaccagcgagtcaatggtgaggcccttgtgtgcataaagggctatttcaatcagacggggacgaaattgggcagtagctagctctgaacacaaccaatgaaatttgagtagatttctgcattcagtttttagaaattgccatagtgacaatcactgaaatcacagcagcatatagataaagcaaaattccgttctctgtggcagcaacagaccaacaatgattaacaattagaacatatatagaaaagtgaattcatgataattggtaacacggaaacaacccaaaaaacagtgtccagtgggtttgtaaagacaggaaattccatctgcctggctaattgttaccatcatgtactattatctcaatagctcattcctcatggagtcctggaccaacaaagacaagcaactgtgctactcccaatgcttcccatgctgactagctaggcagttcactgtgtgtagagtttccaacagccctacagattacaaacgtgcactcacctgttccattttcagagcctgtctcaactctcttttatggaccagaaaggatatttgtgatgatcctctatggtgtccgggataggtaaatgggaaatagataaaagaagaaccaatttagggataatttgtaatgtagttcaatgtgcaccagcctactattgaatgtttgattaacttttaaaaaattcagatgtaagatggtgaggccttccagttgccttatgggatcaggattattcaattgagcattaaaaaggttgcgatgaaattaggtgagagaacactgattaatatagggatgtttcgtgtcgtcaagaattcgtggatgactatatctgacagaaattcagaagctatgaaaattgctgttaccaataggaacaaaaacatgcgagctcagctctcaaaacatgccagattcaaaatcctatccaaattataaaaacctgtgaaatacgactataattgatcaagatgctgcaatcggttaagaacactggcattccatttgcaaccatgtttaagccaatgcaactattgaatcaagatctccaattcaaaatcgaggtaacatcctgcacaacattgtcaatcaactaccagttctaccactgttcctcataggcaaaatgtttggtcattgcaagaacctaaatcagctacctagtaagacataatttgccacatgctcacatgagatcacatactcaacatccgtactcaattgacccagccaattcatcacttcaaatttgaggtcttcaatttagcaaccatgcattttggtagaatcaaagcttgaccaaactagcacaagagttcccgatgcctcctaggcctaccacagacaaaaccacaggagctagcaaactccatgggctaattgtttttttaactttcattgcttgcaggttgcagcagttgtgtgattcttcaccctgcatgcccttttatggaccaaaacagatcatcacgcatatcacacaaggatgaataatgtactatttgattccgtgcagttattcagttgatcaccttttctgtcacatgtgccagcaaaaatatatagttcacccccatgttgaataatatatagttcatcatcgcttcgcttccattgaacttctccatcgtgtgccatcgatgccatggatctgagatcgatcgcgccaacagctagcgttgaactgaaaggaccagccatcacaataatgcctctgctactcgtgcagcgtcgctgcgtacgtaggcgaaagaaaaatctgttgtttttggttagaaggctttgtaaactctggctttcagaaacagagtacagaatgttatgtgcgcagttaagtaaaatccagaaaatcactgatgcagcaattcgttgagaaatttctcagtagttgcctcatacgagttaaacactgcaattcttgaataaactgtctgttttacacatcgagctcatgcgctttcagtttatgacacacaactacacaagtcaactaccagttctctgcataatccagtacatttttgcagtgttcttgtcgagaagatgacctctgacagcaggccagcgccacttagcattctgggcttatattccagccatagctagtatttggttcagtgtatatactccaatcatggagctattgtcattgcaaacacttgaaagtaagtctccatttgatcaaagctatgactaaatgaattatcatgattgagacagggcaagtagaacatagatagatctagagatcaaatctagctagtagcaacgctgaacatatctactagattagccaaacaaatggagtggtcatcacacctcgacaaatcatgtcaagggaatagttttgcataaaatcgccaatattcagacataattaacatattcatcaggcataacatccaccttcatctactcaagaaggcctgcatccttaaccccacgattatccatcatagttggaaaagtctcttgtgcatgtgtatcctgctgaagaactacaagagagagctgctgttcttctctgtccctctatgcttgtaatgacttgatccactacctcaacctctagtcgtgagtggagagctcccggtgcctcctaggcctacttccatgtgaaccagcactgtttgattccatgcacttatacttactgtatgaaagcttcatgatgcatgtactaattaattaattaatgctgtgatcgatgtttagtttttttcctttcacgttgcatcttgcatgttttcggcgaaaatacaattcactatgctgaactcaccgcacatgtgtattgacaattgcaagggatggccgtcgtcattgtaaacgcttccctaaaactgctcttccatctctttctgtgtctttctttttaagatgttggaacaattgtagatcgcaactcgtttaatttctttttcatctctttaggcatataattccttttaaaagaatagataataataggtttggcactttcaaaagctccttagtgagacggctaacctagacagttaacgttagcactccctggtgtagtcttggatgtgtgggtctcggtggtgggagggcgggggtcctcctactttgtaaatattttgttctttgttttttcttccccttgaaatgaaacgcagttctcctgcattttttagaaaaaaaaaagaataggtaaatgggtgactgtgtgaaagctttacaaagtcgaaaggcacattattttttttgtgctaaagtttgccggcctaagaagaaaaaggtagatcattacaaaatgctccacacactaaatggtgggcaatgccagatttcttccaccaacttgcaaattctttggctatgccataaacttaattaatgtaatttgtccatggaaagatttcagaccaaacttctgccgcatatatacatgcatcgaagctgaaggtccatagctacatgcatgtttggctgactaccaagcttgtgaaaccttcttatgtggtcatcttcctcaacttgattcgttggttggtgtcaacatagaggacaaaaaaattagaagttatccaggagagagctagcctatatctgcatcagcgtagcattatttgtttccagcctatctacaagttggaaggagaacatgatactgaaagttcatgtaacatgacaattctcgatgccttccaaacctagataagtattttggcttttgtgtatgggcatccatatgcatatatggacatgaagtcaccacgattcactatcactctcatgtttcaggcttagagttttctcatctctcatatatatggtccaaaaagatattgtatatatggttaaacattgtcaccttattaattcactacatgcaactatattaaattgggaacctagctagctacagggttgccagctgaaagtgagctgtgtaggttcagagtattctttaacttcaatccttctaatttttggcccaactgtgtttccttttcattaccctccttccattttgtttgaatgcgggaagtcacctgcttagagagaataaacttgctgttgggctgattttgccccaattactagtttggcccagctcaaaacaagaatgtaccccatccgttccatgaaaaacccaatcctacaactataaatctagataaatgtgtatccaggtttgtagctaggattgtttttttttaacagagtagtaaactctgttatgcttatcaatttgatattggagttgttgttttaacatctttctaaaatttgaatactatttattcttgtccaaagtttctaagtataaataaagttttcattcccgatgaacgtttgttagcataaagttatacaatttagaatttttgtggtagaaagttttttattcctttagaaaattgctagttaaactgcttttttactatcgtataaagtttctgaacatatattttttatttttgtagaaagtttatgagtaaaattctatttattatttgaatagactttggattgaaatggaagtttcataatgtagtaaaaaaaggttaagtagtagaaggtcttcctatcaaatagaaagttaaggtttgcacaatatgaagtttgctgtacaatagaaaaatatgcaactcactaatcctaatgacatgctaattacacaatgcgctaatcttgatagtgtgaacacgctaatcaatcacgcatggagaatcctcttgtgggtacgtcttcgtgccacatgtgacaatatgccaatagagtggagtaatattaacccactctttctagtgttaatttatacaaggcactacatgatacactagctagtacaaagaatgttaatttctagtgttcaaagaatgttctttcacttctgaggtgtggaacaaaatctgcacttggaaggggttaggtcaaaactacctacctaacaatttggatttaaaaaattggtggagcgctctctcagccattcaaccgaagcccttgcaaaaaagaattttaggttgtctgataacctcctggtggaacatttagttggagcggaataggcgtattttccaaaaaaactcccacaacggttgatagggtggctaccctaattcttcaagacattgatcaaagacttttggctttccaacccccttgatgctgcccttgtttttttcccttttgctccattttttgttattgtgttttttgtgttttcttgtctgtaaataacttttatttcgtctaatatattccggcagtccttctgccgccgtttccctaaaaaaaaagatacactagctagtatgaatatgttatgtattataatttgatatctcatgacagtatgacattggcctccttagggatccgcaggtagcaaacttgatcaatccaccaatcttagggaacagatccttatatatcatgcagccatggtgcaaacttgtatcggggggtgccgatatactgaaattttgaacaaaacttggtcaaatttgaacaaaatattgccaaattcaaaaaaatgaataacaaattaaaaattcctgccgaaataatatcatgggggggggggtccgatagaaccgaaatttcggaaatttctttccaaaattttgaaccatggttatgtggatcagatcaacaatcgccatcgacaataaagccacagctgatcaacaaaatttgtttttgtttttgtttttttttcaccggactgacggtgaagaaaaggcccaaaaaattttattaagattaagaggagatgttgcatctaaatatgtggcatccccaaatgttatcgtgacaacactccaatcttgggcaatacaatggttctgttctctacgatgcagcctcctccatcgagcaaccacacacacttgtcactcataacacttcatccatcatctttggatgaggctgttgttcgattcaacttctgtcgagcactagtttggagggacatcacgtcggcttctccatcattctgcttccgagagggaaaggtgctcaaatatatcgaactattcgctacgacatgcaatagctaggacactgtagtagttcatcaggcaatgtttaatatgttcaggtagctagcgaccatgctccatatgttttgtgaaatcgtaggttgcccaatcaaactcaatgtctcctggtgcctccaaggcctatagcagcctccatgaacagacctagctatctctcattgcttgcactacttgtgcttatccatcaccagctcttttatagagcaaaacgagatcagtacatatatatcacacaaatacacaaggatgtacaccagaggcatgtgctcatgtacagatgttcagttaaccaacttttttccttcttttttttgaaataataaaataacacctacaaggcatgtattgatgtacacactttcagttagcaaactttttttcttcttcttgtcttttttggaaaaaaaatggcaaggatggacttagcattcattattgataaaaaataaatgatggggggaacataacgatcactcttgtcaatagcatactcttaacaactctcttccaaccaacctatgcatccttctcaaccacttttttttctgaagttgcagatcaaatatttcagttgatccaaaaaaagttgagcgatcaaatattttagttgatcaattggtgaaacattaagttatacatggtgaaataaaaaaaatagtaattaaaacatttaaaaattttgtggaatacaacaagaacacacattgaaatatattgctatcacttatgaaacaatgagttttagcgggttgaatcatttgtttttcttcatcaaaatataattatgtgatagcttgttgtaaaaaatgaattacaacaaatacaatgttgcgtttggatcgtagattggataaatagtttaggagaaaaattattttgaagatcattacatgcatgcgtgcatgcatggagtggagagagagtaattagtatggtaggaaaaagaataagagcaggtagttgcctaaattttatgaaatataatgaaaatgcacactgaatcgtatgatatcttatcataaatatttaattacaacgaatacgatggtgtaatcagatattatatcatataagcagtttagaaaaaaatactttaaagattgataaatgtatgtatggatgaagtaatgtagggagagcagtattgcagatactgcaatactatttttcttccatcggtagacccatgtgaagcggtgtccggcccaatcacttgatgtggcagatagatgcaactatttgacaccttacaaatggcaccttgtcaggccaatgtcaaaactctagtttctcccaatgtcctgagattcatacctgacaaatttatttgggaatacgcagaaaacttgttcatcattgtatcaagatggaatgggtctatagtacaaaacacaaaatgaaaagagcaacaacgaaactagaccctggtaaactgaacacgcacaaagtcagaaatgatcggccaaaattgactggttctttctgttcatgaagtgtactttaataagtgaaagaaaatcagtgatctcggatacaaggtttttatatactctgtctttcaggaacagagtacagactgttacgtgtgtgtgcagttaagaaaattcagaaattcacccagatgcattaatccattgaggaaattctcattagttaccagatatacgagttaaacactacaattctttgaaaccggctgtattacacatcgagctggtgtgctttcagttcatgacacaaatcaactgccagctctctgcgtaatccagtacatgcttgcgacaagatgaccttttccagaaggccagcactgctgagcatcctaggcctatattctggcaatatcttgttaggatataatatttgattcgatgtaattaattattcagtatgtatgtgccgatccattgtgcaattgtcactgcttagagttgtatgtagctcaccattcgattaaagctatgatttaataatcagctgatcagttcatttcaatttatggttgaaacaagggaagtaaaatttggctgcaatttcaaatatatatctccaagattaggcaaccaaatggagtgtttgtcacaccaccaggagaaagtcagggaccagtttagtataaatcgccaagattcagacgtaagatgtacatcagagatagtccgtttctttagttttgaagtatatgcaagtttaacgaacgttgtatttagcgattcaaaactatatatccactttggtatttacattcctgtacacacaacaaaatgaaccattaggatgagagcgaaatgctagttcaaatttatgctcgcttagctatgtactaagagaactaccaagctccagttcatgaatatgaatcatgtccatgattacggaaaatcctcttttccaatcaatggctcaacaaggtctcatccttgggcctcatgattatacatcatatcgctttgtcctacagacaattcccatgcatctttatcaggtaagagtatgatgctggtgttctgcccccctcaatgctctaccgaaaacacgacccactgtctcagcatccacacatattaggaaagctcccggtgcctcctaggcctagctaccatgggcaagcgacagttcacaagacactggagccagtttcacttctatgcgaagttgtgaactaacactcattatggacgactctgtcccttttcagctcatagctcttggttcctcttttataagccaaacgaggcctttatgtgcatataaggaccagtgagtgaatggtgaggcctttgtgtacataacccaaaaaaaaattatgtagatttctgcattttggtttctagaaaactgcagtagtgataatcaattaaatcacagcagcacatacataaaaccaaaacgtcattctttctggtagtgacagtaagcttggaacagtggattcatatgtacttggtactccctctgttccataatataaggcacaactacttttctttgatgttccataatataaggcatgcatgcatgcatacaattaactaggacatcttctccattgaattattattttttaaatcccccactctcaagatctctaattctattagatgcatgcattatatttattaggatggtccaaactaggagatgataataattgtttcttggtctttgtgttaagggtggttgtgccttatattttggaatggaggatgtaacacataaacgacgcatccaagaaagagtgtccatgctgctctgaaaatacaaggaattccatctgcgtagctactctcgttactctcatgtgttattttcaatgggtcatggacgatgtagactcagcaaagacagggatagtcgaactcccaatgcatcccatcctgaccatgggaattgtttcaataggatcagtgagcagagtttccaacatccatgcagattatagacatgcactcaccagttttaccgtgtctctctctctctctctctctctcactcatcagttaacagtgctagctctcatgccattcatatatggaggatgagaagtgttctctatatctacacaaggtcacaaaatgcacaattattcaagggagcatcaggtgctacagtatcaccatgctaccatgtggcaccatatatttgatgagtgagggagagacagtaaaactggtgatcatttttgtataaatcgccaaaattcagacgtaacatgtacatcagggatagtacgtatcttcagttttgaagtgtatccaatttcaacaaaatttggagttaggaattgaaatctaaatatctatgttggttttagtattctttgtactcacaagtcacaacagatgaaccattaggaagagcgaaatgctatattcaaatttacagtcgcccaatgtaccgagacaaagcctatgcttcagtaccacaatatgaacaagtccatatatcagtactgaatatcacctagtccatcatcagctcagcaaggcctttgtcctgaagagaattcccatgcatttgtatcctgctgaacatctacaagattcagatgctggtcttctgtccccctcagtgctctattcaaaacttgatccactatatctctgagtccacacatatcaggaaagctcccggtgtctcctaggcctagctaccatggataagcgatagctgacaagtcactggagctactattacactgttacttccattcgagcattagctgacaagtctctgcttctcatctcttgtgatttttcttttataggccaatgaaggtctaacaatttccgttgcattttgaggcgttcatgctttagcttgactagaattttcctgccaatatatatggttttgcattgcatcttgactccacacaactcgcgaccacatggaatgcacttgctcatcaccgcggagctttcttctgttcaccatgtcaccatggctagatgcattcagttttaaattgggagaccggaactgcgtataaatcaaaatattaggcgaaatttatttgaacatttctggccaactcaacctaaccagtagactgtgatctagaggtgcttgtggacattcagttggcagtaaccataccaaatttaattaaatggcatcatatttggacgctttgacacttcatccatcatttttggacaagagctaaatgtgtttcaagtaacatctgtcaagcactggtttgatggcttcatcacatcagctgcgacatcttagagggaactgtttgaactgcatgtaggacacagttaatgctcaagaccttttggtaaattcagggtagcccaatctaacacaagggctcctggtgcctcctagtcctaccacagcaaaagtcagaggagcagcctccatgaacagaactagctatcacccagtgtttgctctacttgtgcttattcatcacaagctattttatagagaggaaagagatcaacatatatatcacacaactacacaaggatgtacttctatttgattacaagttgttagttattcagtgcctatgagaggcatactcatgtatagatgttcagttaagcagttaaccacctttttccttctttttttttcgaaacgaaaatatagcacctacaaggcatgtattcatgtaaattgttcagttagccactttttttcttcaattcttggaatgatgaatcaaaatggactggtcggttgatttgacagttctctgttcatgattcttttttcttttttgcttgaacacatggacatgcaggagtgttcagcttccttggtcacatgaagtgtactctagcaaatgaaataaatcatctgcttgtcttggttccaaggttttacatactctgccttccaaaaaacagagtacagacctcaacgccttgtggcgaacgtcatctcgtcgacgacacataacatgaacacagttcacacataatttatttttaatcactaataaatgttgataaaagggaagtccatattcggtgaataagcagacatatgcagttgtcagagaagacagatggaggcgagatgagatcggactatcctatcatatcaagtcgccactagaccacaaaggagctggttttcccagtacgtactgcactctggggtaactcctcatgatgtttcccttgggttccatggcttataccgagcactccaaaattcgtaaaactctcattgaaaatacagcacttgtgataacgtaactctcgatgcctcccaaccctacatagccacaaaacgaagtaaatgcattttcagtttggtggtatctaaatgattctgaactcactgctatatatcggcatgtttgtcttagcctctaatatctttcatgggccaaaagagattgtatatgatatgcatctgaaatcgaaatgtactacatgtattaactcagcagcagatgcagtcatgtcagattgggcacttcatctgttggggcctatccccactacttcctttgtaagacgttttggggttcaaatagattcatgtatggatccatttgtatgcttcatatatgtgtctaaattcatatggatattaatgtatctagatgacggatggagatgtccaaatgtcttataatgtagaacatagggagtatatatgtttattgaaaaattaccgatctcactataaattaaactgcccatgctgttgtagataaatttcagttcgacccaatgaaattaggtgacagtgttgaacataaccgacaaatttcagtacagttatgaatttaatatcctaggagtcttccggttagattcacaaggtggtggactagctagcctcggttcgaagcatcatcctttctaattttttgatattaggtcgttctctaatatttgtgtttttttagagtgttattttcttagatatgggataacgtaactaaaattccagcttatgcatgatgtgatattttttttatagaaaccgttatacggctaatcaataaaaccacagcagcaacagttattactagcacattacaacagcggagaaactcctggtaacttcaaaatgatccaaagaggatgagtatggtgatgaaaaacaaacttgatctctgtctagcacaaggaacaatacaaagagaggaaacattccacttctgtagtacatgtttgtacattattgcttgcttttcaaagctacattggctcctcctcaatttgacatgctatgagcctgcagtcatcagtgttggcatgttttgctctgtccatgttccattaacttgtctaaaaaattagttgcacattatcagcacaagggctcagaagtcggaactcatgatgtttgaataactcttggacttcttgttaacagattacagctatattgtgcattgttgcaatttacacacggatcatatgagctcttaaaatcaagtattgagcaccttatctttactcatgcttctttgacttctcttttatggaccatgacaccatagtatgtaaggatgtattaatatttgattcaatacagttaactatgaaatgtctacatgttcattgtgcttgtgcatacagcagcaggactagaaatagtatcattcaagaagtagttacaatggcaagagaacaaagaaatgtagtgatgtacgatagttcgaaattcctcagtcgaggatagcatatttttacaaccttgatctttccatgtctgcactctctatagtataagcaggggagttgcactatgacgctgtgggtaggggcctagcttcctgtccaatttcccggaaattgctagagttgctagacaacatttttccaatacctcctaggcctcatggcaaagtgatagaagcagtctccatgacagatgtatatctaactatccatctgttactgctagctagctattcatctcttatagctagctagatatatggaccaagagaggccatgatctatcgattgaaggatgtactatatatttgattccatgtaattatatatgcagcatctataatccagtatcaagttatgtatagttcattgtgcaaccaacatatgcagagtctaccgtatctagcagtaatgctgagcatctcttgaggaatttagctgctaaatgttcatgaaggcattttcctgcaaatatatggcaccttgtcaggccaatgccaaggctgctcaaagcaattaggttcaaagttcagacttcagacttcaaacgtgacaaacttttgattgacgcatcattcattaggaaggagtgtaattttatcatttttgaaaaggtacctagaggtaccatatttctggtgtaaaattcagtacctctaggtactaaatacctcaaggtacaaaaaattttagtgtaaaatttagttacctcaaggtacttttttaaggactataaaattctttcctctaggaaggaaggtgtctggttagtacaaagcacaaaatgaaaaaaaaaattgtgatgacaaactgaataggcatggcattttcatcagtcataagaaataaggttgtttcttcatttcaaggaatgatcaatcaaaattcactggtctgtgttcatgaattgtacttgtgtaagtgaaataaaaacagatttcttggttacacggttttatatactctgtctttcagggacatagtactgtgtgttgtgtgtgcaattaacaaaattcaaaactcaggctggtacatcaatcagtcaacaaaattcacagaagttagctggtacaagactacaagagtaaaatactgcaattccttgaagagaatgaaactaactattttacacatcgatcaagctcgtgggctttcagtttatgacacgagtcaaccacaaattttctacataatccaagctagcatccaattaaccataaagctcatccttgcaatgccatttatcataaaaattcagttgactaccaacaattctctaaataattcaatacatatatcatatccttgcacaccaatgttgtacatggcctttgccagaatgcatatggaatctccaaaaagcacatcctttggacgtgccaatgttccagttcattgatcaaccgccacacgaccgtgtctctaatcaatcgaatctatggctgaataatttgtcaactcgctctattccactaagaagtcccgtgcatgtgtatcctgctgatgatttgaaagaccaaaatgctggtctctagtctcctgcaatgcttcagctcctggtgcaccaaacaaggaagttcctggtgcctcctaggcctaacatagcaatgcactagatctaattttactcttccatctgaaccagcactcaccacagacgactctttatctctcttagcttggagctcctgatttctcttttataagcctaatagagtttgtcggtatggaggtttgggtctttccatgaaatgtactatagcatcgagaaattttaaaaagcggaaaaaatctagaatgtccgatcttgtttcgtattatcgtgtatgcattcaactacattgtagttcaatgcatgtgcacctaccatattgtataaatgagttaagtgtgcctgaatatatgttctgtagagatctgttgtcatgtggacatgagtataagaaacatttttgtttgcatggacatgtatttaaaagataaaaaatgttagtaacagaaaacttgcattaaaaagaactgacactaatcgtattggtgtccaactatagttgctcaaaggtgctggttctatatttttttcatcccgtgaagaagagaaaagaccaataggtactgaatttaaattaaccggcacctatgagctggtacctagctattatgggttttgtagtagtgagtccttccaatgaataactaaacttcgtgctaattgatacaaaaacacagtgaactgttataacaccaatagcccatgagttatttattcatttcacgtcagggtagagaagttatttttttcccttcacatgtgcttctatggaccaacgaagatggttataaagcataaggatcgatgtactttttgattcaaagcagttccatttccaccttcgaagtgttgtatttcagtatgccgctaccatgtgcttgtatactaatatactgatcaacatatttttagtgtattgaaagggtctcattcagtgaagtgtaaaagtttagaagcggtaactagctagcaagtagtttaattatgagcaatcagacacacacttagtggctttgctctggaggagcttaacaactctatcgtgcgctgaaggattacatccagtactgtcttcagcctgtggcagaaaaaggttcccaacgcctcctaggcctagctaccatgctcacacaccattggagttctcttctatatgaccatatgaataatatgagctcgatctctgcctctctgctcttgtgacatctttttgtagggcaatgaagaacagtattatctcttaattgcctgcaaaaagtgtagtccctttgaaaatgatagactgaaagcacggatcatgattcatgaaaaaaatgatcccgggatgcagagtttttattcagcaattagaattttagttggggtttgtcccatcaccttatggcttgattttcatataacaaaaatcattggttctgtgccttatggtggagaccagagatgtaaatcattttcattatctaaaaaaaattcaacaaatgccaaatcaatcacctcaacattaatttttcctgtggaatgcgattatgattattcaaccttttacaataagctaagtgcaggagcattccactggacaactattgactcttgatgtccaacggagactgatgaatgaagatcttgatctttcaacttgagaaccagttttgtaccctatgcctcccaggccaattgttgtccatggcaagaagacaggatctgccaccttgtcttgctcatcctctctatcagatcaatgcctgccatagttctccgatcctcctatctgcacttctttgtggccaaaagagctcaaatgcatgctcccatgatctcacgtacgtactcgacatttgtaccaaattggcatggcaaattcataggatcaaaatttgaggtctacactttgggggtcatgatgttcggtacaatcgaagattcgtagatgtaatagaagagctcatgatgcctcaatcacctgcatgttcttttatggaacaaaaagagaccacaccaccatatgtcaccactaagtgttgaacactcacggccgtcttgttgagccaattaatttagataaaaaaaaggataggcaagaaattagttatgccctcatgtgtcacaaaaaataaaggttcgctgtaggattatagattcatgaatggcgtgatatggcaacatatgtaaaatgttccaacatggtacatggatgacatataaaatgtgggagaatttaggattagttggagaccagtgtgcatcatctctgcagtttacttataacaattcaaggatttccacgatagatgattttatttttcgaaattcctatgaaaatgcttgtgcaaaaattcaaacttctctttggtcccaacactttatatagagtcaaaataataaaatgggatcttggagtcacaactcgcaagcaagttcgaagggttgagcgggaccagggtcagagacacatcaacatgctcgtaaccatgtacttgttcatttacaaactttttatatcattttttagagaattcttctatttagactaaggaagcttgttattgaactcgtatgattttctagagattttttgtatgatatattcatatcacacaaagtggaaaacattaatttgaactacatatgaaaagatcaaggactaacaaaccacatgatttacatgcacatgtcacactgtctggtgcatgccgtttaaaaaaaagaacgaaataagtggaagtcatgtcgatttataagggattcaattaacaataagcagacactgaaatcagctcactctgtcccaaaataaccgcagagagttttactgattggcccaaaatttaatgtgatcagctcaacaatgtgcaaggatatatctcacgtacaggacatggcagttgggatcacctagccattgtagattatgtgcaccaaggagaatgaaatccaacaaaggctagtagtaagcggcggtattgctccatcgcaagagtcaggtttacttggcgatggtaaacctgatgctggattggggggaatggcaactcctttcacctcttgggcagcgccttgcggcatcaccatgtctgtcccgttgtgagcaaacagctcctggtgcatcccaggcctagcatagcaaccgggccactggtctgatccactcttatcatttcactctatcagcttgcagcacttgccacttgggcttttatgtctcatcttatatggagcaaaattggcagcaaggtatttttgtttcgataatggataaaatccagccttttgcttcaacagaagttatatccgcgtagtacaatgtacctggttttaaaatcaaaataaagtatctaaccaaaaataaagagaagacacgttataaagccaccaacataaagggagaaatacaatttattcaacccctgttagtaaatttttgtttaaagttggcgaaaatttagtaaacctttgtgagtatcgatttacgcaggggcggatcctgttgtgcgagatcacccatgtcactgacagatgaattatttgatccctccttgaggacagttactttgcagccaagaagtattctgcacctacctttcatgtaatgttagtatatctctccattgagaggagagatcccagttgatcagcacacgagggtaaaatattaaatctgatgaaaattctgaatatccctaaagaaaaactatgcaggaaagctatcatcacgtcacgtaaaaactgcaccgaatttatcacaccaagttagggatttgatcctaccgaaagtacgtacaccgaccaaatttaataacataagtgtgacaacatatatacacaaaaatcatcaaaaggtgccttcacactgattttggcttctacgcctccaagacggaactgatgaggatatatcttactaaaccttgagttcatgaagcatattgatgttctacattacaccaaattatcttcgaccttccgataaatgtagtttgttgatgctttgtttctaattctgctttttccctttttcttttgggtaataactgattttgtcatttccgcaactcggcattaataagatttgatcgtccaaatccttcaactgacccggcatttttagaacatagttgtgcctcccaagcattcaattgcaggcatgatatgaggctgcaccaaggaaccttctgaatgtgtccaacatttgtattttggcagtgaaatgtctccaattccaatggactaatgtgctcaaacatttcgctgactctaggattttgcaagaactgcaatatgtacgcgtgcaaatttatagttagttactgtaggacggcattcatcaaatcgatctaatttgagcttgtaagctatttttttgactgaaagaaaagagagataatgaggcaagaacttacagtagtgtcacgttgtagggtgagcagggttcactttctcgccggtaaccgcgcggtaaccgcggttaccgggcttaccgtggggggtcggtaacgaaaaccggcggtagggtttgggcaaattttgctcaaattcaaaaatttgaaaaataatcgaaaaaaatcaaaaaaaaatcatggatgtaaagcttgttttgtatgttgttatggtgaaaaaatttcatcaaaaagatgcaggtaaattcaaatttgagcgcaaaacctattgtgaattataaaaaagaaaaaagattaaatggaatgggccaagtatgcactgttcacgaggcccaataaggcccacaatgggaggaaaatatctttggaagcctctgcttcgtttctctggcgaatcctaccgtttttcccctctctcgcgtagctgcgctcaggaccgaaggggcgacggcgtgcgcccgcgccaaatccgccgccttcgcgccggcgaggccggttcccgcgcggtaagcggcggtaaccgcgcggtacgcgacggtaaccgcctgggtcgacgggcaagaggtaatccctccgttttgaaggttttcgcgcggttaggagcggtaaccatgcggttttgtacggttaccatcggcttcgtaatctatgagacgatatacgtatgtgcggtaatcgtgtgaaaaccgtggtaaccgtccaccctaccgtggttaccatggcttgaaccgtggtatggtattttttactgtgatatgcatggacatatcaatagaacatatttttaccaatatgcatgtgaaatacattgggaatatgagtttatttcggcatttggttgcccgtgcttggctaaaaccatgcatgtgaagtatatttgattgctttggtctatgtacatataggttaaattaaatacgtcatagtatggaagaatttggatgcatgcttaccagtgtacatataattacgtcgtattattgcataatgggaggtatgtttataattagcagtgataatttctcatgcatttgatacagggtggagatgtcagatagtagggaccctgtgtgggagcacggggagaatatcccacctggatggcgctgtaagtattgccatacaaagaggggcggtggtggggcaacaagactaaagcaacacttggctgcaagagggaagggggttacatattgcaattcagtgcctccggatgtccgtgagttcttctgccgtgagttggacaggataaaagatgcaggtgaccagcgtaagagtgatagcggaagaagggttgaagcagcaagggtcaactattatgacctaacaggtgatgccgacgaggaggaacaaatggaagcagccattgcagtctcacgacaagacgaaaactttaggaaggatgttgaggagcgtggtggcacttatgagcatgccggtgggagtggatccgctcagccggaggcacggaaaggtagaagtaacccaattaccaatatgctacgaagggctacgtctcatagggagtcacctgctgtgagagattacaacctagcatctgccaaggcccctgtgcagccacgcattgacacaggattcttcacaaagaaggggaagcaagctaggcaagccattggtgagtcatgggcaaggttcttctttaccgccggcattcctggtagaaacgccgataatccatactttgtgagcgccgttcgggagacacaaaagtggggtacgtatgcatctattaaggaacttctttttttctaactcattgcgcactacttatttcatacgtcaattgtaggtgaaagtgtaccttctccaactggtaacgagatagatggaaaatatcttgattctacagagaaggatgtgaagaagcaatttgataggttcaagaaggattgggatgagtacggtgttactataatgtgtgattcttggacaggtccgacgagtatgtcggtcatcaattttctgatatactgcaatggaataatgtttttccacaagtccattgatgcgaccgggcaaagccaggatgctaactttgtgctgaaggtatgtatggttcatgcaacaaattacttcatcacctgttatcgtcagtgttaggggcatggactaatttttattatgttatctaccaatgcaggagataaggaaggtagtacgcgaaataggctcggagcatgttgttcaaattatcacttacaatggctctaactacaagaaggcgtgcagactactacggcaagaatacaagacaattgtgtggcaaccttgtgtggcacacacagttaacttgatgcttaaggaggttgggaaaatgccagaccacgaaatggtgattgagagtgctaggaaaatttgcagatggctatacaatcataacaagttgcatgctatgatggtcttagctataggtggtgaactggttaagtggaatgctacaaggttcggaacaaactacatgtttctccagagtttccttagaagcgagatcttttcatgcaatggatggcttcctctgtcttcatgcaaagcaaatttagtgggactttggaaggtaaatatgcacatgcatgtctatctagtctgtcttggtgggagaacttagaggcagtagtgaattctgtccaacctatgtactcattccttcggtttgctgacgaggacaagaaccccaatttgagtgaggtacttttgagatatcagttgctcaaaatggagtacgacagtctttttgcgaatcaaagggacaagtttgaagcatacatggagatcgtgaacagaaggatgcacaacctaaccaatgagactctcatcaatgccggtaaatattgatcataacataatccacatggcatattatgtaactcttacttaacctgtgccatgttttgtagctgccgcattgaaccctaggacgcactacgcgtattctccaagtgctactgtcttccaagacctccgacaggcattcgagtggatgacggatatcgatacggctgccgccgctttgctggaggttgagatgtaccgacgtaagacgggtgaatttgggagggcactagcaagaaggatggccatagatgggaaaacttcacctggtatgtttctaatcatggaactatgatatatctaattgatcttgatgtattcagaattatgaaatgacatgttacttggcttttgcagcacaatggtggtctatgttcgcctcagacacgccgaatttgaagaagcttgcgttgcgtttggttggtcaatgttgctcctccagtggatgtgaaaggaattggagcacattcgcattcgtacatacgaaggtccgtaatagacttacccacaagaagctcaacaagctagtgtacgtgaattacaaccttcgccttcgaattcagcaagcaaatgcccaaattagggtggaggacgatgatccccttcaaagattagcggacctctcattctatgaaactaacaatcatatcagtgcctggatggacaatgctcgctctaatgcttgccccgaactagatgaagattcagctgagagtgacgctcccctgcctagtcaacttgtgtctgacctagtcaacttggatgacctgcgaaggaccacgggagcttctagtattgctgagtgggctgatacgaatgtaggtgacactcatattgggaaaaggaagactcgaaagccgccaaaagcacgtccatctaaaaaggtaaagggcaagggtccacgatcgactagtgttgatagcgatgaagagacccaaggaagcccagagtaccaagagtccaatgatagtagctcaagaactgaaacagatgacggcgacgacgatggttaaggaggccaaggcactactaatgtgcctcctaggggtcacacccaacaatcagatcaccacagccccgttcaattcactggtgtgatataattcagttgcaatttcaaccttcatcttccaattcagtactggataattttcttgcaattttttgatttgcaggtgagggcgacttcactcatgctactcaggaccaggatcatggtgctccaagctctcaacgaactaccattgcaccgggagtccgacaacagcaacaattcagtgacatacaacaggatagctctagctcattcagtgcctctagctttgaaagtggctatccaacgtatgtgtacaaccgtccccaagcttctgattatcctgctactacatgggtgtatgaatggcaagaacctcagtggtatgctcaattgtacgctcagtggcaaacaacatcatcatggacaggtcaaagttgggaggaatacaaggcggggttgctacattcacatggcttgatgctcatgtccacagaggagtacaatatggcatataatcagtggaatgcgtagctatgcatgtccttgtttatttcctttcattcgaactagaattgtaatcgtggacattatactgtggactctattgttattgtggactatattgttattctggactgtattgttattctggacctacatgtggacatcgttatgctttgaaatgtgagattgatgattgttattgttgttataatgttatgaattattgtattgatttgaactccacaatatagagtaggtcatgccgaatttttctgttgtataaccacatcttaattaactaaaatactcacattttaggttttttctattatttttttcatttttcttatttcagttccaacatatcgcggttaccgtcgtcttaccgcggttaccgtaccaaaccgtgcggttaccgtgtccataccgtggattttgaattcaaaaatttggaaacgaaatttgtgcggtttttcgcggtaactgcacggttaccgcggtaaccaccataccgcggggggtcggtaaccccccccaaaacggtaaggtgaaccctgagggtgagtagtcctgatgcctcctacgccaagaaaacaactcattgtctttgtgaaacaagaaaggttcatcacatgctcttctagcctacaacacttcttctccttcacataatcttccaatgtatgaaccatcaggaccaagccaaagggctgtatatatatttgacttgatgatgatgcaattattcaagccatgggctggggaaagtatgccgaccgatgggatttatgaagataagatcagcgagaatgggtatacaatcgacaataggattaagggggtgtttagatccagcgatgtaaaattttggcgtgttacatcaggtcttatatagggtgtcacatggggtgttcgggtactaataaaaaaactagttacagaatccgtcagtaaatcgtgagatgaatttattaagcctaattaatccgtcattagcaaatgtttactgtagcatcacatcgtcaaatcatggagcaattaggcttaaaagatttgtctcgtaaattagtcacaacatgtgcagttagttatttttttagcctatatttaatactttatgcaggtgttcaaacgttcgatatgacaggttgtaaaatttttacgtgggaactaaacagggcctaaaaccatacaaaagtgaaagtaaaagacaactgaagcaaactgtcaatgctgcagactctcataagtcatagcatcccccctggcctacccgtgtacaagacaacactccaaaggaagattttgcacagctagaatcaacaaattggtaaagtaaaagctcccaatacctgccaaacctaaaaaaaaaagacattgaacaagcagtcacattatcatatggtgtactccaatatgctcttcttcgtcttatcttttatagagaaaaaggtatagcacaataattaaatgcactgtccaggtgaaaattccataggcttttctttggtatggaactagtattgatcaaggcctattagactgcaaattaaatagttgcaaacttcccatgtcgataggatcgaggaatagggtcaagaaacatgatacacaatggccttttacaaggtggggacgaaaatgcccccgtgttctaggccatgggatgacgtccttaggtctatcaaggttcgaccttgtttcttgtgatatttttagctattggctactactcccgaagagctgataatactaatggttttgaataaggacgcggtcttcgaaaaataaatttgaccaccattttctattataatatatatataatatcaataaatataaattttactaaagtactttttaacactaatctatacacattttgttaataatggaaatggattacactattctatacacatggttctatgtttatgacaaacattttcgaaattattcatactcaaatattttaaagtttggcgctgtctctgacggcagtagcctctcatccacatcctgcaacatgtcggtgtagtccccatggatccgcggccatcgccatccgccgtgatcagaaacagcctccggcgaactgatgtcatcaaggaaaaagaaaataaatggcgtataacaaactgttgtgtgttcgttttgatcagctcgtgttgaccagatttccattgacggtatatatatgtttgtgctgattagagagagattaattagtacctgatccctaccatgttcatgtcgatcagtggtgataattggtcgatctctggccagttccgagctgacggtggtaatttttttactttggttgttttttgctttgctcgtgtatgtgctccggtttcttggatggtggtggagagaaagattacagcctttgccgtagcaggctgttcattgcactccccttgtgaaagggcatgtagcctagtagttgcaatgacctgagtagcagcctaaggtcctgagtttaaatctccataggagtgaatttcagattgggttatttgaggactaaattccatattcaataggctaagttcctaatgagcaatgctacacgtactaaatttttcttactaaacttttactaacaatcatctcaaccgtttaatttaagtagatggaagttaaaaaaatctagatgcactcatagcatgacacatcagtgttagtaagaatctagtaagaaaaagttagtacgtatagccttttccgttcctaattaatttaaaaatgatgcatatatccgattggatgtataggcagggtaaaaaaaatacccttctctaaataaaaaaaattgtattatgttatttgagggctaaattccctgtttgataggctaagttcctaattaatttaaaaatgctgcatatatccgattggatgtagaggcagggtaaaaaaaacccttctctaaataaataaaattgtattatgttatttgagggctaaatttcctgttcgataggctaagttcctaattaatttaaaaatgctgcatatatctgattggatgtagaggcagagtaaacaaaaatacccttctctaaataaataaaattgcgctctctcttttcgttcttctgtcttggtggcgagcggcagtggtactgggctccgacgactgctccggacgacactctgccactgagagagatggggaatagtacacaagcaatgtacagttagttactacataggacattctcatctagctaggagaaatccgagattatgccatttgttaaaagtgcgtttcacctcaacgccacttggcaaaagggattcgataaaataccattcgttttacctcaatgccactcggcaaaatgaattcgataaaataccattctcaacctgtgaacagcacgctataatactatctgagaccaaattgtcatccgctcttcctcgtccttcaatattccttccaacgcgtggcaatgctatcgcgtcccagatcgacatggcgtataacctaagcacttacattgcatatgccataatgctgcatcgtataacctttcgaatgagaccaaccttcgtatttcgcctgtgaattgtctacaatggcaatggcacaatgtgctcagaaatttcgcaggcgcgcttggatttggcaggaactgcaatacacaagcaatgtatggttggttactataggacatatattcatctatagttgatctaattcgagcatgtaattagccatcttttggactgaaattaaccaaggagagatgatgacgcgagaacttactccactgttactctgtggggtgagaactcctgatgcctcgtatgccaaccaaattgaagcaagaaatgtactatgaaacaagaaatgctcatctcctatctagatttgaacatttctgttccttcacatgcttttcaatgtatgaactatcaggaccaaggcaacaagggctgtatatatatttgacttgatgaccattttgtaatgttatttcttattcattgtagaacctacctctctatctttatgtcgtgaattattggttttttttagaacatgtcgtgagttattggaggtgtaatatgttcacctcacttggaaggtttgacaaggaaactaaaagttctcatccatcctagcactctagcagggccgtccttaggggtgtgcggccagcgcgcccgcacagggcccccaattttcagggtccccctaagcccaaaacttcaaaactagatatacaactcaataagtaaattggtagcctaactagtctagaaatatgttatttttcttgttgtttcggcttcgattacacgcctttgccggttcgcacagttgcgccggttcgcaatcttgaatcgcctcccactgtggatctcgccaatcgccaatcgcaacgaacaagaggagtaaacgacgcctcacctctttctctcgtacgatcgtgccgcctgacgcctgctgcgcctctgacctaattctttctggtaatttctaatccggtaatccctaatattggattatcattttaggccattctagattgctatgaaatatattacggagaataaattattttcatattatatcattaattaagtttttatccttcaactttccacagggcacccgaatttgacgggacggaggccagtccacacctcgcctcacccctaaacacctaaatcctaatccatccattccaaaatataaatatagtaactattggctatgtatttggacatatcctcatacagatacataacaaaaatcactacactttaacaacaaatcaagtataatttttttttcttttcaatatagctaacatgaatatttgttatgaaactatagatctaaaacaatgtatcacagaattacatatttaacttcaattttatcacacaactacagctttataaactctaaattttatagttattaaataactttatcacaataaaaatgtggttgtgtaataccataccttataaataaatctatagttttgttaaattcgcctctctcttttttttaattgggccaaacaataagactcagtttcacatgggcttgaaatgggccttccgtgtggcccatctaaatagtccatctaaatagaacactcacacaccattcctctctcccaaacaccgccgccgccgccgccgccgccgccgccgacgacgacgaggaggaagatggcggcggcgcagccgccattgccgtggggggacctcccggcggacctgctgggcctcgtgctcctccgcctcccgtccctccccgaccgcgtccgcctccgcgccgtctgccgctcctggcgcgcgggcgccgcgcggggtcgccacccgcggctgcccccgccgctgccgtggctcgccctccgcgacgggggcctcgtcgacctcgacggcgagcccatccgctgccccacccccatcccccgccacggcgtcgtcggccacctcgccgtcgacaacctcgccttcctgatacaccgcgacggcggctgctcccttctgaaccccctctcctcgtctgcttcagcggcgacggcggcgatcacgcctctcccatggctgaacctcgccgccgtggacggagcgatcggccagccgggggtattcatcgggatcggggcctacgtcaacgtgtactccaaatcggtcctctcctcgccgctcgattcgtcgccggatcccctcgtcgccgtcgtcacatcgggcgggaggcacgtcgccgtcgccccttgcaagcggcgaggcgtggtcaccatcgtctccggcctcatggcgccacagattcccggactgaatcctactcggttctccgacattgcgttcttgggtggaaacctctacacgctcaccaatgcagaagggctccttgttcttgatctcggcagcaatggcgtcgacgatccaccgaacgcgtcgcatcgtcggtgcatcgccgatgatcccaaccagcatgagtattacatcgatgggagcactaagaacaagtctttggtgctgagatacctggtgggttccaatggcaggctgttgatggtgaggaggtggatgaactgtcggcagcagtattacgcgggtgacatggacaagacgcggggattcgaggtctttgcggcggtaatctctgatggccatggccagtgggtgaaggtggacagcttgggtgaccaggcaatcttccttagttcagagtgctccaagtctgtcactgctagccaatgtgcagatggaattcagcaagattgtatctacttcatgcataggatctacgacaatccgacgaaagagtgccacggcccatgtgttgatcctcttggtgactctggcgtgtacaacatgagagatgggacaatcaaccttttgcggcccagggcggtgatgtctgagctgcgctggaaacgccagtatctgacttggttcttcccttctgatgagtaatggtaactcctttctaagctgaacatgttgctctggtctggaatattggtatggtcgatatgtagccaactatgcagatgttaaaatccttttcatggatgaacgaatgttgaaagctgtgcaaaatttagaatcactgtgatggctataaattttccttgcaagctatgaaaaatatattgccttcaagcggttaggttaatagttggtgtgcaagaaatggctaaaatttgatgcattgaacattcatcagtcctgaatgaaaatttaagtatgtcttcatctgaaggaaaatgcattgaatgtcctgctgaaatactgatatttagatggcttaacagccctaggaggatcgatctgcatctgtccatgtgttttacattgcctaaaacatttttcttcccgcaataagtgcaacgatgaaaaacatgatcaaaaaaatcatagcgctgtactttcactcccgtagtttcttctgaactattgttcaactggaagcatcatatgctgtaaatagtccagctggaaggcttcaatggaccaaaagggaatgcatatctgcaaataatatctttaccactatacgattccatgcaatcactagtccagaaaatacatgcagtactgttcaattgaaattgagtattattgtcgtcaaattatattgaaaaaccttgatcggcaaaccaaattccagaaaggattttcaaacatcattttagcccctaggcaaaattactgatctcccttaaccaaaaatccttcttatttttcttttctaaataagttcagagctctattggctagacacctctaaaagaggacttctagatgctgatgtccatgcggacatagcagaatgagctgaagccctagcgcccgctaagtccagtacttctgccaacgcccacagccagctgcatgtatggaacattagatctctcagccagatctttacccctaagcggccatatcagcactgcgattgcagttcaatgcaacacctgccacagtcatattcttccctcgtaacagaagaactcctgatgcctcctacgcctacaatagcaacccaattggcctagcgtcatgagcctttcatttatctctctcttgctgtcagcttgtagcacttgtgctcgtttgtctattcttatatgcagcaaaaaggtgagcaggatatcatatatgaatgcacaatctaattcccatgcagttattcatgtttgcagttgagttcagtgtgcatctacagttgcaaccttaatccttttgatggttataccttttctttgcaagatacacaaaataggattgccttcagataatcaggccggcggtcagtgaagaagaaatgggtaggttctaactacaattttttaaaattttgtttcattatgtactggccaaattattaattaatcgtatgtcttaatctaaatgaaaatgtattgaaccttattaattgtctcctttctattcagtccaccgaatgctaggtagctctagaatgttcttagttagttttgaaggataatatggccatttcatggcaagcaagtgattagctaaatatgcatactatggtcaaaagtgataactaaacgtgaacagaggaagtaacaatttgcatggcatttgagatgttcacgctttagctcaaccagaatgttgctatcaacaatctatggcattgcatcgtagctggactcgcaattatgtgaactgtgcgtatcttcttgttttttttttttgggggaaggaatgcaaaagctttgcttttttttattaatagagaaggagaaaacccacaaaagtattatatacatggtctatcataaaaataatagacctgtaaaacagaacaaaagactactctctgaaggggatgatctctgtgattttggtggctcctgtcttgatccacgtctgtgctttttccttaatcttagtgacgaccatggttgttgtggtagctatgtgccagaagatattggcattgcgctcgcactagagcccccaagccgcaaggttttcctcgggacgtggggtatgcgtgatggcttgtaccaccagtcttctacgtttgtgcaatcgaccttcatgaatttggaggtctaggtttgcccatctctggacagaagtccagagtcttctcaggtttggtagaaaaactcctgatgcttctcagacctaccatttggtgtagcactcagcatgaccatgtagactacccaggtctgaactcagaggagagatccttatatagtcttaccttcatagcaaagagaacaaaagaaaaagaaaagaagagaagaggccaatagaaaagaatgctgcaatctggctacatgcatttagtactcaaaatcgggtggacataactgtctataaataagtgttaggcacttaggcctatatcttgcatgatcctgcagatgtattcgtctagttgatctctgcctattgaaccgtactcatctaggtgacacgtccagtctcaacaaggtctctgtatattaaaaagcatccacttctgttcatgatcagaacaacaagtagcagatgattatgcatatgcctgaacaagcactgaaaaagttttggaatcatttgcatataattaatataatttactctgtttcttctttagataatttactctgcttctacgtaggtacagatctgccaaccatattagaagagcatccaacatgccagtaatacatttttcatcaagttatctataaagcagtggcacattatcaggaaaaaaagggctcagaaaaacctttttttaataatccttcggttttttctaatgatggatattacagatattgtgcattcttatatttacacacaggtcaaatgaactcttaaaatagtatagagaaacttcagtcgccattgctaaagataatttatcagtagttctaacaccattggatttaagtaggcaaccatgccatttagtaatatatagaagggtcagttataacacatgaactcctgatgcctcctaagtctaccattgcaaatgtcattggaggcttggagcagcctgcatggactactgttcatgtctcaccggtagctttgcggcacttggttcttcttttacttctcttttatggaccaagacaagtcaccatatatatcttgtagggatgtattgtttggttcaatacagttaagtatgcaatgtatatagtcatgttcattaggtgagctagaaataggactgggctgccagggattaattagctgactaagggcccaactcatttcatgtttacttggtagttggtatatattaaatcaccatatctaatgagaattaaacatttttgctttacacagattttttaatctacgaaatgttgtctaaaatttgttctgccggaagctattctactctaaatttcctggtcgtaactaactttatgtattagtttctaaaaattgataataatacatcgttcaccattttttattctaccttaatttgtcaagattatggaaacagttttggagagctcaagttgggcaatagaccatgaatagatcctagaggtgcttcagcccttgtttagtttccaactttttctttaaatttctaacttttccatcacatcaaaacttttctacacacataaacttccaatttttttcttcaaacttccaattttagtcaaacttccaagtttgtcaatatctggaagatgcttaccaggacataactaaatgtcatcatgttcaggtctttcaactcatgacaaagtagtgtgaaatgcaccccatgagctggccacaagtgacaaactgccagtagaactcccgatgccttctatgcctatgatttgccaggaaatgctggagctatttgagctttaacatccatatgaacctgcactgagcaccaatcctcagattttgtttcaatccttttatgggccaaataaaatattgtgatgagatatactatctgatgatctgatctttcttaagaagaaaggccagaagttctggtattacaagatggtcctcttgattgtccaatagggggaagatataggggcaactgcctgaacaaagaaataaaggagacttcgggaataattttattgtggttcaatgtgcacctactagtttaccagactacatactgaatgtatgcatgccccactatataaaaaatttcagtgggaagccctaaatgccccatggttaattaacttcacttgctagatggtgattaattaaactttcagtgccttcagggccatctgaatgaacattaattagaaggtcgagataaaattaggtgcactgaaacatggatatagggacggtccttatcttcaagaattttttgaataattgtctagtggaaatacaaaatattcagaagatgtatggatatatacttgttgcacctagacatgccagatcgaaatcgccacttagactcttaacagtggaatattattatgatcattcaacctgttacaatcaactagttagtctataaagcattccactagccagtatgtttaagcatagtaatttacagtccttgaaaaccaccaagaggcatcaaaatgtataatttttagtacaaattttgatacctcctaatgctgtaggtaccaagtgatactaaatgttataataaaaaaatgtggtaccttccggtacctttttgattgtaatttaaatcactcttaagcaactattgactcaagatcaccaatgcaaaatgcgcgaggcaatgctacaggttgttgtagcgctctgcttaacaggctagttgttgtctatagctagaagctggatctgccactttggcgttgctcatcatctctaccaaaggcacttttgctgtagatcttctcatttatatagttatttgagagcagaaaagatcacattctcccatgctctcacatactcaatatatatgtacccaattgaaattcatccgttcaagagagcgatcttcaccgatcagtggcgaacccaaaataaaaatatttactgcgttcttttgcagtagttcccaacttccttctctctttttccgcgcacacacttttcaaactactaaatggtgtgtgtttttgcaaaaagtttccatacaaaaattgcttaaaaaatcatgttgatctattttttttaaaaaaaattagctaatacttaattaatcacgcgctaatggaccgctcggttttccatgcaaaggagatgggttcccaaccccctccaacgaacacatcctaaattactaataatctctgataaactgattaatacagtataaattagctagagttgattaattacccagtatcctattgccccaagaattgttggaaatatggtcatatattggcatattttaatctaaaatgttaagacaataatcatggcataaacagtgtggggtgatctagtgacaacatgtagcataaccagtagcatgctaaaggtatcatacgcatcatgaacgtcatgaacatgaacatagcaagaacgcaattgacttgcgactaacaggactaacagcgctatgaacgaatgggttaacagcaggagaaggatataccctgagaatggccctccgctggattgtgaggcagaattgcctccgttggtgttgacgttcgcggctccagctccaggcgcgccatctccggctctagctccaggcgcgccatctccggctccagctccaggcgcgccatctccgactccagctctagcagcagcggcggctccaggcgcagacatggtggacgagcagtcgtatgggaagcactccccaaaaacctgatcacccgcctacccggtgcagatctcaggcgaaggtgtggttccggaggccctgctccttccgatctctcgtgtgcgcaagcaatcagaagcgaggaggcgagagcagcacaggcgcgaaggaggaagaactaacacccgggaaagaagcaagcagttcattctgatcggactagcggcctccttctatagcaggagagaggcagtcgtgggaacatgggcgcaaaagaatagcgacatgatgtgacgtgacgcacgcccgccagccacgcccacgagatcagaagcgaggaggcgagagcagcacaggcgcggaggaggaagaactaacacccaggaaggaaagaagcaagcagttcatgcggaggaggaagaactaacaccattctgatcggactagcggcctccttctatagcaggagagaggcagtcgtgggaacgtgggatcgtgggcgctattctgatcggactagcggcctccttctatagcaggagagaggcagtcgtgggaacgtgggatcgtgggcgcaaaagaatagcgacgtgacgcacgcccgccccgccccgcccacggcctcggcccggcgcgcgcgcgcgcgtggctttccaactcccacctcaaccggttaacaaggagcctccaataactccctatttaggttgagatactcctcgcttaaatcctgaggtggtattattatccttaacacttattatgggcctttgagatttaataggataaattgggcctagcccaattattctaataagaattactatgtggaaacgaacatgttggtaaccccgccttcttatagaatcaaaggccaccaaaagtaacagaagattagctcctgatgcctcataggcctaccacaacaaaagtcaccaggaatcatctccatgaactgactactaattcctctcgtcccttgcagcacttgtgctcatttcttgatgtgctcttttatagacaaaaaggaaaaaaatatcatcatattacacaaggatgtactatttcatcccatgcaattaattacttattcaatatcatgcactaatattaatttcagttgttcattgatcacttcttttttttttgttgcactacgcatgctagtggagcccacgagcagacagggatatcggatcgcaacaaaacatattgtccgtgcagaaaagatggcttttttttacccaaattaattgccaatttaacgttcctctggaaattaatgcaatatttgacaccttgtaattatgtatcactgaagtgttttgcaaccttgacagccaccagattgcatatttctgctgccgtttaattacttagaacaactcaaggttttccacggtgattttttttctcaaaattcctacgaaaatgcatgcacgaaaacacactctgtttgtgtacttttgttttccattgcctagttaaaacacggatgtctctctctctcccttttttttcatattgtaattaatcagtacaaccaagaaaaacatgatcaaatcatagctagttgcatgcctgtattttgtgtttcccatagtttcttctatggtattgttcaattggaagtgccatatgcagtaatctgtcaagcaggaaggctttcagggactaaaagacatctgcgatcgatctgtgctactctatgattccatgatttataactagtccaaatatgtttttagataatgtactagtccaaatacatgttgtatcgctcaattgaaagtgattagtattgtcttcaaattacatcgaaaaaacatcatcatcgatcaaaccaaaattctgaacagattcacaggcatcatagattttgatgggcaaaattctgatcaaaattcttcacccatatatctgtacgtccatagatttgatcaaaattcgatctatatatggacgtaaaaatttgatccatcgtacattttgcccatcaaaattcttaaccaaaattcataggcatgaggatttttatctatgggcaaaaggtttactatacatcaaagagtacatcaggacgcaaacctttatgcgtcttcacggcagcatccatgtatgaaacattagatgaggcgacctgtgggcaggcggacgacggcttgaaccgaccgatttcgacgaacgagtcgtccaagtgggtcgagatggttgatatcattttgctaggcggcttgaacctggatttggatttaacatgaatattcctctaaatggaccatcccatcctatccatctccaaatcaaacaccaagaaaagtgcgttcgtcctatcctcatccatcccacccctccaactaaacacaacatcagtcattccatcactgttttgtaccgctgtcaacactgctctggcagttcaatgcagcacctggcacagaggtaatttcgacgagtaatagaagaattctcgatgcctcataagcctaccattgcaacccaatggcctagccctcatgactctttcacctccccccccctcttttcttgtagctttagatatgtgctcgttcaactattcttatatggagcaggaaaaaatgaaggaaggggagatataatttatgaataatgaataatcctattttcagtgcccccttattcaagtttgcagctaagctcattgtgcatgtacaagt

SEQ ID NO: 7693 - DNA, 6096 bp, Oryza sativa
ttcctgcagcccattaacaccaccttgagagtgttaggtacggttagattcttgtttaacttgactttgcctcttcatggacagcctaatttggtgatttcttttttctcgataatttgcaaagagaacccgaacagcatcttcacactatataaatctgtaaatctgcttcatgaaacaccataattggtagaaggggtaaagaagaccagggtgtggcctctttttagctttgagtgatcaaagctaagcaaagctaattagaggcacttatgaaagctaattaaagtgctttgaatctaatctaatctaatctaagtacggatttcacaagtggaagctggaaacagggagcaaaagagaccctgtccggtccaggtgagccctgcgtgcgtgtcacgtgctgccgctaagctaacggcgttaattggtggcttttccgtccgcccggcatcagaagcttcgctaacggcgccgtcatgggacggcgagccccagtgtggggcccacggtggcaggtctggctagtgtgctatgctcacctcactagggtgatgggtaggctttggctccatcacctttgtcattttcttttatttaccttttgttttacaattcatatattggaaaattctaagctgcccttacatcactatctacagtagttggtgttaaaataataaaaaatatttatatatatagtttttttatgtaaggattgatttgaaaaatgtgtctcagcataaaggttaataggtttagttttgcttttaataggttaggttctattctagtattatgtaaagcaacatcatatctacatgtcattgttttgattttatacataacacagttaggacaataaaacacaaccagaagctaattagatgttacttttcgttttacaattcataatttggaaaattctaaccgccattagaacactgtctacagacgttaggtgttaaaatagtatggttgattatgaggatcgttataaaaaaatgtgtctcaacataaagattaataggtttagtttttcttttaagagtaggttggattcttcattttaatatgtatactaatgtcatatatacactgtcatccttttggttttatccaaaatataatttatatagtagaacagaatgacatgacaaaacattgattgagttgtgtgtcttattatccaatcgaagaagcgtgttctgaagcttaagcaaaccctacatttcttgtacggttgcatgtctaattaaaattctcataattcaagatttaaccccctccagaatccttccgcgcattcaatcaaagtcaaactagaaaccacaaccactccaaacaataccctatctaatctaagctagggtcgtaaaataagacaattcagtacgactattaatacaggttcagtgagcaacccattatgtaccgttgatatcgtcaacattactcgttccccgaccgcataaattccgtcattaccgattaatcgacatcgactcttttcaccccaagagtagaagaaggtgaaaaagaaaaattacagtgctaggtaaaataccaaaaatagtgtaggaccatttataaaaggggggtgagttcaccatgggaggtgaccagaatcactgcagcacactggcaaccgtataagcccaccgcagtctcctcgcttcacacactcctcgctccactgccatttcccgcgtagccccctcggcttctcttacatttacattcaggtcctccccccctcacggttcttcacgcgcgcgagggcccctttgttttctcgtatttacaaacaggtccctcccatggacaagaagcagggcttcttctccgcgctccgggaggaggtcgcccgcggcctctcgccggcgcgcgctcgccgccggtcgcaggcggccgccgcggcagaggtggccgcggcgctgcggtacgcgggaggtggtggtgggggggagatgctggcgccgctcatggagggcccggatccggagtcgggagacggcgggagatcgtcgtcgtcggcggcggcggcgaggagggaagggtgggggcggtgggtgcgcggccagctgtcgcgcgcgccgtcgacggccggcgcggcggtggtcgcggcgggtggtggcggcggcgcggcgaggcggaacgacctgaggctgctgctcggcgtcatgggcgcgccgctcgcgccggtgcacgtcgccgccggcgagccgctcccccacctcagcatcaaggacacccccattgtaagtgctcttgggtgaaatcctctcgagtgaaaatttcggtgaatttttttttgtggattttgagttcttggattaattaatttctaaagtcgccacctattcaattatttcttcttctagaaaaacctgctggttcgttaggaagaaacaatatgaaaaaaaaaagaaaaagaaagaagaagaactggttcttgatgtgatgtttggatgtgatacattttctcatatccactgtacaaacggtttattcctcatgtagtgttctaccatttcactttcagttacccatttactgaaagaaaaaagaaatcagcaactctttgatgtagttgtaaaaagtattttgttgtagctgtaagttttaccattacgatgtgttcttgcaggagacctcgtcggcgcagtacattctgcagcagtatctggctgcctccggggggcagaagctgctgtcatcggtgaggaactcgtacgccatgggcaaggtgaggatggtggcgacggagttcgagaccggcggccgcgtggtgaggaaccgcatggcggcgcgcgccacggagtccggccggttcgtgctgtggcagatggccccggagatgtggtacattgagctcgccgtcggcgggagcaaggtgcacgccggctgcaatggcaagctcgtgtggcgccacacgccgtggctcggcgcgcattccgccaagggccccgtccgccctctccgccgcgcactccaggtagcacaccggggagcctgccatgtcttgtagtttgatgtcgtctgaaatgtgccattgtgtgtatatggtggaagaaggtggtagtctaactgaaattgttgttggttcatattgtatcttcagggcttggatcctctgaccgcggcgagcatgtttgccggtgcgcggtgcattggcgagaggaaggtgaatggggaggattgcttcatcctgaagctgtgcgcggaccctgagacgctaagggcgcgcagcgaggggcttgcggagatcatccggcatgttctctttgggtatttcagccagaagactggcctccttgtgcatcttgaggattctcacctcaccaggattcagtccaccaccggaggggacgcagtttactgggagaccaccatcaattcgttcattgaggactaccgcccggtggagggtataatggttgcgcacgctggtcgctccgctgtgaccctcttccgtttcggagaggttgccatgagccacaccaagactcgcatggaggaggcatggagcatcgaggaggtcgcgttcaatgtccctggcctctccatcgattgcttcatcccgcccaccgacatcaagtctggatccatcagcgagaccgtcgagcttcctcatggcgagaagagcaaggttggtcttctccaatgccatagtgctaaggtggccgcgttggagaaggcagacgacaacgtcgcgtggagcggagcactgcagcgagatttcaagtgatttgctgtctgttcatagttgcttcttgcagtgccagtgctactgactcattttgatggttgtagggtagcaagaaagagccaagggaggatgatttggagctttgcaaattccaaatgtcctgtaaataggaagcttaaggaattcacatggtcttccatatccctgaggaggcctattgtgaagaacccttacctatcttattcagatatatggtagtaggtagttgttagtaacttctggcgtttttttttgtcggtgccttgtggaagaaccaggaggggtgtttctcatcctgcacccaaccacatggtaagggatcatggtggtggtgctgttctttctcttatagcgatactaatttatcggagcccagcgaggaagaagggtttcttctctggcaattgagagtgattttattctgattttagcagtccagtgtgcttttggttggtgatagtctccggtcaaaactaactttaggtgaaagattaagagttctgaattgctgttgctctttgtttagggttatcatgatgggtctctggttgtttttttccctgtccttccttcacatctctctttatttatatagatggtggttgtattctacagaagttgatgtaagccagaacttctaatgaatatcatggaatgaattgtttctttttgtggcttatggactcaatttgcccccacactcctgcatgctaaagcaaatgatgttagcttttgaatggtaatattgttagttgtataatgcaacatcaatgttagcttttgccactgcttgcattcagctttagtatgctgtatatgctggggagtatgattcattaatatgatggcatggtccccatgtgcttcagcctcaggtgctgtgatgaatacatgtatttctcttctttcttatgaggtgtaattagctttgccactatgatactatctttttgtgctccattccctgagaagcgttcagactttcatcagcacaatgggtgccaccactctgatgccattagcattgaatccattgatgatctttgcaacactctctttcctcctgtgagttggaatagttttattcttagggctgtgtgttcttcttgggaagaagagatcaatgtctctagtttaaaaaaaaattatcactgccctgcctcaagtctgaaccttctcagacccttctgacctgtcctctctggtcaaattcttgtagattggagctttgcagaagtttgtagcacttgttggagttttgaaccattcaaggccccttcgatttgtatggaaaacataggaaatttgtagggtatgactcctattgaaaaatttcctatttggttctttgagacaaaaagattgggacttcaacaatcctatgaaattcatgtgaaatggcacaagacaatacaatttcgatttgacatgaggaccaacctcatgaaaacctacattttgttttatctctgctctttttctttttttttgcaggagttttatctctgctctaattcgtatatttttttcggtctattcaaatggcccttcctgtatttttctttcttttaaatatttgttttacacttgcgttctcattaaaatcacatatttttcctattatcccgttttctcattacacatgctggaattgaataccaagaaagccacacattccaaaggaagcctagaaaagttcatacaaccatactagaatggaacaaagcaaactgaacatgccctcaagcatcactaccttagcctagtttgacaatgaagccgcctcctacacacaaaaggctacacaagaaaagcatgcaagaacaagctcaaccctactcagctactatccagcaagagcaaaattattgcaagccgtttaattgatccttcattttcacacatggttccaaaccggaccctacgtctccagaaaccgaagaaaaattgcgcaaaagatctcccaatgcattgctgaaatcaatcaaacacacatgaatccagcgagtttctgcagctttttctccttctgaaaaccgtttgctgcatttgtgtgttttaaaagttcagagatcgatcaggaccacacgcacacacacacactgctgtcactggagcactccaaggttgttaagagcagagagcacttttagacttggactttgaacagcaaaacacacaatcaattatggagagaggagatgtgtgtgtgtgtgtgtgtgtgtgtgtgtgtgtagggcattgcatattgctctctcttttgacttgggtgagctaaaggtgaagtcttgatcaaaaagttcagagggaaaagttgccctcacaagaaaaaaggaaacgttgcc

SEQ ID NO: 7694 - DNA, 5797 bp, Oryza sativa
ccattggagttctcttctatatgaccatatgaataatatgagctcgatctctgcctctctgctcttgtgacatctttttgtagggcaatgaagaacagtattatctcttaattgcctgcaaaaagtgtagtccctttgaaaatgatagactgaaagcacggatcatgattcatgaaaaaaatgatcccgggatgcagagtttttattcagcaattagaattttagttggggtttgtcccatcaccttatggcttgattttcatataacaaaaatcattggttctgtgccttatggtggagaccagagatgtaaatcattttcattatctaaaaaaaattcaacaaatgccaaatcaatcacctcaacattaatttttcctgtggaatgcgattatgattattcaaccttttacaataagctaagtgcaggagcattccactggacaactattgactcttgatgtccaacggagactgatgaatgaagatcttgatctttcaacttgagaaccagttttgtaccctatgcctcccaggccaattgttgtccatggcaagaagacaggatctgccaccttgtcttgctcatcctctctatcagatcaatgcctgccatagttctccgatcctcctatctgcacttctttgtggccaaaagagctcaaatgcatgctcccatgatctcacgtacgtactcgacatttgtaccaaattggcatggcaaattcataggatcaaaatttgaggtctacactttgggggtcatgatgttcggtacaatcgaagattcgtagatgtaatagaagagctcatgatgcctcaatcacctgcatgttcttttatggaacaaaaagagaccacaccaccatatgtcaccactaagtgttgaacactcacggccgtcttgttgagccaattaatttagataaaaaaaaggataggcaagaaattagttatgccctcatgtgtcacaaaaaataaaggttcgctgtaggattatagattcatgaatggcgtgatatggcaacatatgtaaaatgttccaacatggtacatggatgacatataaaatgtgggagaatttaggattagttggagaccagtgtgcatcatctctgcagtttacttataacaattcaaggatttccacgatagatgattttatttttcgaaattcctatgaaaatgcttgtgcaaaaattcaaacttctctttggtcccaacactttatatagagtcaaaataataaaatgggatcttggagtcacaactcgcaagcaagttcgaagggttgagcgggaccagggtcagagacacatcaacatgctcgtaaccatgtacttgttcatttacaaactttttatatcattttttagagaattcttctatttagactaaggaagcttgttattgaactcgtatgattttctagagattttttgtatgatatattcatatcacacaaagtggaaaacattaatttgaactacatatgaaaagatcaaggactaacaaaccacatgatttacatgcacatgtcacactgtctggtgcatgccgtttaaaaaaaagaacgaaataagtggaagtcatgtcgatttataagggattcaattaacaataagcagacactgaaatcagctcactctgtcccaaaataaccgcagagagttttactgattggcccaaaatttaatgtgatcagctcaacaatgtgcaaggatatatctcacgtacaggacatggcagttgggatcacctagccattgtagattatgtgcaccaaggagaatgaaatccaacaaaggctagtagtaagcggcggtattgctccatcgcaagagtcaggtttacttggcgatggtaaacctgatgctggattggggggaatggcaactcctttcacctcttgggcagcgccttgcggcatcaccatgtctgtcccgttgtgagcaaacagctcctggtgcatcccaggcctagcatagcaaccgggccactggtctgatccactcttatcatttcactctatcagcttgcagcacttgccacttgggcttttatgtctcatcttatatggagcaaaattggcagcaaggtatttttgtttcgataatggataaaatccagccttttgcttcaacagaagttatatccgcgtagtacaatgtacctggttttaaaatcaaaataaagtatctaaccaaaaataaagagaagacacgttataaagccaccaacataaagggagaaatacaatttattcaacccctgttagtaaatttttgtttaaagttggcgaaaatttagtaaacctttgtgagtatcgatttacgcaggggcggatcctgttgtgcgagatcacccatgtcactgacagatgaattatttgatccctccttgaggacagttactttgcagccaagaagtattctgcacctacctttcatgtaatgttagtatatctctccattgagaggagagatcccagttgatcagcacacgagggtaaaatattaaatctgatgaaaattctgaatatccctaaagaaaaactatgcaggaaagctatcatcacgtcacgtaaaaactgcaccgaatttatcacaccaagttagggatttgatcctaccgaaagtacgtacaccgaccaaatttaataacataagtgtgacaacatatatacacaaaaatcatcaaaaggtgccttcacactgattttggcttctacgcctccaagacggaactgatgaggatatatcttactaaaccttgagttcatgaagcatattgatgttctacattacaccaaattatcttcgaccttccgataaatgtagtttgttgatgctttgtttctaattctgctttttccctttttcttttgggtaataactgattttgtcatttccgcaactcggcattaataagatttgatcgtccaaatccttcaactgacccggcatttttagaacatagttgtgcctcccaagcattcaattgcaggcatgatatgaggctgcaccaaggaaccttctgaatgtgtccaacatttgtattttggcagtgaaatgtctccaattccaatggactaatgtgctcaaacatttcgctgactctaggattttgcaagaactgcaatatgtacgcgtgcaaatttatagttagttactgtaggacggcattcatcaaatcgatctaatttgagcttgtaagctatttttttgactgaaagaaaagagagataatgaggcaagaacttacagtagtgtcacgttgtagggtgagcagggttcactttctcgccggtaaccgcgcggtaaccgcggttaccgggcttaccgtggggggtcggtaacgaaaaccggcggtagggtttgggcaaattttgctcaaattcaaaaatttgaaaaataatcgaaaaaaatcaaaaaaaaatcatggatgtaaagcttgttttgtatgttgttatggtgaaaaaatttcatcaaaaagatgcaggtaaattcaaatttgagcgcaaaacctattgtgaattataaaaaagaaaaaagattaaatggaatgggccaagtatgcactgttcacgaggcccaataaggcccacaatgggaggaaaatatctttggaagcctctgcttcgtttctctggcgaatcctaccgtttttcccctctctcgcgtagctgcgctcaggaccgaaggggcgacggcgtgcgcccgcgccaaatccgccgccttcgcgccggcgaggccggttcccgcgcggtaagcggcggtaaccgcgcggtacgcgacggtaaccgcctgggtcgacgggcaagaggtaatccctccgttttgaaggttttcgcgcggttaggagcggtaaccatgcggttttgtacggttaccatcggcttcgtaatctatgagacgatatacgtatgtgcggtaatcgtgtgaaaaccgtggtaaccgtccaccctaccgtggttaccatggcttgaaccgtggtatggtattttttactgtgatatgcatggacatatcaatagaacatatttttaccaatatgcatgtgaaatacattgggaatatgagtttatttcggcatttggttgcccgtgcttggctaaaaccatgcatgtgaagtatatttgattgctttggtctatgtacatataggttaaattaaatacgtcatagtatggaagaatttggatgcatgcttaccagtgtacatataattacgtcgtattattgcataatgggaggtatgtttataattagcagtgataatttctcatgcatttgatacagggtggagatgtcagatagtagggaccctgtgtgggagcacggggagaatatcccacctggatggcgctgtaagtattgccatacaaagaggggcggtggtggggcaacaagactaaagcaacacttggctgcaagagggaagggggttacatattgcaattcagtgcctccggatgtccgtgagttcttctgccgtgagttggacaggataaaagatgcaggtgaccagcgtaagagtgatagcggaagaagggttgaagcagcaagggtcaactattatgacctaacaggtgatgccgacgaggaggaacaaatggaagcagccattgcagtctcacgacaagacgaaaactttaggagggatgttgaggagcgtggtggcacttatgagcatggcggtgggagtggatccgctcagccggaggcacggaaaggtagaagtaacccaattaccaatatgctacgaagggctacgtctcatagggagtcacctgctgtgagagattacaacctagcatctgccaaggcccctgtgcagccacgcattgacacaggattcttcacaaagaaggggaagcaagctaggcaagccattggtgagtcatgggcaaggttcttctttaccgccggcattcctggtagaaacgccgataatccatactttgtgagcgccgttcgggagacacaaaagtggggtacgtatgcatctattaaggaacttctttttttctaactcattgcgcactacttatttcatacgtcaattgtaggtgaaagtgtaccttctccaactggtaacgagatagatggaaaatatcttgattctacagagaaggatgtgaagaagcaatttgataggttcaagaaggattgggatgagtacggtgttactataatgtgtgattcttggacaggtccgacgagtatgtcggtcatcaattttctgatatactgcaatggaataatgtttttccacaagtccattgatgcgaccgggcaaagccaggatgctaactttgtgctgaaggtatgtatggttcatgcaacaaattacttcatcacctgttatcgtcagtgttaggggcatggactaatttttattatgttatctaccaatgcaggagataaggaaggtagtacgcgaaataggctcggagcatgttgttcaaattatcacttacaatggctctaactacaagaaggcgtgcagactactacggcaagaatacaagacaattgtgtggcaaccttgtgtggcacacacagttaacttgatgcttaaggaggttgggaaaatgccagaccacgaaatggtgattgagagtgctaggaaaatttgcagatggctatacaatcataacaagttgcatgctatgatggtcttagctataggtggtgaactggttaagtggaatgctacaaggttcggaacaaactacagttttccagagtttccttaggaagcgagatcttttcatgcaatggatggcttcctc

SEQ ID NO: 7695 - DNA, 1468 bp, Oryza sativa
gtttgaagcatacatggagatcgtgaacaggaggatgcacaacctaaccaatgagactctcatcaatgccggtaaatattgatcataacataatccacatggcatattatgtaactcttacttaacctgtgccatgttttgtagctgccgcattgaaccctaggacgcactacgcgtattctccaagtgctactgtcttccaagacctccgacaggcattcgagtggatgacggatatcgatacggctgccgccgctttgctggaggttgagatgtaccgacgtaagacgggtgaatttgggagggcactagcaagaaggatggccatagatgggaaaacttcacctggtatgtttctaatcatggaactatgatatatctaattgatcttgatgtattcagaattatgaaatgacatgttacttggcttttgcagcacaatggtggtctatgttcgcctcagacacgccgaatttgaagaagcttgcgttgcgtttggttggtcaatgttgctcctccagtggatgtgaaaggaattggagcacattcgcattcgtacatacgaaggtccgtaatagacttacccacaagaagctcaacaagctagtgtacgtgaattacaaccttcgccttcgaattcagcaagcaaatgcccaaattagggtggaggacgatgatccccttcaaagattagcggacctctcattctatgaaactaacaatcatatcagtgcctggatggacaatgctcgctctaatgcttgccccgaactagatgaagattcagctgagagtgacgctcccctgcctagtcaacttgtgtctgacctagtcaacttggatgacctgcgaaggaccacgggagcttctagtattgctgagtgggctgatacgaatgtaggtgacactcatattgggaaaaggaagactcgaaagccgccaaaagcacgtccatctaaaaaggtaaagggcaagggtccacgatcgactagtgttgatagcgatgaagagacccaaggaagcccagagtaccaagagtccaatgatagtagctcaagaactgaaacagatgacggcgacgacgatggttaaggaggccaaggcactactaatgtgcctcctaggggtcacacccaacaatcagatcaccacagccccgttcaattcactggtgtgatataattcagttgcaatttcaaccttcatcttccaattcagtactggataattttcttgcaattttttgatttgcaggtgagggcgacttcactcatgctactcaggaccaggatcatggtgctccaagctctcaacgaactaccattgcaccgggagtccgacaacagcaacaattcagtgacatacaacaggatagctctagctcattcagtgcctctagctttgaaagtggctatccaacgtatgtgtacaaccgtccccaagcttgagtattctatagtgtcaccta

SEQ ID NO: 7696 - DNA, 694 bp, Oryza sativa
aggagggaggaaaattacacttattctgaggaaaaacacgatgcgccgtcgtgccttcgggccggccgggcatggcccgagtcgtgttgggccatgcctgggccgtgagtgcggcacgtgggttggcaggcacggccggtgcatcggtcgggccgtgctggcccgacaagcctcggcccaggcacggccaggcctaggctgtgccatgccgggcgggcccatatggccatctatatttcggggggtgatatcctacattggtgggaaacctgcaggagaaagctagtaaaggaacatcgaaggatatttgatggtgtcatcatatacacatcatggtgcatttggctgcagcgaaatgataaagagttttcaacaacgtttacaatgagacagtggaagatgtggtcaacatgtttattagcctgttcagaacaagggaagaagtgcttgctcaaatgtagcttcctaaagtttttagcctaaagttgtcttttttttccttactgtgttgctgctcctgtaaaaagggctgtcaaaaattatatttctaccagtggagcaacagaattataggtcagaaaaaagatgatggaaaaattcattatctagcggtatactgatagaaaaaatatttccgacagctattgccttgcacagaaaatataaactggtgtcagatcgatctgtgaaactt

SEQ ID NO: 7697 - DNA, 6476 bp, Oryza sativa
gtgccggtggggaggcccaggcacggcccggcacaggcccacccaagtcgggccgtgccatgcttgagccaggccaaaatgccgtgccgtgggccgagccttcgggcctcgggccttatggccatctatgccccgaaagcatgggtacccggcaggtgtaatcataggcgcgtaaagagcactctccatacttgcttggcaaaaacacaatccatcagtaggtgccaatcctactgatacaaagctccacagtctggtaatgtccagctcctattatgtgttgtattgtacgtggagtacatttacggtgatctctactagtagtattctactatcagtattattgtagtagaagtgatgtcaaccattgatttatgagttatactaccatttgaaaaacttacaaactctaacaattctactacacgtagtagatgcgtggtagtaatagtataaatggatatgatccattgaattagaaaaaggaaacgttttaaattagttccagtgtaaaacacctcccataacgtatgttagtggtaggtgctgcattgaaacagaaatgtaacattgctatggtcaatggtacctacagctctatatatacatggaagagtagactgtcgatgaaggagctgcagcgatgctcaagctaagagatgatagatggacatttcttgttgctttggtcagaataggatgcatcaggagttgccatgccacaagaatcatgttcagtaagttcctacatagtcactattaattacttttacctagcttgtcgatagttggttcaccgttctacatgcttaaactaaaattgcgcaaataactgttatattgcatcctgcgtacaggatctgcgagcaagaggtagaggacaaatgcttgagcatagcggttcatcagaattatgaacagttctcattcagaaagggaatgttggagctagtattctctctgcggtgcagccatgcaaatcctcttgtttataaaagcagattgactgataaccgatgtcgatgctccatgtagagtggtttatggtccaaggggttgggacagtggcagccatgtgatgaattcacaaagaccactactgttccaccgtacaactcgaagaactcatggtgctgcggtgaagctccttgtgtctgcggaagtgacgaatgcacgaagtagatcattgtggtaaagttcacatgtgaataattgttggaattcagtttaatttggtctagcagataaagggatttgtgcaaaatcaaagtgttttttattattattctatcatgaacaattggcatctgtgattattggttttaatatttgaagattattggcgaagtggttttggagatgataggatttacatgtgatatacaggaactgctgaatatgtggtctggtcagaccgggcatgtgctgccggtcagactggcttgtattgcgcggtctgaccagccgactttgtgtcggtttcggtttcgagttgtttatttggatttcatatttatggcttctagatggatactatgcgtatgtaatactgttgtttgctactaatgagtcaagttggagatagcttggtctcggaatatggtttctttgtttgattcatgtgtaggtgacttgatgcctcgggagagtattgccggtgatggatcgggagtcagcttggtgataagacgatgtccatgatggtcagatatcatgcgggatacttaggctaaagttcaaacgcacatggttggtgaagattccatatggcatacgatggaggtattgtgtgcgtatgggatgcgaagtcaaatttggaaggagtccaaatttggtatgattggagtttgtaaagtttgtttcttgtatgagaaggtttcctaggtggattaggacttctagtatgattttggttcgtggctttaggctgcctacctcatgtataaatagagagggagcgtgaggcttctcggtatcacttttgagagcattgagctgtgagtttagttagggtttcgagtttagtcgagattttcgtgaggagtgttattgttgcactttgtaaacacagagagaagtaataaagttgtcatctactttaagagttcttcgatttgtgtttctcgggttcggcggtctaaccggcgagtcaccggcggcatcgcggcagtcagaccggtggagtgaaggcggttagaccgacggcggtttcaggcgacggcagctgatcaggtggtcagaccggagatacaacctctttcagaccgacggcttccaggcggtcagaccggcgcaacaccttcggtcaggccgtgatccgtcgaatttgagggtaactttttattccgcaaaaagtttggggttttggttagttctggtgtttcgatgatacaatttggttactataccttgacattcttggttacgcctgacttggtgtgatgagtgctgtttttgtgtggctcaaagagaactttcctgcctatttttgtctttagacatgttcgcagatttctcttaattacatctcaacatttgattggatggctgtgaaggttcctaatgcttccactaaatggagagatgcacgtctatgaaaagcagctggacaattcttcaggttctatatacgagtaactgagaggggtcaaacaatacactctcatagtcatatgtgatgttcgaatctctccttgatccatgaataaacagagaagggatctgaacttcagaataattgtaacaaactgaggtatgaacagttcatcaagggccccatccatctggggtttatcgtggcaaaattctaaataaaaagctgaataaactctcagagactctgagaatttgaggctatgcttgggataggaggcaccaggagttctcttgttacttgaagtgatcttgcatgcccgtcaacgagggcatgccaacggagcgtcagcgcagggccccacaaaaatttggggcccccaaatcagagtgaccagcacaaccagccagccttagcatatacaactgacgtcctatgtgtgttcatgtgcatgcatgcgaaaccagcttttgaatccttgatcaacaatgacaccttgagcagctggccgactacctcgtcaaccatattagagtaagactggacaactggtaattaagtcaaatactgaattgttgaattgcatgcatgtatccatgcatggtcaattgaatgtttcagtactcttcttttaaatcaaattaccatgaatataatttactaatttaaatgatcaactcaatcaaaagtaaatttaggatctcaaattatatttcgttccagggcccccaattcctggagacggccctgtcaagttggtactttgatcaccattccacccctgagggaattcaatgacctgaacatgccgccattcggttaaatcttggcccccattaaaacaaatgaaaaatataggaattccaaaggatttgtaccctatgaagccctttcgatatgagcaggtatggtgtaaacaattggaaacttatttgtgcaaatgttgatacaaataagtttatttgcacaaaccaggtatggtgtatcctatggctgctatgcttattgtactatgggtaaaaaagggaacctttaaactaatggcatatacacatatcatgcgtacacattgttctctttgtttagcacattttgtgattaccaaaagccgagaacgacttttcttgaagagatgatgtggatctgccaaccaattgcacacattgtcctttgcatgtggattagaacaaaaggtgatatcatttttctcaaattctaagcatgaaatatatgagaatttgatgttacaaaatatttgtcacttgattactttcagacatgagatatttgaaccattggcatgcataaacaacacgtgggtctagggagatgtagcttacataattgtaaagcttgtcaagtctactttccaaaggatccaatggcacatcattcggagttttctatcaccgacaattgcaaaatgaagacatgttgcgcaaatagattggttgacgcgcgagtagcggcgctgatgatgaacatgggccttgcacgacatgtttggatggggatctatttccaaggcaaatctttggttgggatggactccatccactagttccccatggattgaatccttcgaaaacaaggagtttgaagataagaaagaaaatatttgacttggattcggtttgggccatcctggatatgcttggactaaaacgtttttttctcttcgtccgaagtccattttggacgtgtgagcacttgttggaaagtaaacttcatggcccacatgatggagaggcccacggacacaaattcattctggttccaccacaagagccaaaacaaactgatggtgctaccgagaggtttccatattgtgatgtatctgctcttgttcttttcctaggttttgtgctgtcaggcgccaaactagggatagtgattgggagttctgccatagattgttcttgcttttccttgcagggaattgagggagctagcaagagatccaattttgcatggtcgagtgaatcaacctatcaaagtgtgttgttttgtgagttcatggtgaaaggtgcgttgcacaagttcccccgcatcacctttgaaacaaaggagtgattcctaccgatttatttgaatttcctatggaatgaactattgtggaggaattttggaggaagtaagtatgaggtcttacctcttgttttcttcttcccgtatcttgaattcctacatttttcttgtgtgacaatcaaactttcctatgttttcaaatccttcaggaatccaatgaatatgatgttctattctcatgtttttcctactccaatgttttgataatcctgcatttcaaaggggggcaatatagctactggttcctccatgtccacatgcacctctagataagggtgaaaacggtatggaaatttcccgaccgtaccgataccgtttccgcaaaactaatataataataatatttttaccgatggttatcgttttcaaaatttagttttttttaatttctatcagcatgtcattgaagttgacactaatagatgaattcataaatatggaaattttccgaccattttcgttcgttttcaaaaaaataataaaataatgataccgtttccgaccatttccgaccgttttcatccctgcctctagatcatggtctagcactgatcagcttgagttggctagaactgtttgagaaaaagaaataccaaacttttgaagacctaaccactgatgagctacgttttgaaaggtaagataaaggaatttaaagtagagtagttttcggtagaacaaaatttagaccacatttggaaggtgtaagaatatggtgcggagcaaatacttttaattcacacacacaaacaagaaactaagccctggcacccttgccctacttctagccctgcttgtctgtgcaagcacaaataatgcacgatgaacatgatttcagacattgcctagtgaaatgcattatgtacaaaggacttgctcactttgtcgatcagcgatgagatggaaatacacatccttgctcactgtcaggttacaaagagtatatgggagcagtgtgggcactagataacatgcgaatcgatcaatgggataccatggacaccgtggagaaatggtggactgccctagctcaaacaccctgaatagcaaagagccgactgtgctcgctgatccttctagtcagctaggaagtttgtgcaggaaaataactctctaatgtaaagcaaatgctccccatacctcccaaacctaccaaaacaaagacatcgcatacatcatagtgccgtacaccctatgtatcaactctcattcccatttccagcatttggcacttgcactcactcgtatcatcttttatagagaaaaggtagcatgataatctgttcaattcaggggaaaaatcactgtatgattgagggatttctttcacgtggaacattattcaaagctaattaaaaagttacataaacgactatgggcttgttcagtttgccaccacttttaacctgctaattttttgagttactaaagtttggtaccatagcaagttgaacaagctcttgtcattgttatcatactaacggctctctctggccatctttggtgagctctgatccaagaatttttggagctatatatttcaagctacataaatccacggatctagatatgcgattacgttgataacatttagataaatcattatgttcgcattttaattgaaatttaagattttaaaccactataatttaacatataaattttaaatcaaacgtgaatctaagatctggagctgtgccaaacaagacataaaaattggcatttctggaaatttattctcattaacacatgatcaaaatttggtaagctccaaaccaaatacatcgaacgttgg

SEQ ID NO: 7698 - DNA, 7286 bp, Oryza sativa
gtcaccatcatctcctgctcaaacaggatactcacacggccacatggaattatatgcactgaagcgtattacgatttcagagttcagacatggccttcttgccagggaagttctatgcattcaccaaagcagaagggctccatgttcttgatctcaaaataacaacaatggcgtcggcaatcttccatatgcaaacgctggaatccttctgatggctgagcattatcggtgcaaaggctgcaagctgagcaaaatttagaatccttttcatggctataccttttctttgcaagctatgcaaactagctggtttcctttctttcagtgatcagctcaatagttggtgtggacgaaatggctaggatttgatgtgtactttaattttgtttgattatgtattgtacaggttaacgtatgtcttagggtgaagggaaaatgagtgatctcatcccactgaaatgctgatgattttggacggctcaacaaccctcaaacgatctatatatgtctttacatgtgtctaatattgctttgcttatccttttgctctggaataagataggggcgttatggctgtttcttcctactactattctttccatcagtacaatgaagaaaatcacgagaaagtcatagctagttgtgtgcctgtactttgtcttccctaaattttcttctgaagtattgttcaactggaagagtcatatgcagtatatactgtccagcaggattgcaggaaagacttcaattaggaaccaaaagagaatgcataattaatggttatcatacatataattgttttggcaaccgttaccaccatgttctggagttggggagagcggcatatataaagtctttctgaattttctggtttcttcgaattttccctgccattttcttgttttgattgtttgaaacagtagcaatcccttccaatccactgtccatccaagcaatctaaacaagctaagggatggaaggcgattgggagggaggggattgggtgtggaaatggagatcaacgcggtccccgactccccacatggtttgatttcccccggaaggaatatcccaacgtaccgaaaaaggcctaatagaaaaactctgttcctgttgcttttgttgttgtaggcctaggaggcttcaggagctcttgtggtaccttcatcaagctttgattctggaaaaaggcatgatttacaaatttatgacctcgaatttgaaccaataagttcaatgggtcaattgagtacacatgtgtagtatgtgagatcatggggccatgtcgcatattttgaattccgagaagtgtagaaaggggcaaaactacagaatgggagagactgatagagattatgcaagttagcaggtggcaggtccgtccttcttgttatatgagcgccttagtttgtatcatgtttcgcaaaaaaaattatatggttataaaataccatcaaacgaatgtatgtgaacgtttaaacaagaccagattgtacattcaggagtaggcctaggaggcatcgggagctttccactatcgagcagaagttgacatagtgcgtgaagtcatggacgtggcattgagggacacagaacactagcaactctctcttgcagctcttcataaactgaaagcgcacgagctcgatgtgcgaaacagacagtttaacgaagagttgcagtgtttaacttgtatgaggcaactactgagaattttcttaatggaatgatgcatcagtgtgaatttcgatctggttttttcttaactgcacacataacactctgtactctgtttctgaaaggcagagtttatcaagccttgtgaccaaaggcaactgcttttgtttcagttactcaagtacaggacatgaacagagaatagaccaccgaattttgatttatcattctaacaattaaacaaaacgacctcacgtctgatgactctgatactcatcttgtgcatgttcagtttgtcaggtctatttttgttgttgccttttcgttttgttacatggaagtgtctaccatctatggcgacgatggcaatgccttgccttgtaaacatgcacattcggtagctcttcgagggtatatacgttcctgagttcagcgcggtggactatatttttgccaacaaaatgcgaagtaaaaaggagctgaggtagattaactaacaacatttaggcatggaaaactaacaacctgtaatcaaacagcaatacatccttgagtgatatgtttatctctcttttgtctataaaagagctggttatgaataagcacaattgcttggagcaattagagctagctagttctgttcatggaggctgtgagcttctgtggcttttaccgtacgtgttaagcttaattaggaggcaccggagcccttgtgttaggttgggcaacctatgattttaccaaacagcattgtcgctaaccccagaacgagttaagtattgtttgtgtggtattaattttaatatggcatgcattaaaaatccaaagaaataaatagttaataaaatatcaagaccgtcgagcccttgagctgataatgtagtgtacatcagtatatatatgccatcaattcatagacaaaaattgataaaaaatatagttaacacatcaatacgtacacatgtagaacagtagaagaagagtaatcatgtattatactccgtccattcctttttcttttgttagttcaggcctgtgcgctgtagttccagggaaactctgtctacaacaacaacaaatgaccgcaatgatggccgttccatgcctggagttgttgcaagaactcaacaaatgtaaatatattcctctgcattcaatccacccaaatgagagcggtttttacatattaatacatggggtatacaacaggaaatgacttcggtacccctaggcctatgaggaatctgaggtgctggccaatgggtcagccctgggtctattagtaatctcataggtgacaaggaggaggcgcctattaaggtagcagcgccggttcccgagggagcccgctattacctggataaaggcatcccccgggtaatatcgtgctccgtctggtcatcatcgacagtctcagaggtggttggggcgcaaagtgtgcatttattccaacccactagtcgcctgattcctaacttgagccgttgagggcatattgaggctcgattcgccccgggcagcatctcgagcttcggaggcctccggagctccgaagtccctggccgcctccggagttcttttgctaggctccggaaaccctctgagttccggagctcgagatgcttcctggggctccggagcccacggatgttacggcctcccggagcccttccggcgatctccagatcccttccaggctccggggctctcgccgtccacgggatccgattatctgggatccttggtagcctccggagcggccacctcggtcggggaccgacatggccccgatccacggtcatctccctgggaggatggtctccggagcgcttcaacccttcggaggatggctcctcaatccggagccactcccccaacaccttgcctggttaactcacggagtgaactatattttcattggtaacatgcgataaagaaaaggtgatcaactgaatatctgaacacaagcacatgccatgtggcactgaataactgcatgcatggaatcaaatggtacgtcgttcatccttttgtgatatgcatgatgatatgttttggtccataaaagggcatgcagggtggagaagcacacaaatgctgcaagcaatgagaggaacatacattagcccatgcagtctgctagctcctatggcttttgcagtggtaggcctaggaggcatcaggaactcttgtgctaattttgtcaatctttgattctaccaaaatgcatggtcgctgacattgaactgacgaataggctatgtcaattgagtacagatggtgagtattaatttgatctcatggaatcatgtgaccacaatactagaaaacctattttgccagacgggcgaaaaccgccttcataggcgaactgccaatccacctgtagaaaaaggtctgcgaaaatcaatttttttcacaggcggatatatggtgccaaaaaaacttatccacctggaaaaatggaagggcctcgtccacaaaaatcgttttcctcgtagtcccatttttagcttactaggtggcagattcaatttactagcttagggcgtgtctaatttggatagggtttcaatatattgcatgttttgagagatgagctcccatgtttgtttgttttttttactgaataacattgatttggatataaggacagttcatgtcatcaagaattcgtggatgactattaaatggaaattcacaagctatgaaaatagctgttgccagtaaaaaaacaaacaaacatgggagctcatccctttattttattctcttgaatatataatttcatctccatcttttaatgctcactcgaatgatcctgaatctagaaggcactgaaaaaccatcttacaactgattttttttacaaaaaaaataattaaacactcaatggtaggtgcacattgaattactgttatccctgaaatgtttcttcttttccctattgctcttgtatcttccctattggacaccctagaggatcatcactactatcctttctggtccatgaaagagttgagacaagctctgacaatgagactggtgagtgcacatctgaaatctgtttggacaagagttgagacaagctccactttcttttcggccaaattgggcctccaatgtagcccatgcaaatagtccagcccaacaccctgaccggtgtagtacccagaagcgcgaattttttttatttttaattttttttattaaaagttttacaaaaataatttttcattttgaaaattgacagaagtggtcgcctaccgccctctgggagggcgatttttaaaaatcaccatcccagagggcggcgaaagtgacgtggcagacggccgttcgctctcgggcgacggccgtcaacgaaatttgcaggcggcccccttgccgccctccgctagggcgattttgtactgtgcggggggccgcctgcaaatgggcggcggggggcctggaattttgcaggcggcccccttgccgccctgggggagggcgaatttatactgtgctttatatttttgtataaatatcaatagttatcaaatctttttatattgaaaactatacaagattaaaatctccaagactggtaaaatacaattttattattttttagggcctatttggaatgttaccgtacaaatattttgttagtgccaaaatataagcaagttttggcactaccaaatatttggtaaggtaaaattgcatttgatcatatttggtttgctgccaaaatgtaaaattgtagtgaagaatgttctacataatctcaaatctagattacgtattaccaatgaataggcttcaatcgaaatcaaacacaagtactattcaaattaccaaaatattggtagggcatgtttttggtagcaatccaaataggcccttagtcttacgcatacaaaaaaatcaccaccataattaaacattgtaatgataagatagataagaagtgccatcgatacacggtacaaatttgtcgatcccgacgaatcaagcatgcggtaacctatcggcaccttctaggtcggtcagaatgcattgcattctcgtggtccttcaatcgttgatactctacttgtgtttctgactctgttatcttctggccatgatatgatggagtgacattgtcgatccatcgagtaaatccacccatccttggattgccctgtaaaaaatagtaatgttattcagtttgggtagtaattttgtgcaaatcatagcggattttgtaaatggttagacatacaacgaaatcgttgtctacattggggcagacaaaatatctccttcgaaatgtttgttcagcaaaggatgtagccacctgccagcgatctctgcacccacactttggacgctcggaccatttaggtaaccctaatggattgttcctccagtctaagcttgcaatttccacccaacgttcgtactccatccaagcatgaatgaactgtatggtcggttcaggttgcgttatcggcccgccacttgaagtaactctgactgtgtcaatccattgtacgaattgacatttccttacatcctcctatgtacatttattttgggatagttaagttaatgatagtactgaggagtgatgaaaagaatagttgtaattaccacgaaatcatcgtcgacaatgtttggacacaagaaacacctttgtcctcgagttcggtgccttacggaccttatgacctgacaacggtcaccacaacgacactccggacgctcacgccacgtggggagtcctaggggatttacgtgccattctaaagcctcagcagcaattcgacgttcatgctcatccttccaccttaggtagtccgatcttgtttcactacgtgggtaagcacgggttccgtcgttttgtgggttctccatgtctacccactcgataaagttgcacattggacgatatgtctgcgtaagatgttacaattgtgtacgaagaagttagtttttttatccatttgaacttcgaatagatgaagcatacctgatgaaagttcgcgcattggaagaatctcctgccccgagtttgtatcatgagggaagacttgagtatgcatccatccccacaatcgcacaaaggacggtcacaccatggtggaaaccaaccagcaaaaggatcgcttcgccagttgagacgctcaaggaatggcgcttccattttcgtgtgttgtgtgctagtgggaaagaagatatgaagaggttgccttcagattgtcagttatatagcgttgttttcactgcaatatatgtgaactcaatgagatacattattcattagatgtgacaagacgatcacgagtgggcgtgattcactttatgtcaacaggcagcgccgaaagttgatagtaacaactcgagctgccgcttttcatgtgtgctgttgtggactgtgcgcgctactggatctgacactaccgtgaagcgccgaaagtgtgttgtcgtgagcataagttgttctagcaccatatgaatgaaaagaactatgtagacgagacaaacacaagtagtactgcagtagtaatagcaaaagtagtactgctttacaagtttgtaagccaaaagaaacggtcacataaggactgaagaggtag

SEQ ID NO: 7699 - DNA, 2406 bp, Oryza sativa
agcaagaacgtgtgagcaaggaaggtgatgaagcttcggcttcatacaactgcaggtacatccaccatccgccttcaagacacattcctgcacggcttgcttgcgatagataccacgcctgctcctatcaacacacattatttcataccgatgcacttgtgtgccttgagcaacaactctatgtctccgtgcctttttgattttatcttccatgtactttgtcactacgttgccaaacactatgttgttatcggccatggacggaccaattttcttgtatcgatccctaaagtacgctttcgtgccgtgaaggatgaattcaacaatagcaaccaatggaagtatccaaactcctcgcattacccagttgtacacctctgccaaattggttgtcattatgccataccgagatccatcggtgtcgaacaataaagaccacttctccttaggctcattctcaatccactgagtgaaatttctgatggacgaccctgacctccttctcattgttggtgggtcatcatgtaatgcaccaagaggtatgggaggctcgtcaccttcaacttgtggtctgcgagattgctcatctgtttgcttcgttgtcaactcatccaacttgtcccacaactcattaaatttcttctcttggttctgtgcacagagcctcttaaagagctccataagatgcttgttcttgaatttcttgtagaaatttgcacccatgtgacgcatgcaccaccgactccgaacatcaggccacttagctggaagtcccttctcatcccaaccgttctgcaagtagtcaatagcccgcaacatacccgcatgacgatcatgtataaggcaaacgttgggcctcatacgcaccactgcaatgtgcactctctctaggaatcagtaccagctttcagtgttctcactctctacaaatgcaaaagccataggtacaacctggttgttcccatcacacccaattgctgtcaatatctgacctcggtatttacctgtcataaaagttccatctatgcatagaacaggtcgacaatgcacaaaagcattgatgcaagcacccaatgagaaaaaggctctttgcagcacactctttgttcgatcatcaaccaatgtaaatgtatgtaggtcatagtaagtattattattcctctgggcaatggtggctaacaaacgaggcaaattatcataagaagcttcaaatgtgccatacctcatctcaataatcttttgtttggctctccaggcctttgcatagcttatggtgtacttgaatttgttctcgatgtgcctaataattgattttggttcaaagccaatgttaccaacaacactgctgtacatctcacttgccacaaaagctgaagtgatgtttcggtgatacttctccaccccttgtaagtagcacttgtgctcggtcataatgctaactttccaataatcattccatttacccttatatgcatggacacgccacggacaatcttccttcatgcacctcacttcatacacataatttgttgacttgaccaccctaaactctctctgcaaggaaactgcccaatgcttcaccgcctccttcatctcatccttatgagcataccttgcaccgtcaattacctcgttctccttatactcccagggtacatgatcaccctctgatataacaagtccagagaagtcctcatttgcccaatcagtagccattacatcaccttcctcatcggatgatgcgtcgtcgtccgcttcctcattatccgaatcttccctctccatttcatcaacaattataccgactctctccccctcatccgccatgcccatggcctgctcctcccttggttgattttcctcattttgcatcgatggtccaacaacatcccctgcattgataggaccctctacatcttcggtttgcattgaaacatttatatctttctcttgtaccgacacaaatataacgaggggccatgaccgttcaaaagccatttccacataccgtctccaagcagcagtgctgtccatcggcattagttcccaaaaataaccttctgttgcacgactcactacaactgatactgacattgtgtagacttcttggtctattctaaatcctctcaacaaccaactataaattgactgaaatgttctctccgcaggcctatcgatgcccttagatgtcattacaaaatctgacagatcaacaccatctggaccaaatctaatatttccttcaccgtgaactatctgaaatgtgaccttatttgacattgtgcctgatgaaaacaataactgcgttaacctcgcatttctgtactacgccctaagttacattctctacaatattgttctccaaaattctaaaagtaggttacattctccagatcaaactaaact

SEQ ID NO: 7700 - DNA, 10982 bp, Oryza sativa
  unsure (1)..(10982): unsure at all n locations
ccgtcatcccaaatggtgatatctttggaacattttcattcaccatggtggatagatattaaccatccccgtcacctaataggtgaattcaccgcgggtgaacggtgaacgggccccattgccatctctgagtgagaagcgggggtgtcagcaacgcggattgcgggcaaggttgtcagtatcctgattcgtatcctagtatcttacgataatacgatcctaccaagccgaaatgataccgatcccacttagtatcctaattttcatagtatctcgatcctactattcattactacaccatcctataaaatcgaaatcttaagtgatatcccgattctacgatccctatgatactacaaaatattatttaaaataacatggtttgaaaataatgtaaataaatatgctcaaatttatatgaaaatcagttaaatatatcaaaaccaacatagtttctcttgataaatgtctctatttgcatgacatatatcattactatatttttttatatagaatggctatatataattaatataaatattaattaaacttaaaaaaagaaaatctcatagtatcccgatactacgatacgatcctacgatacgatattactttgagcaaaacgatactacctagtatcccgatcctaataaccttgattgcaggtacatgtacaacctcagttccaaaaatatagctattttttacacggtatcttgttctaaataaaagttatttctccaccgaccttcttctgtcaaccaattacaactattatattttatcaattttatattctcaaccaatcacatattttttttaattattcttatctactttcttaatacttatatcaaccttaaaaattacttacactttggtacggaggaagcaagggctagctctctggcgtcgtgacatcgccttcagcttcgtgccctgcgtcgcgttgaccatgcagtggacgaagtgatcaagaactagccagccgggcgggcgggcggcacatcatccggcccggcgccggcggtctctggccatccatgtcgccacctgagtagcaccacaaagttctctaagttcaaatttttataggagcgaatttcggatcagttatttaagggcttagactgtgttcgtttcattagaatgggaattaattccttcctcacagaaaatagagcggtccattagcacgtgattaattaagtattagctttttttaaaaaaaatggatcaatataattttttaaacaactttcgtatagaatttttttttcagaaaacgcaccgtttaacagtttaaaaagcgtgcgcgtgaaaaatgagaggggaagttaggaaccctggaaacgaacgtagccttagttctctgtttaataggcaaaatttatagttggatgtagaggtcgggtttttttaaaaaaaattgtcgccactaggtcaattttcccattttattttcctattcgcctcttctggtcacacaaagaccccaccccaccacacgcaaagaaaaggcaaccattgttccacgttaatgagttattgttgggtctaattttttgggcctctttgcatgcgcgtcctttggatacaaaactggaaatagttcagtttacacaccccttataactatgaattgagtagagttccatccaccactactagaaaaatcacttttgcatgcggccaaaagcaatttttacgggcggagggaaggaccgcctgcagaccaacgacggtgaaaatcatccagcccgcttgtaaaaatccaataaaaaacaaaaaaatcgcctcactaccgccggcgctgccctctggccatctctgggagaccgcctctcccaggccgggcccgcttaaatctggtagctttcataggtcatagactgccctcccacctctcccaggccgggcccgcttaaatctggtagctttcataggtcatagactgccctcacataccaacaaaagtcttttctacacactttgttgtcctcactcgtgcgcaccgaggccgggctcgcttacatctggtagctttcataggtcatagactgccctcacacactttgttgtcctcactcgtgcgcaccgaggccgggctcgcttacatctggtagctttcataggtcatagactgccctcacagaccaacacaagtcttttctgcacactttgtcctcactcgtgcgcatcgaggccgggcccgcttatatctggtagctttcataggtcatagacttttctacacactttgtcctcactcgtgcgcaccctgacattctttccggtcagtcacccatcccaaattgcttcaggccaagcacgcttaaccctggagttctttagagattggtttccggaaaagaagttgtaacttgtggcttaataggattaatagaacgtgaagggcccatggctcgtccgtactgtcgccttctaaagccacgaaagacaaaatcaccaccccaactgctaagggactaaattttgatagtaagggatactctatactcggttggttttgcaatcgagggatgagtacagtggacttttatggcctacattaattaaagagtccatttttctttggaattagtctattttgtccctcttatctcttgtctttggacaatttgtatccctcagctataaaaccgggtataacatctcctccaactttaaaaactattacaaattaactctttatgtggtatggaaagcgctttctactgacgtgacaagtcgatttggtccaagtgtcgtgacgtccctacgaagaggttagaagcgttttcaagatgattctttctttgtcgagacgaaaaagtcttttcagttgaaaaatgtgagtatgttttgcccactttatcccccatccccctatatcaaaatgatgaaaaaaggaatttaaaatgatcttatccatcattgccctgcttccaaattggcagagacccctgtggagaatgaagaggagtcaaggatcttactctcaagagtactttgataggctccactctcaaagaataagttaggcctgtgctcacaagaaatctcggagccacccattaatcgtaatgaactctatgcaaagttttcctctgtgatatgagttaccacccccttggtcacttatagtaccctaaacatccaactgcattttccaactaaaatggaaaatgactaccgaaatgaaattgtacatctagaatagacctaagaaaacatgatcccaggcggatacttaacatgttccccctcgcccaggcccatcgcaagggaaccgaaaccaagatttgctttatcgggtatcaaacgggccggaactgtgagcaaatataatacctttaaaaagtattactacaaccacatagattgtaaatgtataaatgcgatgtactactttctttcctcttcctactacatgcacggctataatcgttatatattctcttcttttctttactcttcgttttgcatctcttttcttctattgtgagggtagcctagtcatcaaaggaattgaaaatataagtgtgtcccacatgtaagtgacaaattaaaaaaaattaaaaaaaggtgaggtccacatgttagtgacaattctccttctcttcttcgtccattctattttttctctcccagccaccaccgccgtgcatgggcggagggcgggggtctcgtgtcatggcgatgaaatccacggcggagccgtgctgaagagaggaccaatgtggtggagaggcagtggtggtggcggtggccggataagaggagaggaggcaaagaggtcctcaacggcgcaacagcaaatgcttgctgatcgacgacgctggggcctgggggagaagcgagaggggttaggcggagaggtcaaggtgggaccgtggggtaggtgtacaaatgaagagtacaaaattaagactacaaacgaattagaaaattatagaaaaaaagtgtaagggctgatcacaaaacccatattgaaagctatatacatgcacagtaaagagttgcatcatactacattcgtcctaaaatataaaaatctatgatattttctataactacgaatctgtataggttatctgtccagatccataaatctatgatattttctataattacgaatctagataaattatatgtctagattcgtagtataagaaaatctcccatccgatttagattattatatttcggaacagatggagtatatgcgtagctagctctatcctactccatcggtcccaaaatataagcactttcaaaatagtgtcgaatcaaacatttttttactttggctattaatagcaaataaaaaagaaaaacatcaatcatgtaaaattgatgttattagatttatcattcaacaaactatcataatatgtaatgtaactcttttcatttaaaatatcttacttttatagatactgtaagtcaaaatagcatctcgaaaactgtgcggccttgtttagttcgggaaaatttttgggtttggttatcacatcgaatatacggacacacatttgaagtattaaacgtactctaataacaaaacaaattatagacccaccaaggaactacgagttaaaatattaagcctaattaatctgtcgttaacaaatgtttattgtaataccacattgttaaaacatggcgcgattaggcttaaagattcgtctcgcaatttacacataatctgtgtaattggtttttttctacatttaatattttattcatgtatccaaatattcgatatgatagtgtgaaaaattttattttaaaagctaaactgggcctatattgaaattcaaaaatgtttatacgttcggacgaagggtgtatatgtcatagtagtaactttttcacaagatgacactgtgtgtttggcctcatcttttactccagtacccgtagttctgtacagtaataaagaactactgtagtagtatcacccagcactcaacacagtgcattcattttcttctgggtggagtttgagcctgctgacatggtatactacgtactccctccgtgaaaaaaaagttaaactctgagttttaatgtctatctttgactatccgttttatatgatttttttatataatttatatttttattattgttagatgataaaacatgattaatattttatacgtgacttgtctttttaatttttttcataatttttttaaataaaacggacggtcaaacattggacacggaaaccagggtttgtttttttgaatggagggagtataggagtagactgtagctgcgtcgtcaagacccaagagcacagttgcacatgactctgtgagattcttccagggatgagataaccccttttcctcggtttttgaacatcacaaaacgacaagattccttggtcgctgcaagagagtacgtagtggaattcgtgatagtgctgttcagtggttaaaccctaaagcaaggcccatagtgtctgttttcgataagcttttctagatgataatggaaaattccataagtaaatcgtctttgaatactgtatgattcaacttgttttttttttttgattttcagtatctgtttggatgtgacaacttacactaggattttgattttcaggctaaacttttttttcttaaggacttttgacattaattattccatctgaaattcatgggttcaagttcaatgtactaacttggaagatctaagatagtgttccaaacgatgtaggttattagcttatgatcaattaagtactggagtaactactataaactttaaatatatttacttgaaaaatgcatgaaagaatcgagaggcagtccgacggtccgaccctaggaacaccttgcaaaacccttcgtccctttctagcttcttgtgcttacaggaaggaagcgaagaaggtatcaggagaagattaggagaaatgagataattaaatttaagaatcctcctgatctgattttacgtgatggtcttttaacgtgttttagttttgagtacggctttccaaattttttttcccaaaaacgtaacatcgaatctttggacatatacatggataaaagaaaaaactaattgcacagtttgcatggaaatcaggagaagattaggagaaatgagataattaaatttaagaatcctcctgatctgattttacgtgatggtcttttaacgtgttttagttttgagcacggctttctaattttttttcccaaaaacgtaacatcgaatctttggacatatacatggataaaaggaaaaactaattgcacagtttgcatgaaaatcgcgagacgaatcttttgagcctaattaatccatgattagccataagagctacagtaacccacatgtactaatgataaattaattaagcttaataaattcgtatcgtggtttctaagtgggttatgaaattagttttttcattcgtgtccaaaaaccccttccgatatctggtcaaacatccaatgtgacatccaaaaattttcttttcgcgagctaaacagggcctacgttgcaatatcaactatggctgtgtttagtagtttaggtgtaaaaatttttgcgtatacggacacacatttgaagtattaaacgtagtctaataacaaaacaaattacagatttcgcatataaactgtgagacgaatctattaacctaattaatccgtcattagcaaatgtttactgtagcactacattgttaaatcatagcgtaattaggctcaaaagattcatcttgcaatttacatgaaaactgtgcaattattttttttccgtccacatttaatgctccatgtatgtgtctaaacatttgatgtgacggatttgttgaaagtttaaagggaactaaacacagccttaggccctgtttagtttccaaaaacatcacatcgaatttttgaacgcatacatagagtattaaatatagataaattaaaaaaataattgtacacttaggagggaaatcgcgagacgaatcttttgagtctaattagttcatgattagccataagtgttatagtaacccacatttgctaatgacagattaattaggctcaaaagattcatctcgcgatttccagacgagttataaaattagttttttcattcgtgtccgaaaaactattctgatatccggtcaaacgttcgatgtgacacccaaataatttcttttcacgaactaaacaggccattacaattgaatttcacattttgttagcctaccggcctatagatgagtgctccctccctccggcctataaatgaggagatgtaacccttcttaaaacaaacaatatggacttacaggagagtcatatccctttccctcctgggttgagtttttttatggaggaaagttataattaatatatgatcgtttgtcttatttaaaattattttataattaatatttttattactattaaatgattaaacataattagtagttatatgtgttattaattttttaaaataatttttatataagatgaacgatcaaaacattggatttatgttttctttagttagggaaaagagaaaggtctctttttgctcagcaaagtgatgatgagctgatgccaactgacctgaggccatttacaatgcggtgaggtggcgttcagcctcactgcgccagcgcatagattccttgccacgttagcttctggcacacttttctcaagtccgcgcgtccaactttggtcacgtgttcctcggccaaatccagggcgagcggcgtgaggaacgggcacttgcgcgcattgtggaggtcgtgacctcgtttcgtcgttctcccgcgctcgcgtcgtcgtcgagttcatcctgccccgcgtcgtcgtcgagttcatcctgccccgcgtcgtcgttgagttcatcccacaggagagaagggaatccggcctctgcagattcaatcaccaaatactccttcagtttcgtcatcaccaagacgaacagaagaagagagaagcgagcagaagaaggaaaaaaaaggagcaaacatatatgcgagaaacagaatatttgagaaagaagagaagaataccttcgttggaggccatggacgacactaactaaacgggaggagcaattgctgccgatgctttcttgcattgaagtcgaccaaccgttgaagcagagaagaagccaaacccacaaacgccataccttntctctctggggntctgttctcnggnacacgttttttttttggccgggctggatctagccgcctgccgccgccgtctcgtcagcaagcgctgcccggaaggagagagagagagagacgcgcccgtgccatggggaggccgaagggcggcgccgcggcgtcctcctcgtcgaagaagcccaaggcgaagccgaagcagcgcggcggcgccgccgccgcttcgggggaggagagggtggctgcctcggcaccgtcgccacccgcgccgccgtctccgccgcgtcgccgctggcgcgctccgctgagcccgcctcggggtcgtccgccgctagcgcccttcgccgagatcgcctcagggtcgtccgcctccggctcccgcgccgtgtcgccgccggcgggccgccagatccggagggggagaggggcgacggcggtgtgtgggaggcgccggcggcgcactagacggagcagttttgtggcctggttggggaaggcagggagagagaggagaggaggtaaaaagtgaggagagagaagggtgggacccactgtgaaggaaaaagaagaccacatgcactgtggaggttgtcgcttgtaaagttcttagtaggtggcagtgttgcccctcaaaaattggtgacgcactgtaagtgccctcacgagtagtagacgcgtgggtgttgtactagctgtaggctatagctactactactagccccatgggagtaggagtaggaataggagtagcagcagtaaatactcgcaccagtcactttttcatctcgcttttactgttgcatcacttttaccacgtcctgacccttttgcaacatagtacccctgattgggattttcacctttttcatccttttagaaaacttattatacaaatagacccttaaaaaacttagggcccctttaatttggagaaaaaacataggaattttgaaaattttcaatcctatagaaaaattcctatgagtgcatttgaatcaaaagattgaattttatccgattctttgaaactcctattgtatggacaattctacagagattttggagaaaacttagcaagagttcaaagctcttagaaattttcctttgagtatatctctctattttgtttcatattttttcctactgttcaatcaaacagtcatttctatgtttttcatgtgttttacaattctctattttacacttcaattcctattagaatcttgtgttttttctattcctttattttttcattcccgcgattcaaatgggcccttattctaataatggatccttttcgcagggccaatgttattggcgccgtggttcaacatgatatcgtcaataacgttagcgtcatctccttcgcccatcgtggaagacaagtaactaatgtgaagagggactatttatagaataactttagtcactaatgcaaaaactaacggtgtgtttagttcgtgaaaagaaaattttttggtgtcacatcggacatttgaccagatgtcggaagaggttttagggcacgaatgaaaaaactaatttcataacttgcctggaaaccgcgagatgaatttattaagactaattaatctgtcattagcacatgtgattactgtagcacttatggctaatcatggactaattaggctcaaaagattcgtctctcgatttccatgcaaactgtgcaattattttttatttatatttaatgctctatgcatgagtccaaagattcgatgtgacgtttttgggcaaaatttttttgaactagacaagacctaagtcatgttagaccacatcgtcaataacgttagcgaagcgaaaaagataacactcctaaaataagttttttagggtctatttatagaataatatttttcaaaaggatccaactgtgaaaaattccagctactcctgcagctgcagtgcagaaccaatgaatgggagttgggagagggtcacaggggggaggcaggcgctcacatacataaagatgagtagaatccttttgaaaacctcagcttctttctcctcgctgtggctcacggagcagcggaggtccggagcaagcgaggctcgtactggtaggagtaatctaccataatgtcttctagtctagtagtagttctacttaactacacacatatcactctctgatcacaatataatgtgttgatccacacgcaccgatcgacacaaactgatctaatactagtatagtgtttttgtttgttgttttgttcagagaccaacaacacaagttgtcgatcgtcgccaggagcaagcaggcggtggatcgagagaggcaggcaggcagcagcagcgaatcggatcggagaggacgttcgatcgccatggcagcacacacagtgagtttgcatacataggatgtatagtgttgtagtatttcttagctagctaactccagatgtgatgttggatttctctctccatcggaaactcacttgctagctagagtagcattttaattgttttctctgtctttcctatgtgtgatgcaatactattcattcattcattcgttcatgctctctagtacgaaatcatacagtatgtatgtatgtatgatcgatcttgggcttttctttctttcgttcgttctttctttctgtgactgggttttgtgattttcatttcattattactagcaagtagagagtcgtgcattcgcaccactatattctctcacatgttaaatgttaagttcttaatgaacaaagtttataggaagtgcagttacagtttttttctgtaataaacaatattttcg

SEQ ID NO: 7701 - DNA, 6078 bp, Oryza sativa
  unsure (1)..(6078): unsure at all n locations
cgtgtggattgangtgcactgcgnnccacccgcannanntcatnacaatcacagcagataaagcctgagattttttcatcaacattgtgcatcgggttggggtacctaatcggatcatcactgataatggcactcaattcactggcggagcatttaaagacttttgtaaagacttcggcattaaaatttgttacgcctccgtggcacaccctatgagtaacggacaagtcgagcgcgctaacggcatgatactttaagggatcaaagcacgagtttttgaccgactacgtccctatgctggcaagtgggtagatcagctgccgtccgtactttggtatttacgcactactcctagtcgggctaccggccagtcgccgttctttttggtttatggcgcaaaagcaatgttgccgagtgaagtggaatttgaatcactacgatttcggaacttcaacgaggagggctatgaagagggccgagtagacaacatcaatcgactagaagaagcccgagaagcagctttaattcagtcgactcgatatttgcaagggttgcgccgttatcataatcggaatgttcgatcgcgagcctttttagtcggcgacctggttctgaggaaaattcaaacaacacaggatcggcataaattatctcccttatgggaaggaccgttcataattgctgaagtcactcggccaggttcttatcgactcaagcgcgaagacgatactctcatcaacaattcttggaatattgaacaccttcgtcgattttacgcttaggcatttcgtttggatctttcctctttgactgctaacttcaagtttttccttgaagttttcagtcagggggctactataataataatggagtgtgatttttatcaattcaatttgcttacttgatttatcattgccctgtttggtctttcaacttagctaatgaggactgaaggtttttaatagcttttgcgggttttaggctcaataaggcttcacaaaggcttttaagaaatcagaagctaagtatggaacaccaagcatagcataaattcatcagtattgtacaaattgagcctccaccgtcattgatcatcaaaatcattgttatatcaatcagtatcagttttttcatcgttggacttatcaaacccagtcggctgaaggtcgacatcttggaatctctcaactacatcagcagcaatcttgtcagcggctttctgcgcattactgatgaggtcaagcgcagcttcttcgctcgtcctgtctgcaaagccatcaatggcatccatatcaacccttggataaagggatttggttatcaccaacgccagacttgctcccatacttccagcttctttgatgttcttgaaataagtatctggagcgactcttagcttgtcgaagatttcggtagcatcaagtgtactcgaaccggcgttattgaagaacatggcctggatgagtggagtagcggcattagcgactttatccctggctccttcaagcttgttgatcttgtcaactaagacatcaaactgtgcttgagatttgatcttgcggtctgcatcaacagattcacattaatgaatcagcatatagaagataatggctttcgaagtattgattattggtaccttcaacctcctttaaagccgaatccctctgtcttgccagctcagccttgtcattttccagagtttggatctgcttctctagttgagatatcttggcagcttgcactacattaacttcggttaatcaagattacagagataacagcgcaaatcagttgggcagagtttgcgcgaaccttttgatgagccactcagttcgaaattggactcctagagctcagcaatacgatccctcagatcgtgttcattcttcttggcaagttctctggcctcgtgcagttgactcctggtggcttcgagggttccaagatgaggactattctctctagggtcgcggttttcgcctcgttcctaagatgaatcagcgctcgagccagatggcaaacaagatggctgaggtcaggcgtcaaggaacttacatttacaatgcgagtcgcttggttgagtgcctttttcagtaggcagacctcttcgtcttctttttgccggtttattacaattccttgaggttgcaagttgtcatcccaccacttgaccagaatgggagggcacgaatcttcggttgctcgtatacgggggatttcttcttcatcaccaatcattggtcctaatgtattcactgacaaaggttagacaattgatcagagttattcaggtcaacatggtttcagacaaagtgtttacccgtattgatttctggacgaggatgagtggattcggatgcctttaaaggagatccagatctctggttattgctggcgttttgtccgcgagggctgtctgcttgggtttcgacttctggaatctcttggcttggccctgcgtccgactggtttccagtcgggggctcctgattaaatccggcttcggcttcggccgactggtttccagtcgggggttgatcaccggattctacattatcggttgccggctgattgtcactcggatgatccccagcagttggcccggtttctttggaagaacttgtgtccgtgttagtcgggtcagagtctttcccagacggatctatattagatggtttcctgcaaatttgattatcagtattattgccgcaatgggtgtgcatcaatgcaagagagatcgttatatgagttgcacctagaagacttcctgatctttggcacagggcgactggatgttttcttccttggagtagcctgttttggtagtttcttggttgtctctcggtctccaggcctcctggtggtatcatcggcttcgtcatcacttagaaccagctttctctttcgagaatctgactggccgactggatcagaagcacttggttgagtttcagaccgaattcttggtcctccgctcccttgcccagtttgatggcggggagatcggcgttgagcgattgggggatccaacttcatcaaagcaaactcctgggtgtaatatccttcattgttaactgattcaacaagaaaacaagatcatattttgagaaaggttgaagtgtatgaatacgtaccggtggaggaggattgaatgcattgaacggtacgactggcagcaagtgtgagtagctgacaacgatggcgtttgagaagatcttatacatcctttccttcatgaccttgaagtcaagagaatctggatcttcacggtttgggtcatgcttgccgtcaaattcaaaggctgtgcgagatctttctttgattggagctaaccgacacttgataaagtgccgggtgatttgttctccttaaaggccctgctctttcagctttatcatcctctccatcagttctactgcttgtgcagcttcatctcccgttggcagtgagttccaagtatcccgataaactggaggaagacaggagtactcgggaagaacaggctcggggttttgaacataaaaccagtttgcgtgccagcctttatttgaggtcttgaagggcatggagaagtatttttggcttagtgttcccctgagttggaaaccagcacccccaacgacgcatggtttgctcttatttggctggggcttgaggaagaagatgcggcggaacaaggcgaaatgaggcctaatgcccagaaaagcttcgcatgcatgaataaaattggcaatatgcactatgaagtttggattcagatgatgcaagctaatcccgtagaagttcagaatgccccggaaaaatcttgaggttggaagagaaaatccgccatagaagaaatgagcaaatactacgatttcgtgtgtatcgggggtcgggaatgcctcaccaaatgccggtcgccacccaatgatctcttttgctggaagaacaccgtgcgccaccatttccttcagattgtcttccgtcacattggagggcgcccactgactctcgaagctttctctttcttccgccatgaatgtgaactggatggtctgatttagttcgagatatggctagaaagggatggggaatcggagcgatggatgcggggagaaattttgtaaagtttttgagagtggattggagcggattgatgaaccctagtttgcccggcgcagttttacactgtagcaggaaatggggaaaatggcgagagtctcggcggggaagacaaagagacgtttttcactttggtattattagggtatcgggagtactaatgggcctgggcctgtacagtacttcagcccaatactataatcagcgtggcctgttgtgatccctaaggacttaggcactttttgctttggcaatttgtgttcacaatggtgtggcccaatgctgttaaaatcctttttaacgcgatttaataattctttgaaattattatgatgcacataaaaaggtgcccgacagaaaggtgttatatccttttttgtaagctttattaggttgcaaaagctgtttgggttgatttgagatgactggtttattaatagtcattcttttagcatgttatatgcttattttggttatggtaagggtcacagcctaagctattagactcattaattaccatgattttctatcatgtttggtgggtcattttatgagatttttacccggattcctatcaaacatgtctatttctggacctttgagtgtttatcactcggcccttcttgtattttttgtccttggtgtgttcaagttgagaagcaggtggctgggtatcttactaagtaccatgcgtgcttcgctataaaaccacttggttcttgactatatgtttagtttttcaactaatcacatagtcgggggctacacctaattaggtgcatctactcgatgcaccatgttttattttcgcccttcacagtttttgatttttagtactcggcaagctagagcaagttgaattgaagcactcggactattgttttttgtttcgagaaggttatttcgtcaactgcgaaggtctcgggggctactgtggagattatggataccccatatctgtatgacagttatactttagtcggatatatggtaccaaatatagatagaatatctttatggggactcgggttagtttttaacttgtatgtcaaggaaatacccgggatcctagtcggttacgattgtattttatctataatcccatattccgttaggatatggactatattttgtaaagcggattccttcccctatataaggagggtccgtgtgcctcttgggggccggttcttttttccagtttatacaatcaataacacactcggcggaatcatccccggacaggagtagggtattacttcttgaataagaaggcctgaacctgtataaaattccttgtctccaaacccatccactttcctaacttgatagctacccccttttattattgtcgaaatcttgtttcgacagttggcgcgccaggtaggggcagcgtcaagtttttgccgactaagtgcgatgggttccgtttctgtcaccaacgacttcgccttccctcccgggcaggcgttccggttcggcagcctcaactttatcaccaaaaactttggcaagatctctctccttgactcggattcaaaccagtcggggagagaccaggtccccatgccgttcggtattccgaactcggacaaagcctacgccaagatcatctctcccgagtcggcttcaaaccactcggacgagatccaatctatttttccacgaccagatcaagacgacgggtcctatccctcaatcctgatgaaacttcctgatgatttggccgctgtcttcacagtcaagacatctcccactcgaagatctaggcgagctccggctttagccccgatccgatctagatccagggaggttggcgttatacttcaacctcttgggacagtctcgacggaagagttggatggctacctcagctcccccggcgtcagttctcgaccaaccgagatcctcgactacgacgactttggctaccactacgaccacggtgacctcgacaacttcgacgacagctat

SEQ ID NO: 7702 - DNA, 23844 bp, Oryza sativa
cgtccaaaccatgagacattcagatagaagcagagaccatactcctgacgaactcccttggccgtgggagacggtggtgtagccgtacccgaggacgtccacggcgagcagccgggggcctccccgccatcgcggcgtcgcacgccgtgaagcgctcccccgcgccgcggcgtgcgtcgacgcgagcagcgcccgccgcgcggcccagccgcagcgacaccagcggcgccctggccgcggcggcgcggcgagcggtgcagcggcggcctcttgagcaggtggaggtggccgagcaccggctggctcggcgctgcgtcgccatcacgcctcctcgtccgaggaaggatggcaaccaccaagaacagaacggcgatgacgatgaggaaaggggcggcgccgccggtcaccgccatggccgcgctcatggcaacctcgagactaccacggccgacagcaacagttaccgacagttataattacgaatacagaaaaaaaactactccctccgtttcgaaatgttcgacgccgttgacttttttttttttcacatgtttgaccgtttgtcttatttaaaaaatttaagtaattgttaaatatatttttatgtaggcatataattttatatatttcacaaaattttttgaataagacgaacggttaaatatgtactaaaaagtcaacggtgtcaaatatttcgaaacggagggagtactagcatacggaatactgtccgagctaagggataaattagaggataaggataccagttactcaattagttaattacgctttatctgatgttgttgctcctccctcaactactcgtctccgttttgtttttctttttgagataattaagatcagacagtagtatttcccataatcatttgtctcatataatcaggagacgagtgattatggaaagtctaggtcccatggcagcaggggaaacaaaggagaaagaaggctattggagaggacacctataagagcatgtacaatagtagactataaactagacataaactagatataattggagagagaagagcagcggactacagatttgtagccagctgcagcacggactctaagatacttgtgtgtatgacaggtaggaccaactataaattgtgtagtatatatttataggtaactattgtatgaatcggctattaaattgactataaatgatatggagtcggttgttggctatactattaaacttgctctaaggtatcagctatgagctacagtaccatgggtatcaagtatcacgtctgataccatagatatcaggtttggtaccataagtagcagatatgatacctataggtatcacgtatggtacctaagtaccaaccggtacccataggtatcaagtatcatagtatccaagagattagatctgatacttatggatatcaggtctgggaccccacgtacgcacgtacctggtatcaaggcactgacaagggacatgtgccactgctttgtcggctcgcaaaggtctaccgccaacacctcttgctctcatattcctttccctagtctcctcaacttcactgttccttccttgctgttgtgggtgttatcctgctgcagctgcgtcctgtgcaccctctcttggtgtccagccatcggtgctagcgccgctacttcctgctagcatcatcaccatgcgtgcgggagggtgggtacgtgtcctcttgcttcactcgttttttcactcatgggatttctcgtaggcggagaaaatgaaggggtaggtgattcattgaaatatcccattccacgggatcccgtactctagtcgctctccaatcttggtgcgttcagctacatgatgaaaggaatcaagcaagcaatagtattttaaaaaacaaaagtgctacaggatgttatcccgttcggacgggatggtacctctgagatattgactaatagtctgatacccagttcagacgggatgatacctttgaggtattgcttgataccgagtaggtatcgactgatatccaagtatcatacgatacctctaaggtatcatcctgttcgaatgggatacgtcctatagcattttcctaaaaaaacaagcatgtggtcggcatgtggccatgataggcacgagacgtccatctatcatctagtaagttagggcttggtttacatccattctgaaccaaatcatttaattgacagtgctaaaattttgtggcagtagctagataacattccataattttgtagtagtgagtactgagtagagctagggtttcactgtattcttatctaggccacaagggttaccccagctcgttaaggcttgcgagctagctcgagctagttcgttagctctaacgacctaaaatgccagctcagctcgttaggaaaatgagctgagccaagcgagctaacgatccatgagttttgtttcgaccccaagtactatgttttatgtacacatgtacttatatattctttttttaaaagaaaaatagtagcatgaaacatagcccggttatgttactgtgctccgagaagaaaaatatcaggcattgctgcggcttacatgtgcaatagaatgaccactatttgcacaaatatttgaaatttcaaaattaaatatatagttatcaaattattattattgattacttgcttgaatatcttttgtataataatcaagatctaaatattaattggttgattaattgtcttatcaaccactaccatgtttcatttatggagtgatgtacttatatattctaaatagaaacctagaacaatcacggttgttattgtggtccgaaaagaaaaaatatcagacattattgcagcttgacatgcgcaatatagtgaccactgatttgtacaaaggtttgaaatttcaaagttaaacatgtcattttcaattttttagagataatccgagaaatgccattgacaagcgtctaaatccaagatatgccatcgacaagtgtgagttacaagaaatgccatcgtataaatgattttgttccaaaaatgccatcgtcgttagggttttgtccatcctgtgtcgttaagtgctatatgatgaatagtgtatttaacagtgtggggtggacagaagcctaacgatgatggcatttttggaacaaaatcgtttgtatgatggcatgttttggaactcacgcttgtcgatgacatttcttggatttaaacgcttatcaatggcatttcttggattacctcaaatttttattgttgatcatttgcttaaatatccttttatatgataatcaatatctaaatattaattgtatttttcatccatatcatgtttaattcatggagtgatgtacttatatcttctaaatagcaacctggaacacatcacaaatgttactgtggtctgagaagaaaaataacaggcattattgcagcttgacatgtgcaatatagtgacccctagtttgtacaaaggtttgaaatttcaaagttgaacatgtcattttcaaatttttattgttgatcctttgcttgaatacccttttatatgataatcaatatctaaatattaatagtcttttccatcagtatcatgtttcatttatggagtgatgtacttatatcttctaaatagtaacctggaacacaccacacatgttattgtggtctaagaagaaaaacaacaggcattattgcagcttgacatgtgcaatatattgaccactaatttgtacaaaggtttgaaattttgaacatgtctttttcaaattcctattgttgatccttgaatatccttttatatgataatcaatatataaatattaattgtcttttcgactagtaccatgtttcatatatggagtgcggtacttatatattctaaatagcaccctggaacatagcgtggtcgttactgtggtacgagaagaaatatatcgggcattattgtggcttgactttggggcaatattgcggctattaatttgcacaaaagtttgaaatttcaaagttgaacatgtagttttcaaattattattattattgattctttgcttgaatatcattgtatatgataatcaagatttaaatattaatcgtcttatcgacaagtaccatgtttcacgtatggagtgatgtacttatatacccattcatacctttttatacagggtttagacttgactaagaaagtcatgaattcatgatacacatgaaactaacataaaattggaagttgagtgtttcttttattcgccattggaatacagtgattgctatagcacacgcaatctacaataccgaagccaatctgctattcacatagaagtagataggatagtcttgacaaactcccggggccggcagacagccgccaatggcgtcgccatcggcatcgtcaacccgccgccttcggtcatgtcgacgacatcgtcgtcaccgacctcccaatcaaagcactgcacgagcgccgccaccgacacgccgacgacgcgcacggcgagcccctccccggggcaccgccgccggccgagcccgaacggcatcatgggcgcggtgaccgcgccgccggcgtcgctgtccacgaaccgctccggcctgaactcctccggtgcgtcccagacatcgccgtcgcggtggatcgcccacgcgttcacgaggaccttcgtgccgcgcgcgacgcggaagccgcccaccgtggtgtcctccatggcctcgtgcgccgggatcaccgggccggcggtgcggagccggagcgtctccttgatgacacattggatgtaagggaggttcgccatgtcggcctcctccaccagccgcgccgtgccgacgttggcgtctatctccgccctcgccttcttcatcgtctccgggtgagtcaccagctgcgccattgcccactcgattgtcagcgccgacgtgtcggtgccggcgaagaggagcgactgcacaccatgatcgaatccattgtacatgttgatcacaatggagtagaagtgtagaagtgggacagtaatggaaaactgttttaaacactcaggtgcacgtctacccatttgttacatgttaattaaataattataaaaaaaattaaaaaaattgataagatagattaatatgtaatatatcactttaaaaaaatacaagttcaaatttgacgtctataagttgtaacaaaaataacaaatttaactgcgagtatacgttatatttgttatttttgttacaacttgtaaaagtcaaatttgaacttgcatgtttataaagtgatatattatatattaatctatcttctaatttttttgtttgaattttctcataatcatttaattgacatgcaagaaacaggtggacgtctacccgagagattagaattcatattcagacatcaatggctactcaccaagatgatgcctttgacgacattgtcggtgtagtggtcgggatcggtttcttgcagcgcgaggagggcgtcgatgacgcccttcttctccttgtcttggtcgccatcgccggcgctgccgctacgccattgccggtggtcgtcgataaggccggtgaccattgcgtcgcgccgagcttgcagcttcttcaggctgcccaccttgccgcggagacgatcgacccaccggagcgccgggaagaagtcgccgacgctcggcgtgccgttcaccgagaacgtctcctcgatgatctcctggagcttgcgcgcgtcgacgctggcgtggcggcggcgcgtcgtcgccgcgcgcagcatcacgttgagcaccagctcgaacagcctgggccggagcgtcaccttggcgccgccggcggcgtcgcggaggatggcgtcgacgagggacgcggcctcggcgtggcggtcggcggcgagcgcggcgaggcgcggcgcggagaggagctcgacggcgaggaagcggcggagcgcgcgccagtggtcgccgtggggcgtccacaggacgatggtgtggtcgtacccgaggatctcgccggcgagcgtccgcggcctccccgccagcgcggcgtcgcacgccgtgaagcactcctccgccgcggcgtgcgtcgacacgaccagcgcccgccgcgcgcccagccgcagcgacaccaccggcgcgcccaccccggcggcgaccgctgccagcgagcggtgcagcggcttcttcagcaggtggaggtggccgagcaccggcagcgccggcgggctcggcgccgcgccgccctcaccacccgaccaccatcgaacaagaacgacgacgacgacgaccaccacaaacagtagaacggtgatgccaacgagcacggcggcgccaccattgccgccgccggccaccatggctacctcgagaccaccagtcatgctcgatgcaggctacaatacaacaacagctacccaatgcaagaagcgatcgattcctttcctcgaggaagaactcaagctgggctataaaagagcaaggcccgtgtttatttcatgcgccaaattgtttttttaagtatacggacacacatacgaagtattaaatgtagactaataacaaaataaattacagattccgccagtaaactacgagacgaatttattaagcaaatgtttactgtagcatcacattgttaaatcatggcgtaattaggctcaaaagattcgtctcgcaatttacatgcaaaatgtgtattgatttttttcatccacatttaatactccatacatatgtccatacatttgatgtgatgaaaattttgaaagtttgaagggagctaaacactgctcagatctagtagtacagcccactgcttcaaaaattttcacattggcaaaatgataaaaatcattgtttaatcaatgcattgttagttaaactattattttcctcattgttccgtacgctctctcctgacacaagtgcactgcatggcagttaattggttgaattgctcgtgtctgcgttggagcgcgagtacagctagcgcttaaatagtcacctggtgatatactctctcacctccaactcactgctaattgctaaaactgatgtgacaggcttatcgctagttattgtagctgctataagggcatctctaatatgcatgtaatggtgaccataagcaataaaatacttcctccgtttcatattataagactttctaatattagccacattcatataattaatgaatctagacatatatatgtgtttagattcattagtatatatgaatatgggtaattttaaaaagtcttataatatgaaacggagggagtaatattcttagtacaactttatacatagaaaggtgtgtttggaagagaatattactatggctaatcttaagcttaaagctagccataagaaatataaaattactttatatcttattagcatgtatgttggtttgaatccttcaaactaaaagaattaatagggattattttttgaagaaattggaacgatgtgacggaaaagttggaaatttatgtgtagaaaagttcgatgtgatgtttttggggttcaaactttgaatctaaacacgacctgagtttgtgatgattggagattactagacgggttcgcgcggcgtgacgccgcacggaagtgtgaacaaacaacagtgattctaatttggtgtatacttcacaacagtgatttgatttgtgtatatagcattgaattaaaatctgatggtgttttttagagttctggtttggtctataggaaaaacatgcttagaggtgcgcgtgtatcagcttttggatgaatttatacgaaagagaaggccaggccatctccagtgttaatagatttatcaacatcaacaccaaacgaagtgaaagcataagtctcataaaatgattagaacagctagaaccatcaaaatgcatgggttctcccaaaggatgaggccattccttgaaaataggtagcgaaacacgccatcggcgacaacacttattgtaaacaataggctctccaggatggggcttgttctggtgtgtcctttcatagtaccaaaagacaacacaacatatagaacaacagtaatcagaacctccatagtaagagcggccagaataagaagctatacacaagcaaaagaaagaccacaataagaaagtgtaaaaagaatctaagtaataaatagaaaatcctaaaaaaaagagagaaaaagaagtacctttaagaaaatgagcatgctctttagaaaaacaacagatgaacaagtaaatatacctgtagagttaactggaaaaatatgccctaaaaacaaaataattatagtcacatcaatagttaaataaacaacatatggaaacttaaaggaaaaataaaagaacataccttataccttagttacgacgaagccggcggttattagccaaacgcctttttaaccggttagaaaatgcctccacgcgagaaatacgtaggaaactacgtgctaaaaaaacggtaggtgaacaaagaaaactatcgaacagacaaataaaataagattaaggagggaaaaacaactagccacacgcaagaggaggacgataacatatagattcatcttaaagctgttgacgagtaggaatggaaccaacggaaggacaaatgtgacctagcaaccgaaaatgaagaaaaagaagtacataaaaggcaaaaaaaaattttacacgaccaaaaaacatgcaaattttaaaaaaataaagaaaagtaaaaggaataggaaacaaacctaaatcgtgagcaagaaaactgaaacgagaacagcgtcttattgccccacggcgtgacctagcaaccgaagatgaagacatgacgaaagtgaaaaagagtaacagcaagaccgaacaagacacaaccacacaaggaagctcaacctgcaacggacacagcaaccatcaatttgagccatgaagaattaggagagagcaagccacaaaggaaatttagaaagaaaaaaaacaccaaccaaaactgatggaagaaaacacaagcttagcacatgcggaagaacttacagggaaaaaaatctggtttaggagatgtaatttgcaactacgaagaggcaatctgtcatgcttaaattaatatatagctgaaaaaatgacaaaacgtgggaaaaagtgaaatggctggcataaattaaacgaaccattgtgaacaccatggtgcccttccctccgtaataatatgctattatatcgtatgtagtgccaaattagttgtgtactatggtaattatcaagtgcaaacagtacaatatatggatggatggcatgggggcagcatgtgcacaccacatgttggcacgagcaaagcagtagttaggcctctcacagtgcaatctatagggtccatacccctagtctaaaaagttggcccaaagacacccaccctacagtgcaagcacccatatatgtgtggcttaattggatggagacacaggtaaaggaaacgaagcccacagtgggcgtgacctagcccaccaaatccacaacttaattccccaactacccctctctctctctgttcgtgccgtctcttttacttctccccggtgcgcaccgcatcccctcccgcatctcgcttgcatcgccaccgcttcgactccccttctccctctaccgacggctgcgccggatctcctccctccgcgcgccggctctgcttctcctctcctccctccgatgccggcagccgcggttgccggctcgcgcggcgaccgacgcgcgcgggaggcgccggatctcctccctctgccgccggtgccggcttctcttctcctccctccggtgccggcagccacgattgccggctcgcgcggcgatcgacgtgcgcgggaagcgtcctcgggaggctccggcgccagcggaagacgatgcgccgatggggatgtggtggccacggcggcggatgtggtagtcaacgccagatctcctctctccgccgctgccgccgtgaggaggaggtagtgttcgtcgaggaggacgagcagaagcaggaggagcagaagcagaagcaccggtgagctggtcctcctcctcgcctcccgtgcctgttcttggcgggcggcagcgagtcctccgccgatggcaggagcgatgagtcctccgccgtcaacgtcgctccccacctcgtcgtcctcgtcctcgtcggcggaatcggagcaggcgggggtggtgaagcaggaggagtccgatctgttgaatctcgttgtgatgattttgctttcgttttctttttcatcttgttgaatccgatctgttcttctcttccaatccctaagattttcttaccttttctcttccaatccaatatgtggcgggagaaattatgctgtggcaggaggggattttgggagggcgaatcggggattttgggtgctaggggcacgcgagcacgaggctacgccgtccacagcgcgcgcgtcccacatcttctcctcgctgcgtgccttggtcctggtgaggttctgttagctgccgagaaacctagctaaggcgcggtcgctcgctccacgtcgacgaaaatccgagctggcgcaactaggatccgcgccagctcggtgcactgtgagaggtcttagtgcatggactacagattgtggctgcatgcatggcagtatgcacagtacacatgcaagcacaaagcgtgcacaaacagctactccagaaatcgtttttttctgggacaaagactttcctccagaaatcgactctctttgtgggacggagggagtaaaagtctcaggatgagaactgactagcaaaatcaaaaggaaagtgaaaaagtactatgacgcacgtacacgtactaatccacgctgaaaacatagtatacaccggatacaagacatcagccgggaaccagcccggtcacactagaaaaaataaattacaacaagaaaaaagcaagccacgaggcaaatagcggaagtgccaggaaaaaaaaactcgtgtgtttagttcccgttaaaattggaagtttaattgaaattggaacgatgtgatggaaaagttgaaaatttatgtgtgtagaaaagttttgatgtgatgaaaaaattgaaaatttgaagaaaacgttgaggactaaactaggcctcaaaataccaggaaaatcgaaacctgaccggtgactactaggttagtattttcttcggttttcattcgtactgcactgctgtttgcttcgttactacttctccctatccaatccaacagtcttattttcatcccgatcaacatcgaacgggtaatatgtgttagatggatttggatccggtgcagtacactagtgtgactgcaacataagcagttacaccaggaccttttgatgtaaattcaagggtctaaaatctatgaagtactgtttacatttgaaaaaaccatagaactactgtagcagcaacactgtagcatcagatttagaccgttcattggaaaaaatagatggctgagatgatctcaattcgtctttgatgacgtggcctattcttacggtattttggattcacttttcacttggaaagatttgaagaaaaaaaagataaaagacaaacttttgtagattatagtagcccagccctgctaaatctgtccccgccactgggtttgagcatttgattccatttctaatataacaaaatatgataacgttaatggtttgagcttttttttctcccgattatttcatgtgaagagaccatcatcgaatcacccatgccggctgctgttcaccacggatcaagtccgttgccattgtagttgcggttaaattaatttcgcgcattccatgcatgtggcaaccccatgccggctgctgttcacgattattttttttattttaaacctttcaagtttttaattttaaaaaataaaatcacccgtaacttattttcagtcagactgacatggcgaaacaatgttggccacaccgatctctggctgacgtgataatattgttttaccacgccatcctggttagcgtggccaagcaatatcgtcaggcccaactctaagaaatgggaatgaaattcattcattttgtataattaagtttatatgataggctttttgacacatcaacacatcctatgaaatgctctcacctatcagactttttgacaacccattgctattatatttgttggcggatggcatgaggcccttcgaccaaatctgccgaaacccatggcgaagactacggagcaagaatggcaagaggcgaagggtcgtacgaggagtgagtaagctagaggcgtcccagacgaagggtgcaagatgaagagtatctgccaaaggaagacgacttcgtcgtggcgagttcgtccccgcgagggccaagaaagccttcccgacccatcaagcctaggggctatagggccggcgatcgcccaacggcccatcaggggcccatgagcctccgtaacgttgtgtacccttgtgaatgtccctttcgtaagggcaatcgtgtaaattcccctgtgtaacctaaaccctagcagtaagaacttgtaatggggctatatatagtcccctagggccatgtaatagggagacggaggaggaagaaattccaaaaactaacacacttcgtttctttccaaccactgttgagcaaccacgtctttcgacgtatgcggttgtcgtttcgacaacagctggtgccgaccgtggggacctccgagcgaaaccactgagagcaaatgccaccgaagaaggtcgtgaaggagaaggttacaaggcgaaaggaaagcgacgccgtagcggacatggccgccgaagagggagcagagccttcggcgttggtgaccgaagttggaggggcgccatctgcttctgcgcctgtgccatcattgccaccttcggcccctgccacctctgagcaggtgccgaacgtggccgacgtggcgaaggcggctgcagccgcaagggcacttcagaccagggcggagatcctttcgacaagccagctgctggtgccccaggccgctccgtcgtagccggcagcggcccaaactgcgctctccgccatgcaagtccaagtcaactctgaccctgagacacaaaccgaagccgacatggaagccatgcgacaaaacatgacacgactccaagacatgcttcgtcaaatgcaagagcagcagcaagcgtacgaggcggcaaggcggtccaaggtcgcttcggcaccaatcctccagtattcggcaggatatgtcccacctcgagtctatccgcaagtgccaccccagccccttccgccacaagtcgcgcaggcgtcaatgtacttcgtcgggcagccgacagctgcagcagtgcatctggccccccacttgcaactgcaagctcaactggctgcggcccaagtacatcctcaaccacttggccaagtgtcgcaagcaatggcagaaggggcttcggctctgcaggcacaattccaagctttccttcaacaaatcaatcaaccccacaacatttcgagtacaacctcctcgactcgtccagaggggaatgcaagtcaaggtgctctcagttggttgccgtcgaaccagccaagtctgggggcttcgccgtggagtcaaggaccgcagttcaacttcatcaatgctgcttaggcgccaaccgttcggccgcaagcaccaataccaagctttggaacaaagcaccaacccaggtcgccatgatgtggtcgcagccagttttcgacccatccatggcggctcagcaagcattaccaatcggagccgggcagccgaacaccatggcccaaactcatgcgcaagccgtaatttcgcccttcgccacgccgtacccgcagcaaggtgccgtgaacagggcgggaggcaaaaaggggctaccgctgagtgggggaatcaagacccgtccaatcccaccgtagttcaagttcccacccgtcctaggctactcaggtgaaactgacccgaaggaattcctatccatctacgagtctgcgatcgaagcgactcatggcgacgaaaatatcaaggcaaaggtaatacatcttgccctagatggcatcgcccattcttggtacttcaatttaccagccaacagcatttactcatgggagcaattgcgcgatgtttttgtccataactttcgaggcacctatgaggagccgaagacacagcaacatcactcggcattcgccagaggccgggagagtcaataagggaatatatgcgtcgcttctcgcaagcccaatgccaagttcaagacataaccgaggcgtcggtcataaacgccgcttcggctggtttgctcgagggcgaactcacaaggaaaatcgccaacaaggaaccacagacacttgagcacctacttcgcatcattgacggtttcgcaaggggcgaggaggattccaagcgacggcaagctatacaagctgagtacgataaagcctctgtcgccgctgctcaagctcaagcacaagttcaagtcgccgaaccacctcccctggctattcgccagcctcagccggtgatccagggacagccgccaaggcaaggccaagcccccatgacctggagaaagtttagaaccgaccgtgcgggcaaggctgtgatggttatcgaagaagtgcaagccctccgcaaggagttcgacgcccagcaagcaagcaacaattagcaaccggtccgcaagaaggtccaaaaagacctctactgcgccttccacggacgctcttcgcacaccacggagcaatgccgaaatattagccaatgtggcaacgcgcaagattcaaggccacagcagggagcaactgtcgaagctcctcgagaagcagttcaggagcaggcacccttagccgaacaacgccaagatgcacagcgaagggtaatccaagtgattacaagggctgacctgccaacccagttgtcgaaacggcagaagaagatgcagatccgaacggtccacagcatcacttcggcaggtgaaggggcaccgcagtatctgaaccaactaatttcttttgggccggaggacgccaaaggagttatgttgccacatcaagatcccctagtaatctcaaccgagatagctggcttcgaagtccggcgaatcttggtcgacggagggagttcggccgatgttatcttcgccgaagcatatgctaagatggggtttcccacccaagcccttaccccagcgccagcatcgctctgcggattcggcggagaggcagttcaagttcttggccaggcactttcgatgatagcttttggctcgggagagaatagacgtgaagagcaagtactgttcgacgttgtcgacatcccgtacaattacaacggcatcttcggccgtgcaaccctgaacaagttcgaagccatttcccaccataattatctcaagctcaagatgcccggcccggcaggagtgatagtggtcaaggggcttcagccttcggctgcttcaaaaggcgatctggccataatcaacagagcagtgcacaatgttgaggccgaaccgcatgacctgccgaagcacgtgccaaagcccacccctcatggcaagataataaaggtacagatggatgatgccgaccccacaaagctcgtgtcactagggggcaacatgggcgaggaagaagctgaaagcatcctggaggtgctcaagaagaatattggtatcttcgcttggagccctgtcgaagtgggaggtgtttcgacagatctcattatgcatcacctggcagtcaagccggaggccaagccaagaaaacagaagttgcgcaagatgtccgctgatcgccaagaggcggcgaaagccgaggtccaaaaactactcagggctagggtcattcaagaaatcgatcacccggagtggctggcaaatccagtgctggtgcgaaagtcaaacggcaaatggcgcatatgtgtcgatttcacagacctgaacaaagtatgtccgaaagacgatttccccttgccgcggattgatcagctcgtggattcaacagctggctgcgaacttatgagtttcctcgatgcgtattccggctatcaccagatccacatgaacccgcccgacatccccaagacagccttcattactccattcggcacattttgtcacctcaggatggctttcggcctgaggaatgctggagcaaccttcgccaggctggtgtacaaggtcctttgtaagcagttggggcgaaacgtggaagcttatgtcgatgacatcgtcgtaaaaagccgcaaggctttcgatcatgcgtctgaactacaggagacctttgacaacttgcgcacaacgggcataaaactgaatcccgagaagtgcgttttcggtgttcgcgcaggcaagctgttggacttccttgtttctgaaagaggcattgaggcgaatcctgagaaaatcaacgctattcagcaaatgaagcacccgtcgagcgtacatgaggtacaaaagcttgcgggccgaattgcggcacttagccgatccctctcaaaggcagccgaaagaggtttatccttcttcaagaccctccggggcgcgggaaagttcaattggatgccagaatgccaagcagcgttcgacgagctaaagcaatacctcaaagcctaccagctctgataagcccagcaccagggagcgaactgctactatacttagcagcttcgccagcggcagtcagtgctgccctcgtccaagaaacagagttcggccagaagccggtctatttcgtctctgaagcattgcaaggagcgaagacaagatacattgaaattgaaaagctcgcttacgccctggtgatggcttcgcgcaagctcaagcactacttctaggcccacaaagtaacagtgccatcacagtaccccttgtgcgaaatactccgaggcaaggaagttactggccgactcagcaagtgggcggcagagctatccccgttcgacttgcattttgttgcacgcaccgctgtcaagtctcaagtgctagctgacttcgtagctgaatggacatcagtattcgcctccgagctcgagcccgtcgaaaaatcctgggtgatgtgctccgacggtttgtggtcgcataagggggcaggcattgcggcagtactcatttcgccgaatggtgtgccaattcggtatgctgcaaggctgcagttcaacacaaccaacaacgcagcagaatacaaagccattcttctgggtctaagaaaggcgaaagcactgggagtccggcgcttgctaatccgaaccgattctaagttggtggcaggccacgttgacaaatccttcgaggcaaaagaagaaggaatgaagaggtatttggaggccgtttggtccatggaaaagtacttcaccggcataacagtcgaacacttacctagaggccagaacgaggaagcagacgccttggcgaaatctgttgcttatggcggaccacatttgcctggcatctttttcgaagtcctacttgcaccaagtgtgcccgtggacagcttggaggtcatggcaccgggcgaagacccacacgactggcgaaccccgtttgtaaaacatcttgaaactggttggcttccggaagacgaagcagaagcaaagcgcttgcaaatcagggccacgaagtataagatggtctcgggccagctctatcgctccggggtacttcaacccttacttcattgcatctcttccgccgaaggcgaggaaatggcgaaggaaatacaccaggggctatgtggcgcgcaccaagcggcaagaacggtggccttcaaagtgtttagacaaggagtttactggcccactgtgttgaaagtctgtgctgagcaaatcaagaagtgcgaaagttgccaacgtcatggccgaagccaaaccgtgccccactatgatttgcagcccattgcgccaatctggccctttaccagatggggactggacatcattgggccgttcccggtggcgcgaaacgggtataagttcgtaattgtggctgtagaatatttctctcggtggatcgaggccgaacccctcggagcaatcacttcggcaacagtacagaagtttgttaggaaaaacataatctgccgtttcggagtgccaaaagagttcatcactgacaatggcaagcagttcgactctgacaagttcagagagatgtgcgaaggacttaacctgcaaatcaggttcgcgtcggtcgcacacccgcagtcaaatggggcggccgaatgtacaaatggcaagatcctagaagcactaaagaaaaggctcgagggggcagcgaagggtaaatggctcgaggaaatgttatctgttctctgggcccttcggacaacccccacaagaccaaccaaatttagcccgttcatgcttctttatggcgatgaggcaatgaccccagcagagctaggggctaactcaccaagggtgatgttctccgagggcgaagggggacgcgaagtgtcgctcgaactcctggaaggggtaagagtcgaagcactcgagcacatgcgcaagtacgccgtaggcacttcggcagggacccctcgcacttttgcgcccatatcagtaagggcgaggcgaagcgtttggcacgccgttcgtgcggacttggtagttttcgccatctcccgcgagaaccgccgcgactcctctgcagcgctcgcttcggccttgctgacctcctggcgaagagcctccattttcggctcagtgaggttataataatccgttagcacggtggagtgagccttttctttctccagttcggccttgaggtgatcgacctcagccctagcctctctccctttctccaattcggattggagccgcttgttttcggcctgcgcctctttcagggtattggcgagggcctccatctccaaattcttgcggcctatttcgtcatccttggcccgaagacggtttttgaatccatcaagacgagcccgcatggttcgctctgtcgaacagtgagccgcaaggatctggatgcaaaatacgaacgccgaagagagcaaatattagttatgggacaagtaaagaagtaggggaaaactaagaatagagaaaaaaaacatacccgaaccgccaagcttttgatagcacaacacccctcatcgaactcgttcagttcggtgaacagactcggggtattggcaggtaagacaagattgcttaccccctccacaaaaggaaggaggtccgcccgggtctcgaaatcgctaggggcgaaatgaggcgccacaagcgaatactccgaagcagaagtctcgacggctgcccccttccccttcgcctcgattagcggcgatgcaaccggctgacgcagagggctgccgaagaccctcacggcagttgtcatgatccgttccgcggaggccgaagccccagcggcagcgctaccgccttctccgtcagcaccaagtggaagaacgggggcgatcgaaaggtccaggctacggccagcgggcgaagtcggagtcccatcagaagactcgtcgtcgctgaaaatgcgagcgacgtcgacgagtcctttcttcttagagatcttcttgaccggacctcccttcgtcgccttgcccgacgagaatgcaactagggccttcgccccgtccaaatctttttgtcgaaggggggagcttttcgactccaccccggtctcgttgtggccggactgggagtgggagtgtagccaggagtatcaacgcggtcttcgatcgcctcgctcgcggccttttcagccacggcctccgcctcctcttcttcctccccttcttcctcgccatcatgctcttcggcatcgtcctcatcatcggcgtcgaaatccaacgaagcaggagcccttcgcttcctaggggcaagctttacttgtccgcgtgttcgctttcgcgaaggtcctacatcgtcgtcggctttgtgggggttcgcccggggaggcaattcaccgttgtcgtgtcaacagctggctatactcgatgaccgacacatcgccgatcatcctgcgggcttcagtttcagcctggtcgagggttaacactgtaaaagtaaaggatgtagctacattaaaggtcgaacaaggcaaaatagaacagtcttactattcattccctcaaggagaaccagcttcggcaaactgtcaatctcttcgctctgatcaaccgtaacctgccatgactgggagaggggaaagatgcgaagcatacagaattcctcaaccaagtcacggcagctaaggcgagagcaaacctttcgtagaagaacgaaccgcgcctccatagcgccgtccacggcaatcttgggtttccggttcggcacaatcgccctgcgccggcaccaaagagctttcaccgagtcagaaccagcctcgaaggggatggtgtgatagaaccacctcgccatccaatggcggtcccacttcgacatggcggcgttcaccggccagagatcggaccgctcagggcgaacgttaaagttcacgctcccgaacactatcttctttgttccagccggggtaatcactgtcttcaagttcacggtggcgaaaaatatagcgccgaagagtgcggcgctaggttcaaacccggaagtccggcacgcccagtcgaagatggagatccgaaccaacgccgacgggctcaactgtgggagctccacctggaaaaggcgaaggatctccggcaacaacacgttgcacggaaaccgtagccccgcctcaaaaaagacggcgaacaccaccgtccgattgtcgacaggcttcggtactacggctttccccggggcgaaaccgcctcaaccaacgccccagagctgaccaatttcgccagctcgacgtcgtccatgagagaaacccccaaaaaggcggtgctatcatcatcaacccggccgggatccggccctttcgctgaaacagggtttggcttgcgaggggccatggcgaagggtgtgtatgtgatggcgaaggaagagaatgggcgaaacaccagaggggtcaagaaatgctgcggaaggaaagaacaaaggaaaagagtgcacgcggtaaaaatggcaagtgtaacaatgaaaaggacagaagggtgggaatatatagcccacccgggcgacggttcgcctacccaccagtgccacgtgtcgcaggggtaggcgaaacggtaaattcccatcgaccgagcagcatagtaaaaaagcccataaagggaaagcccaatattgttcccttcggcccggcaaaagtaaaagtatatatatttgtataccactggccatgggggcaaacagcggcaaaataataccagccgcacaagtaacaaactctatttgcaggaacaatgtaggtttcggcaggagcatcggtcgaaagggggcgccgcataccataccacatggtgtgcatggtctcggccgaagctccattctcacccttgcccgtgaggggcttgttggcggatggcatgaggcccttcgaccaaatctgccgaaacccatggcgaagactacggagcaagaatggcaagaggcgaagggtcgtacgaggagtgagtaagctagaggcgtcccagacgaagggtgcaaggcgaagagtatctgtcgaaggaagacgacttcgccgtggcgagttcggccccgcgagggccgaaaaagccttcccggcccatcaagcctaggggctatagggccggcgatcgcccgacggcccatcaggggcccatgagcctccgtaacgttgtgtacccttgtgaatgtccctttcgtaagggcaatcgtgtaaattcccctttgtaacctaaaccctagcagtaagaacttgtaatggggctatatatagtcccctagggccatgtaatagggggacggaggaggaagaaattccaaaaactaacacacttcgtttctttccaaccactgttgagcaaccacgtctttcgacgtatgcggttgtcgtttcgacaacaatattattcagtgtgaaccattaattatctctaattacttatccagatagtattgagcgccataatacgagttattatcatataatgaagtgaaaagccgatgtgaccggttttgcttttaagaagagctcagtgttggcgtaaaccatgaatcaaagtttaggttagtccattggtaaaggtcttttcttctatgaaagtttcatgagatattgacgtggtaccttctagactacaccaatgtcttacatttcctcgtaataataacatcattgttgttttggtcgaagtggaaacagtccgactagttgtcacacaatcctaattggtgtgggcgttaaacaatactgccacgcccattacgaatggcgtgataatgttgtttcaccatgctatacaggtagcgtggtcgaaaggttctcattttagaagtaaggccctgttcagtgcagcttactgctgcaacaactgtaactagccaactacactaacaacaccagtgtgtagaaataatgtagttgctgtagtggctgcagctgcgcagctgcaaaaaatttgcagcgaacagaccctaagttgtcaaatgattttatttttgaaatttaaaggtttaaaataaaataaagtgtcactgttcattggactactcctatatatagttgtcatatggcccattccatttagtgatgaaaggtatgtacaatcaagcatgaatgcacgagagacacagcaccattcatgctttgatgatgatgttcatcgatcgaaaagatgcatgtacttgatgatacggccacaagcaagggtcgtcttcgccgggatttggatattgtgactgcaacctaagcagtagcggtacgcatcgttggatacaaactgaacgacctagatcgtgtttttactgttcacactaccgcagcaataagcactgtagcacgaagtactgttcacctggttgctgtagctacgaatctagaccattgatcgcaaaaatggacagccgatgttgcgtgcagttgctaagttgcagttactactgcaactgcacctgatccgaattctcttcggcgagcaatcaaccaaggggacgcagctcctcttacagactgacacgttagagggaagtgcgttcttaattaataggtggggtctatttttatgggcccacatgtaagcagcatacgtccctctgatgtacgtcaaaggtgccttacccgtacgcaaggacatattttcacctgagaactgctttgtataattaactagatgaatatccagctgcgttgctgtggaaaattaagttgtataatatgtacaaataaattgtaatatgttttgtaaacaaaaataaaatgacttcatatattttatataatttacacatggttgtaaatttaattcatttatgaaacaaggaaagtatagcgagaaataattatcagttggaagttaacatgcacgcaatctatgcgtgtaaccagccacacgaccttttacattagaattttctaaaaagtttgtaatattcatagtaaatgttatgtgtaccatattgtttgcactagaaaacttttaagttcaaaaatgactatttttagggtgtttaaaaatgattataattctaagccatggattaattgttttgtgtaaaaccttaactcaaaatttaaaatgatttcaaaagtttgattagtaactgaaagcaagatgtgaaatagcatttgatcgactaaactgattgttctatcgtcatttggattttgaatatatttagcagattcattcaaggtattaattatgaatcctataaatctatacaagtgattctcaattagtatagttattactccctccgtttcaaaatgtttgacaccgttgactttttagcacgtgtttgaccattcggcttattcaaaaaaattcatgaaatatgtaaaactatatgtgt

SEQ ID NO: 7703 - DNA, 5104 bp, Oryza sativa
  unsure (1)..(5104): unsure at all n locations
atacaactaacaatattaccattcaaaagctaacatcatttgctttagcatgcaggagtgtgggggcaaattgagtccataagccacaaaaagaaacaattcattccatgatattcattagaagttctggcttacatcaacttctgtagaatacaaccaccatctcatactaaataaagagagatgtgaaggaaggacagggaaaaaaacaaccagagacccatcatgataaccctaaacaaagagcaacagcaattcagaactcttaatctttcacctaaagttagttttgaccggagactatcaccaaccaaaagcacactggactgctaaaatcagaataaaatcactctcaattgccagagaagaaacccttcttcctcgctgggctccgataaattagtatcgctataagagaaagaacagcaccaccaccatgatcccttaccatgtggttgggtgcaggatgagaaacacccctcctggttcttccacaaggcaccgacaaaaaaaaacgccagaagttactaacaactacctactaccatatatctgaataagataggtaagggttcttcacaataggcctcctcagggatatggaagaccatgtgaattccttaagcttcctatttacaggacatttggaatttgcaaagctccaaatcatcctcccttggctctttcttgctaccctacaaccatcaaaatgagtcagtagcactggcactgcaagaagcaactatgaacagacagcaaatcacttgaaatctcgctgcagtgctccgctccacgcgacgttgtcgtctgccttctccaacgcggccaccttagcactatggcattggagaagaccaaccttgctcttctcgccatgaggaagctcgacggtctcgctgatggatccagacttgatgtcggtgggcgggatgaagcaatcgatggagaggccagggacattgaacgcgacctcctcgatgctccatgcctcctccatgcgagtcttggtgtggctcatggcaacctctccgaaacggaagagggtcacagcggagcgaccagcgtgcgcaaccattataccctccaccgggcggtagtcctcaatgaacgaattgatggtggtctcccagtaaactgcgtcccctccggtggtggactgaatcctggtgaggtgagaatcctcaagatgcacaaggaggccagtcttctggctgaaatacccaaagagaacatgccggatgatctccgcaagcccctcgctgcgcgcccttagcgtctcagggtccgcgcacagcttcaggatgaagcaatcctccccattcaccttcctctcgccaatgcaccgcgcaccggcaaacatgctcgccgcggtcagaggatccaagccctgaagatacaatatgaaccaacaacaatttcagttagactaccaccttcttccaccatatacacacaatggcacatttcagacgacatcaaactacaagacatggcaggctccccggtgtgctacctggagtgcgcggcggagagggcggacggggcccttggcggaatgcgcgccgagccacggcgtgtggcgccacacgagcttgccattgcagccggcgtgcaccttgctcccgccgacggcgagctcaatgtaccacatctccggggccatctgccacagcacgaaccggccggactccgtggcgcgcgccgccatgcggttcctcaccacgcggccgccggtctcgaactccgtcgccaccatcctcaccttgcccatggcgtacgagttcctcaccgatgacagcagcttctgccccccggaggcagccagatactgctgcagaatgtactgcgccgacgaggtctcctgcaagaacacatcgtaatggtaaaacttacagctacaacaaaatactttttacaactacatcaaagagttgctgatttcttttttctttcagtaaatgggtaactgaaagtgaaatggtagaacactacatgaggaataaaccgtttgtacagtggatatgagaaaatgtatcacatccaaacatcacatcaagaaccagttcttcttctttctttttcttttttttttcatattgtttcttcctaacgaaccagcaggtttttctagaagaagaaataattgaataggtggcgactttagaaattaattaatccaagaactcaaaatccacaaaaaaaaattcaccgaaattttcactcgagaggatttcacccaagagcacttacaatgggggtgtccttgatgctgaggtgggggagcggctcgccggcggcgacgtgcaccggcgcgagcggcgcgcccatgacgccgagcagcagcctcaggtcgttccgcctcgccgcgccgccgccaccacccgccgcgaccaccgccgcgccggccgtcgacggcgcgcgcgacagctggccgcgcacccaccgcccccacccttccctcctcgccgccgccgccgacgacgacgatctcccgccgtctcccgactccggatccgggccctccatgagcggcgccagcatctcccccccaccaccacctcccgcgtaccgcagcgccgcggccacctctgccgcggcggccgcctgcgaccggcggcgagcgcgcgccggcgagaggccgcgggcgacctcctcccggagcgcggagaagaagccctgcttcttgtccatgggagggacctgtttgtaaatacgagaaaacaaaggggccctcgcgcgcgtgaagaaccgtgagggggggaggacctgaatgtaaatgtaagagaagccgagggggctacgcgggaaatggcagtggagcgaggagtgtgtgaagcgaggagactgcggtgggcttatacggttgccagtgtgctgcagtgattctggtcacctcccatggtgaactcaccccccttttataacattggnggnnntannccanncccatttnaannccnnannccnntanantttttggtattttacctagcactgtaatttttctttttcaccttcttctactcttggggtgaaaagagtcgatgtcgattaatcggaatgacggaatttatgcggtcggggaacgagtaatgttgacgatatcaacggtacataatgggttgctcactgaacctgtattaatagtcgtactgaattgtcttattttacgaccctagcttagattagatagggtattgtttggagtggttgtggtttctagtttgactttgattgaatgcgcggaaggattctggagggggttaaatcttgaattatgagaattttaattagacatgcaaccgtacaagaaatgtagggtttgcttaagcttcagaacacgcttcttcgattggataataagacacacaactcaatcaatgttttgtcatgtcattctgttctactatataaattatattttggataaaaccaaaaggatgacagtgtatatatgacattagtatacatattaaaatgaagaatccaacctactcttaaaagaaaaactaaacctattaatctttatgttgagacacatttttttataacgatcctcataatcaaccatactattttaacacctaacgtctgtagacagtgttctaatggcggttagaattttccaaattatgaattgtaaaacgaaaagtaacatctaattagcttctggttgtgttttattgtcctaactgtgttatgtataaaatcaaaacaatgacatgtagatatgatgttgctttacataatactagaatagaacctaacctattaaaagcaaaactaaacctattaacctttatgctgagacacatttttcaaatcaatccttacataaaaaaactatatatataaatattttttattattttaacaccaactactgtagatagtgatgtaagggcagcttagaattttccaatatatgaattgtaaaacaaaaggtaaataaaagaaaatgacaaaggtgatggagccaaagcctacccatcaccctagtgaggtgagcatagcacactagccagacctgccaccgtgggccccacactggggctcgccgtcccatgacggcgccgttagcgaagcttctgatgccgggcggacggaaaagccaccaattaacgccgttagcttagcggcagcacgtgacacgcacgcagggctcacctggaccggacagggtctcttttgctccctgtttccagcttccacttgtgaaatccgtacttagattagattagattagattcaaagcactttaattagctttcataagtgcctctaattagctttgcttagctttgatcactcaaagctaaaaagaggccacaccctggtcttctttaccccttctaccaattatggtgtttcatgaagcagatttacagatttatatagtgtgaagatgctgttcgggttctctttgcaaattatcgagaaaaaagaaatcaccaaattaggctgtccatgaagaggcaaagtcaagttaaacaagaatctaaccgtacctaacactctcaaggtggtgttaatatatgcgacataattaacaatgaataacgtgcttacgtatagaaaatcataggtgtgcttcttagaagctaggatttcactcccgaccgttggaggacagcaagaatatttttttagttgcttcgaaatgtgcacaaatatgtataaatagatttttaaccattacgaggctgacacgtgggttcaggttaacgggggctgggtagaactaaactgatgaactcaccaaccagctgaactctaataattttgacggattttgtccgtaccctctagcgcgaaaatattgtgtagatttagtatatttgatgctactcgtggtgtctagcgtggggttaattatgtatttagctattgtttggtggttaattatttcatgagtcattacttagccaatgaaactatctccatcaaggagggggacttggcgtgcgtgcaagctaggttgattaataattagtagtacttggtttggttggtgatgctaattgatcatcaatgcacgctcaagggcatgatcataagagagtgtgttagtagggtcacatgataattaagcagagcatgcaca

SEQ ID NO: 7704 - DNA, 1344 bp, Oryza sativa
ataaacactttacaccaagtgcctgcagaaactcagctgcactctcactcatcagtttaccatctttattccttcttaccctacagcatttcttgatccgatggagccctgaccgactgttcctgccacagtaatcccagatcatctctgaataagtaaaaaaatttcttactcttgtcagcagcatgcagcaagccacttcacttcagttggactcccagcctttgagatgccatgccatggcatggaatggaatatcatgtgttgctgatcaaacaaagtaccttgcaattgcactagaggagtaaaggtggcaacttttccttttttcttgtgagggcaacttttccctctgaactttttgatcaagacttcacctttagctcacccaagtcaaaagagagagcaatatgcaatgccctacacacacacacacacacacacacacacacacatctcctctctccataattgattgtgtgttttgctgttcaaagtccaagtctaaaagtgctctctgctcttaacaaccttggagtgctccagtgacagcagtgtgtgtgtgtgcgtgtggtcctgatcgatctctgaacttttaaaacacacaaatgcagcaaacggttttcagaaggagaaaaagctgcagaaactcgctggattcatgtgtgtttgattgatttcagcaatgcattgggagatcttttgcgcaatttttcttcggtttctggagacgtagggtccggtttggaaccatgtgtgaaaatgaaggatcaattaaacggcttgcaataattttgctcttgctggatagtagctgagtagggttgagcttgttcttgcatgcttttcttgtgtagccttttgtgtgtaggaggcggcttcattgtcaaactaggctaaggtagtgatgcttgagggcatgttcagtttgctttgttccattctagtatggttgtatgaacttttctaggcttcctttggaatgtgtggctttcttggtattcaattccagcatgtgtaatgagaaaacgggataataggaaaaatatgtgattttaatgagaacgcaagtgtaaaacaaatatttaaaagaaagaaaaatacaggaagggccatttgaatagaccgaaaaaaatatacgaattagagcagagataaaactcctgcaaaaaaaaagaaaaagagcagagataaaacaaaatgtaggttttcatgaggttggtcctcatgtcaaatcgaaattgtattgtcttgtgccatttcacatgaatttcataggattgttgaagtcccaatctttttgtctcaaagaaccaaataggaaatttttcaataggagtcata

SEQ ID NO: 7705 - DNA, 1135 bp, Oryza sativa
tgcaggccgtgtatttggccacctttccggccagagccaactcggcctgctgtttgttgccccagaggaggacaacatggagacgatcgtcgcgcaggatgcgcttgtaatcacgtggaactcgtcgccagacaccgcagatcttgcccgtggcattctgatagacactgagagtgcccgccaaggtggtctccagttgatgctcctccaggattacacccgcatcatcaacgaattgaatggcacgcggacgaccgattcgcgatgaggtgtagaaggagtagtatagattcttcttgtggaacaggaaacgggcggtggccaccacattctgcggattgtaggtggtgtacatggacttcatttcctcacccttgaggaaataggaggtgcggcccgttagcaacgcagcgtaatctataaatagggatcaaatgaaaggtggagataatccaggtgttagataaatacaatagttctcttgttaattaaatgtaggagctggtgaatgggattacaatttcccgcaggatttggcggattctattgggatctgggtgggtgtccggtacttttgtacttacgtttcatgttgcgctcttcctcttcattgggcacgggcacatccaaggctacatccgtatctgaaagatggagggaatacaaatagagaataagatgatgctgggcgataaggtacgaccttaaatggaatttagatagcaacaaatgcttcaaagcaaccgaaccgccgccagccattcaccatccatccagccagccatccagccagccatccagccagccaaccaactatccatccacaatttgtggacacaattccggcattcaaccaaaattccagttgaatgggtgaatggtgaatggctgaatggacgaatgccaggggatcatcatgaatggcaatgcaactatcaggtagagatcccacctccgaataagaccttccatttccacctctcgcttccacccaggtggcattcattaatcgtgcataaattgagggcaggtagaaggtagagtttctcgaacgggaagtctaacctacatctaactagggaagtgctttgtatttgaggatgtgcggactctggggttctgaattcatgggtac

SEQ ID NO: 7706 - DNA, 5340 bp, Oryza sativa
caaaagatcattgagatgaggtatggcacatttgaagcttcttatgataatttgcctcgtttgttagccaccattgcccagaggaataataatacgtactatgacctacatacatttacatcggttgatgatcgaacaaagagtgtgctgcaaagagtctttttctcattgggtgcttgcatcaatgcttttgtgcattgtcgacctgttctatgcatagatggaacttttatgacaggtaaataccgaggttagatattgacagcaattgggtgtgatgggaacaaccaggttctacctatggcttttgcatttgtagagagtgagaacactgaaagctggtactggttcctagagagagtgcacattgcagtggtgcgtatgaggcccaacgtttgccttatacataatcgtcatgcgggtatgttgcgggctattgactacttgcagaacggttgggatgagaagggacttccagctaagtggcctgatgttcggagtcggtggtgcatgcgtcacatgggtgcaaatttctacaagcaattcaagaacaagcatcttatggagctctttaagaggctctgtgcacagaatcaagagaagaaatttaatgagttgtgggacaagttggatgagttgacaacgaagcaaacagatgagcaatctcgcagaccactagttgaaggtgacgagcctcccatacctcttggtgcattacatgatgacccaccaacaatgagaaggaggtcagggtcgtccatcagaaatttcactcagtggattgagaatgagcctaaggagaagtggtctctattgttcgacaccgatggatctcggtatggcataatgacaaccaatttggcagaggtttacaactgggtaatgcgaggagttcgggtacttccattggttgctattgttgaattcatccttcacggcacgcaagcgtactttagggatcgatacaagaaaattggtccgtccatggccgataacaacatagtgtttggcaacgtagtgacaaagtacatggaagataaaatcaaaaaggcacggagacatcgagttgttgctgaaggcacacaagtgcatcggtatgaaataatgtgtgttgataggagcaggcgtggtatctatcgcaagcaagccatgcaggaatgtgtcttgaaggcggatggtggatgtacctgcagttgtatgaagccgaagcttcatcaccttccttgctcacacgttcttgttgctgccggtgattgtggcatatctcccaatgtgtacgtctcaaattatttcaggaaagaagcaatctttcatacatggagtgaggagatatatgggttcgggatctcaggatcttacacaacgctgagtgcccaagttttttatattctagatccatctaagttaagggtgaaaaagggtcgacgccaaactagacgcatcagaaatgatatggatgagtcagaagcaggtgggaggactttacgctgcagcaagtgtgatctgcgcggccatacttacaagaaatgcccgaagaatgcagaagttccaagcggcgcagatgctagtcaatctggacaggcaagtgatggtaggcgaccacctggtgaaggaacaacaagcaggcgcgcaaggccaaggcgtcgtcgcgcagcaggcgattccatggtgtaacaatgctttcgatttaggaaataaaatgttgttgtgatgtaatgagtgttcggactaaatacttctatcgtgtaatttcaattcaatgttgttgtaatgagtacctccgactattgttgtactagtagtattgcgaactattcggtgttgtatcataatgttatcgtgatgagtgttcggactaaacacttttgtttgtttgtactcttgtttaatatgtgttagtaattcgcttatgaacatttattacttatgttgaactaattatttatatgtttctgatcaacctatttgatgcaggtatggcgtacgacacaccggcgctgttgaaccgtgggattgacaggaaccaccgctcgttcctgtcagcagtcgagggtgcacagctcggcaccttccgtccacgcacgtcgcagtggagctggggttctgccgtgctagcagccacgtaccgtgccctctgtgaggcgtgcacgaagactgacgcgggagcgatcatcgctggctgccctatgttgcttcagctttgggcagccgagaggtttgccataggtcgaccagtggtggacagcgcaccctacggggttggtcgcagcgcgcagtggccagaggacggtcccacgatggggacttactggtgtcgacgtggggttagtgcaacttcgctgcgttataagtttatcagtcgtcttcttttttttcttcacataacatgtctaattccgatcatgtttattgcagcgtcgttacgctcacgtccaggtgagacgtggttacccggacttcgtgttcgagtttgaccgtctccagccgagcgacgtcatctgggagccgtacacagaagaggccgtcgctgcgagagcaccgctaggactttcgtccttgtgcacacgcgaccaggcttactggctcaccatcctgccgatggtgttcgacattttcgttgagcctcactgcccgcagcgtgtgatgagacagttcggacttaggcaggtgtttcctggcaacgtgcagccgaccgtcctccctgccgaccactcgtgagttcggattgttcatttctaaatttttaggcgaattacttcatcgagccatataatttacctctcttcacaggttgactcgacggggacagctagcaggcgcaactttgggctccacgtgtacagcagtacgttgacgactgggtgttagctacagaggaggtgatcaacgagctcttcccacacacggaggagaactaccgtgactaccttcgctggtaccttcctcgcactcgtgcgcgtgtgaccttcactccagacgccccagagccgcacgttgtcgctgtcacggacgcgtatcccacgcaccgtgaccgagactacttcgtggcggtacgtccaatttgtattacttcttacaattatttcatttatcttgcataatataggacaactactgaattttttatttccatcttgcataggctgatgccgcacgggatatcagtgccgatatcaccgcagtccaagtgaggttgaacagaggtttgcacttgactgacgttgagcagagggtgaccttcgaccggatgcaggagaagatgcgtgcggtcatgcgcgtcttctcctgtcgcagcgccgtggacgtcgtacctccagctggtccggtacaaccacggcctcgcgcgcctaccgtcggagcaggacctcgacctacggcacctgtttcgcacggtactgctcagcccagaggtttcttaagttttgtttctgtttttctacgaaaacatcaccccgtcgtaacttgatgttccatcctcgcaggacctcgtttgccttcgagcgccccaagcttcggagcagtgcgacctacagcaccggtttcgcacggtacagttcagcccagatattagttcatttttgtttcagcttttgcacgaatatgtcaccatgttttaactgcacgtttcctcatcgcaggacctcgtctgccttcgagcgcgttcgcaggcacgaccggcgcttccgcgagctccacaggggcgttcgccacctcttcgggcgcgttcgccagctcttcctctcacggagcgtcgatccctcgcccacacggtactttactttttattactactgttaaatacttgtacgaaactgatggtccttgtccagcaggatttgcagccgggatcttcggtactggggcctcttcgtctcacgccggtaggactggtcctactagccagttctacgacgacgacttgcacggtgcacaccaccacgacgtactaggctcctctcagcttggaggagctccagaggcgcacactcaggagcagccagaggtcacacctgtacaggcaggacgggttggccgtgccgtacccccggaccgactcacgtactcccaggggcacattagggcgcagggtaggagggacaggggtaagaggcctcgtcagtagtgttctacctcttcagtccttatgtgaccgtttcttttggcttacaaacttgtaaagcagtactacttttgctattactactgcagtactacttgtgtttgtctcgtctacatagttcttttcattcatatggtgctagaacaacttatgctcacgacaacacactttcggcgcttcacggtagtgtcagatccagtagcgcgcacagtccacaacagcacacatgaaaagcggcagctcgagttatcactatcaactttcggcgctgcctgttgacataaagtgaatcacgcccacgcgtgatcgtcttgtcacatctaatgaataatgtatctcattgagttcacatatattgcagtgaaaatgacgctatataattgacaatctgaaggcaacctcttcatatcttctttcccactagcacaccacacacgaaaatggaagcctattcattggtaatacgtaatctagatttgagattatgtagaacattcttcactacaattttacattttggcagcaaaccaaatatgatcaaatgcaattttaccttaccaaatatttggtagtgccaaaacttgcttatattttggcactaacaaaatatttgtacggtaacaatccaaatatgccctaaaaaataataaaattgtattttaccagtcttggagattttaatcttgtatagttttcaatataaaaagatttgataactattgatatttatacaaaaatatagagcgcagtataaaatcgccctcccccagggcggcaagggggccgcctgcaaaattccatgccccctcgccgcccatttgcaggcggcccccccacagtacaaaatcgccctagcggagggcggcaagggtgccgcctgcaaaattccatgccccctcgccgcccatttgcaggcggcgccctagcggagggcggcaagggggccgcctgcaaatttcgttgacggccgtcgcccgagagcgaacggccggctgccacgtcattttcgccgccctctgggagggcgatttttaaaaatcgccctcccagagggcggtaggcgactacttccgtcaattttcaaaatggaaaattatttttgtaaaacttttaataaaaaaaattcgtgaaaagggtagcttaggtagctgtgctttttgtaaggcccaaagtacagtgtgagtttcctggcccatgtaggataggcctttgcactttgg

SEQ ID NO: 7707 - DNA, 10315 bp, Oryza sativa
ccgtcctgctggtcctactaggtctccggcacaccagccgcttcgcatcgttggcgctggtcctgcctctccccaccggcctcctcacatacacccacctccccgctactgtcgcggcgccagaggacgggtccgcgccagccgtggtgaactgggcagagacggcgaggccggcgacgacaacgatgccgtcgcggcccgcctcgcggagcacgaggcgggcggcggcgcaggaccgcgcgcccaccggccttgcccaacggcctcctcccctcctgtcggctagcctacgccgccctcgccggtggcctccgctccttcccccgctgccctgagattagagagagtgagagaaatgagaagaggggaaaagagagggtaggctgacatggcacgatgacatgtggagcccaggtgggtcccacgctgacttagcggccacgtaggacaaaactgggatcaaaatcgtcgagggacctatcgtgaccggtttttgtatagttaagggacccgcggtatctggttttacggttcgaggacgtttttgtatctcgatgataagttgagggaccttcggtgtactttttcccttctgttggaatgagttcgctttaagttcctcgtcttgaactccgggtttgaatcgtgtccttgaaccgtagcaccatatataatgcgttcttgaacttgccataccgaggtatccaaggtcctagaacagtattgtcgcgatttcgactaacgtagtagtgagtggccctatgtggtgtcccaggacagtattgtcgtgatttcgactaacgtggcactgagtcaacatggaccctatgtggtccccgcaggttagtggtcagtcttcctcctctagatctcctcttgtttctcttcctcctaggccccaagtggtcatcgacagggcagaagtgcaatgtctgataggatagcagctggacggtggcaccacgctaccgagctggactagtcgtcagactgcagtttttcaatatttgttggttttcctcgcttttttttagcgatttttttatgggggaggaggcaagaggaggaaaaaggacgaccatgctttttaagtaattaatatatgaaaaatcgctatgccgcttactcattgcgcagaggaagatcacggatgttgcataattacttccatagcaaccaaatggcaagaactttgtagctactggatactgtgtgtgagctactggattaagaaaaaaacggatggatccagtacttgcttgatccacttcgtcgacccattctcggtcatatggtccacgaaaatttttaatctccattgaaatgcacaggcaatctaaagtttgcaacgggacaaacaattgactaaggatagactttcaaatttgccaccaagctaactttcaaaaaaaaaatgttaccatcaagatatatgttgccggcttcgacacatatatagacataacattatgttttcaaaaaataagaaaaaaaaacataacattatcacaaatcaatgaatatggacgtcaaaattcaccatatataagcatcgatcctggctttttttttatggtggaaatctagctacttggcaagtcaatattctggctcgatcgtcctcgatcttactggctacgtacggtaatttccactggtcacaaaaatatgttatactattctggatatgattcaaatcaaacttgttgttttttacgtggtttatatgccgcagcttgagtatatctcacccaatgacccaaacacttgataatgttacgaatttattgtctacttttacaaaagaaaaggaaagaaatttagtgctgaaagttacaattttggcactaaaatatccaaaaatggtatgtttttctgtggtaagagaaaatgacccccttttttttaagaacggtataagggcatgtacaaaggtagagtcggatatgagctctacgttatctagagactagcatcctacaacagttagagacaatatggtctctaatcattaatgtatcaaaatattttttcttacttttctttcctttgtttcaccatcatgcaaaaaaatttgctctaataaatgctaagagtcgactctgagccgttgtcatgtataacaaccatactcctttctctttcttctatgtcaccaaatttacttgcatggcaatagagagagaccactaataaacaccgttgtatatgccctaacacatgaagatgcttctatatatgcatgttttcgttgatgccggtgcgaatctagctgagaatatcatctggatcagcaccattacatacacgatgaaccttgaactgaaaaaaataatgttttaccacaaaacatttggaaatttcaattcatgcggtaggctgaccccagaatctagttagtttcatcctgagcagagctagcattcactagcggatctagaaacattttaagtcccatgcaaaacccactagcatagataatctgcattgtacaatactctactaaacaaaagatttttctggacaagcatcttaataggttgcagtcgagcgataagtgtctgaatctgaccagttgactggccgcaagcgatatacattatcgtgtgtggtcgcttaagagatccgcacataataatgcagccgcatcacatgtggtcctcttaaacgatcgcttaaaagacctgcatgcgatcatggaccatatatccatcccctagaccgagctactaccggttgaacctgacgtttctctctctaaaacgaagcacaaaaagatgatgttttcaactcgaaatctttgcttgcctgcgaagatatatcttcgcgtgagaggttgggccgtccacaagcgaaaaatggtgatcttcacatacacctgggagcagacggaccggccaactgcacatgaaaatgtttttcggccatctagagaaaaccctttctataatagtgataccagcaacatgccattttcatttcttgccttgtgtaagccagttagggccactatctaggatagtcacattggctctatcagggtctagcatggcaagtggcgacatctttgatagtagctcttcgagtcaacttgccgtcaactgttcgtctgttgccacccatttcttacccacatgattttcttggatatgtgagttcatctgaaccgttaaatctcaatcggacggaggaaaaaaaataaaaatcaacagtgaatattttgaagttttctcacataagaagatttatatgctttatatatgggggaagatgaggtatagctttacgtgcataaaacataaacgtttaattattcaagttcgctcaacaaggcgcgaaaaaatggcgcgaaagctgttcgttctcgtgctcatcatgtgttcgaccaccgccctaattacttgcaccaatggcggcgccggcgacggaggcgaagggctccacatgaagctcacccacgtcgacgccaagggtaactacaccgcggaggagctcgtgcggcgcgccgtcgccgccggcaagcagcggctggccttcctggacgccgcgatggccggcggcggcgacggcggcggcgtgggcgcgcccgtccgctgggcgacgctgcagtacgtcgccgagtacctcatcggcgacccgccgcagcgcgcggaggcgctcatcgacaccggcagcgacctcgtctggacgcagtgctccacctgcctccgcaaggtgtgtgccaggcaggcgctgccgtactacaactcgtcggcgtcgagcaccttcgcgccggtgccgtgcgcggcgaggatctgcgccgccaacgacgacatcatccacttctgcgatctcgccgccggctgctcggtcatcgccggctacggcgccggcgtcgtcgccggcacgctcggcaccgaggcgttcgcgttccagtcgggaacggcggagctcgccttcgggtgcgtgaccttcacgcggatcgtccagggcgcgctccatggcgcctccggcctcatcggcctcggccgcggccgcctctcgctggtgtcgcagaccggcgccaccaagttctcctactgcctcaccccttacttccacaacaacggagccaccggccacctgttcgtcggcgcgtcggcgagcttgggcggccatggcgacgtgatgaccacgcagttcgtgaagggccccaagggctccccgttctactacctccccctcatcggcctcaccgtcggggagacgaggctgccgatcccggccacggtgttcgacctccgggaggtcgccccggggctcttctccggcggcgtcatcatcgactccggctcgccgttcacgtcgctcgtccacgacgcgtacgacgcgctggcgtccgagctggcggcgcggctgaacggcagcctcgtggcgccgccgccggacgccgacgatggcgcgctgtgcgtggcgcggcgcgacgtgggcagggtggtgccggcggtggtgttccacttccgcggcggcgcggacatggcggtgccggcggagagctactgggcgccggtggacaaggcggcggcgtgcatggcgatcgccagcgcggggccgtaccggaggcagagcgtgatcggcaactaccagcagcagaacatgcgcgtgctctacgacctcgccaatggcgacttctccttccagcctgccgactgcagcgcgctctgatcatccaagccgccccgtgtcataatttcgtaaataaaaccatacaaactttttattaatcaatcatgatataatcattcacaagtaattaatttgtggttaaaaataaggcagttaatactgtccgttattcgagaatggaggtggtaatttgcctagatgtttcttcagttacgtaccctaagacaaatcttgatcgatcgagatgtaatacataattgaagaaacatccactgtctcgatggtgatctagcggggtagggggaactcaagtcctcccaacaccccacgctggatccgtccctgagtagggcagagagggagcgacagtagtccaagctaccgtggcaatggcggaggggtgtgatgtcgccagatctgcctctccccaaccctatcgcatgcagatatatcctttgtcacaatcctccatgattgcatcctcattgagctctatcggttgccaccgctgcctcattaagcttgtagccctagactaccccttgagctctatcaccgcctcctcgtcgagcatgatgacaatgatgagcggtcaccgccagctcagcctccccctctggccctctttctcattctctcaaatctctagccttttctctcattctctcaaatctctagccttctctctcattctctcattctatctcggctcattgagaggaagtggatagctagactcttggagttggagcttagtcaaacaatttcagttccactcaaaataatagtgaagctaactggagtgctataacaaatgaactaaagagatggagttgggtttaggctgctcctcaactttactccagacctagctgttggaattatattaggagttggagtcctactaaataggcccaaagaaaagcggatttactatttcacttacgacaatttttttgtggctcttatatttcactttttcattcataggatgttacatcaagatctgtgttcttgtatctaacttgcagttacatttagttccagtgcacttacactcagttacagtgcgccaaaaatagatttacagtagttttttctttagatttatgattcttgacatgtttgtcttttttgttattggttgaaaatagatatattagccgaaactgtcacgtggacgacatattagccgaaaccaccctcaaaacaactatgagagtcgttttgcaccgatttaaatacttgacggggaggggatgatataccctttttacggttaagagatacgaatcagattagattaggtagaatggactttctgcacgtctttgtaataaaaaaaacaagtaggcatgtgggccatgttctatgggccgtttcttacgggagatagcttcgatgggctctatcttttgggcctcctgtgacctacatgggccgcacttctttctatgatgggccgggggcccacatggcggcatcctctctctctctctctgtgcaccttatcccctccaactccgatggtgggcagtggaatctgctcccctcaaaatcacctccccaccccccacctcctcgccgccgccgccggccaccgccgccgccgccgccggaggggggagggggacgacgacggaggcgcacatgctgggcacgacggccgcgcagccgacgagcaggcggggcgggctctccacacctcgtacgttccccccctctcgttcgtatgcttgttcataaaagctttttgcgctcgcgtttctcatccgcgcggtgggctgtcgtcgaaaggcacgaggcatggatttgggtgcggcgtcgacaagatgaatcgtctgcggttggcgattccctccgcttcaaagaatgtgagccgctgtgggaagcttgctatctgcagagcacaaaggtctttaacttctaatctatgatgtttgtattcttcaggcaaagtattttttgagtctggatgtagagctaagctactcctagttttatagtctctagatagatatagcatttcatggtagagactagagaatgaatgacaggagtgccctcttaacataataataatagtattattacctaagtggatttgcagtatagttgaattggagtcataaactcaagtgattctatatccccatgtcctatttctaatcacagttgagtcgaacaccgccacaatggaacagaattactgtgatctttatcgaagatggatatggccattggtttgatgcatcatattcttcagtagaaaatgattgctgcaactctaccattgcaagtaggctgattggttactttgtaacttttagatagtggagtctggggagctgcttcattaaatggcatattctccttcatgcacttctttggataggtcttgttacatttggacaatcttgtaatcaaatattcttctataatatgttttcagctgcatgattatagtatttgtcagaatgtcctgtgacagttgatgtgatttgcttgtacagtgaagattctaaaggtgggggaggattcttgactggatttcttatagggggcgcaatcttcggaacattgggatatgtctttgctcctcaggttttgtcaaacctttttaaaaaaattatgcgtggcatcggcacatgtgaagtagataaagaaacccctcatatcaaatgttgattcatcatgtttattttacaatacactgccttactctctagtgctgtagcgaatagccaatgtcttgttgagcaatttagaagattatgaatttctgattttaacaacctaacatatccatgctcgagttgactaggtggagtgctaagtgctaactaaaagttatgcatctgatatactattcaccgataataatgttgttcataagcaatgctttgtgttagtcttctatggtcatgctcggcgctattgttatctggtttgcaaagattgttaatttggaattggttgttaacaacatagcgttcttgagcagatcagcaagacgctagattctttattagatgaaaatggacaagacagtgaatctgatgaacatggccttgtaaagccacggtatggtcgatattatgatgaaggtttagaggtaagaaatcaaaaatatcgctggactattctacttgtaacatgctttttctggcaactaaaactatgaattggatccagaaaacccgtcaaacactgggcgacaagataagccaactaaacttggcaattgacaaagctgcctcccggttgaagcgcgttgctggcaatgtggaaaaggaagctattaatgatgaatcagaagtagagacttcttagaacttgtaccttttcaggagttctgtttgctgagtaacaaatctttttgtaaattattcgtttcctttacactgtatgtatatgttaatacacaaacccttcatatgcataatttcacagacttgcatagtatattctagattattgccacaaaaatttgctcccaagattcaactatacaaatttgttgtgactgctattttctttaagcctccgtatgtgaaattaatgactactaatttttcttgagtctccatatgttaactatattaccatcaatttttctaaagcttccctatgtgaactgattgagtattcactgaatttgcagatcgaaatatcttcattcaacgataatgagcttgtggcggaaaacttgaacgagcaaggatttgtgcaaggtgaaacagcaacgtagtgtatgtttaaaacaggcagcagagcagccgagtaaagccatcagcgcctttggaacagtaagtagactgcagaatcccaaattgaaaaaatgttgtagccaatccatttatattgtggctaattttggggacattttttctgcaaacatgtagctgaactggatggcctgtccaaccgattggcagcatgaaatgaatgaaacattttcgtatttgtgcccttttccctgatactccttcagtgtttttgtgatccaagcagatattgtgatttgcgaggtagatctatctctgttaatcgtaaggtacggagaattaactcgaaatcctaggcctaacccctagatagctgctgattaagggcttggttgacagctacagatcctatctccaaatccttcatgatcccaaagactaaacaaaaacgtttggctggataccaagctccaaaactccatgcatgcttaaacaagtatgaaaacacttcatttatgaacatgaaaacacttctggtgatgctcgttacccaattttgctgttcaaatttaaattttatttgagatttgctcccccctttccgataggatgactttgaaatcgtataggtaggagaacgctatttgagaaaaccgtatttttacaagcgttgagaaaataataattttatgaaatacaagaaatttcatctacacaactacacaagaaactccaggatgtttttttttcttttcgctgttgaataattgattgtataggaaacacatataacaatgatataaataacagctgtacaatggaaatgcaagtgtgtgtgtacacaacttggcggatgaaacctacttcaattcttccccattttgaaacatacattaattctcctttatattgccaccaaaaattttacaaaacctatccctaataataaccaagccatcacactaagtagatcaactgttagggctcaagattaaccagaagatgatgatgattttgccagtaattaccactccctccgtcccataaaaaaccaacactcgatgcgacacatcctagtactacgaatctagacatatttctatccagattcgttgtactataatgtgtcacatacagagctagattcactttttggacggagggagtagaccatatccatggcgtcgtcgcgtacagcgtgtacttctcccaagagcgagaggaggaagaagaaggagagatggtcagctaggacaccgaatgcctcgtgttccgcgacggcgtcgacctcgtctcctcgccggggctctccgacgtgtcggagctgctgttctcgccgctgctcgccttgccagaccacagcttgctcagtatcttcttcggcatcagcccgccgccgccgctccccttcgctgacgccgacgacggcggcggcttcttgcaggcggcctgatcgccgccgccgccggagacgccgccgttcttgttgttggcgaggctcatcgaccggaaggaggtgacgtcgacggacgtcgtcgtcggcggcggcgcccactggtcgtcctcggtcgccgtcgacctcgagctgccgtacgagttgccgtcctgctccctggggaggagggagcgcgctgccggcggcatgtcggcggccgccgccgccgacgccgacgacgccgcccggacctgctcgaagaagaggacctgcacgacgacgcggagcgggaggcgctcgttctgcacggcgtgcatgctcgcctccggcgacagcttcttgcagtccatcagcccgcacagcctcttcttctcccccttcgttaaacccggatgctcctgcaaaaatgtcacaagctgacaattagctcaaaagttttagactgtttgaccaaatctcgtgctaaatgttactccccccgtcccaaaatatgagggtttttaggtga

SEQ ID NO: 7708 - DNA, 12493 bp, Oryza sativa
gcccccgtcatccccgatggtgataactttggaacaatttcattcaccatggtggatagatattaaccatccccgtcacctaataggtgaattcaccgcgggtgaaacggtgaacgggccccattgccatctctgagtgagaagcgggggtgtcagcaacgcggattgcgggcaaggttgtcagtatcctgattcgtatcctagtatcttacgataatacgatcctaccaagccgaaatgataccgatcccacttagtatcctaattttcatagtatctcgatcctactattcattactacaccatcctataaaatcgaaatcttaagtgatatcccgattctacgatccctatgatactacaaaatattatttaaaataacatggtttgaaaataatgtaaataaatatgctcaaatttatatgaaaatcagttaaatatatcaaaaccaacatagtttctcttgataaatgtctctatttgcatgacatatatcattactatatttttttatatagaatggctatatataattaatataaatattaattaaacttaaaaaaagaaaatctcatagtatcccgatactacgatacgatcctacgatacgatattactttgagcaaaacgatactacctagtatcccgatcctaataaccttgattgcaggtacatgtacaacctcagttccaaaaatatagctattttttacacggtatcttgttctaaataaaagttatttctccaccgaccttcttctgtcaaccaattacaactattatattttatcaattttatattctcaaccaatcacatattttttttaattattcttatctactttcttaatacttatatcaaccttaaaaattacttacactttggtacggaggaagcaagggctagctctctggcgtcgtgacatcgccttcagcttcgtgccctgcgtcgcgttgaccatgcagtggacgaagtgatcaagaactagccagccgggcgggcgggcggcacatcatccggcccggcgccggcggtctctggccatccatgtcgccacctgagtagcaccacaaagttctctaagttcaaatttttataggagcgaatttcggatcagttatttaagggcttagactgtgttcgtttcattagaatgggaattaattccttcctcacagaaaatagagcggtccattagcacgtgattaattaagtattagctttttttaaaaaaaatggatcaatataattttttaaacaactttcgtatagaatttttttttcagaaaacgcaccgtttaacagtttaaaaagcgtgcgcgtgaaaaatgagaggggaagttaggaaccctggaaacgaacgtagccttagttctctgtttaataggcaaaatttatagttggatgtagaggtcgggtttttttaaaaaaaattgtcgccactaggtcaattttcccattttattttcctattcgcctcttctggtcacacaaagaccccaccccaccacacgcaaagaaaaggcaaccattgttccacgttaatgagttattgttgggtctaattttttgggcctctttgcatgcgcgtcctttggatacaaaactggaaatagttcagtttacacaccccttataactatgaattgagtagagttccatccaccactactagaaaaatcacttttgcatgcggccaaaagcaatttttacgggcggagggaaggaccgcctgcagaccaacgacggtgaaaatcatccagcccgcttgtaaaaatccaataaaaaacaaaaaaatcgcctcactaccgccggcgctgccctctggccatctctgggagaccgcctctcccaggccgggcccgcttaaatctggtagctttcataggtcatagactgccctcccacctctcccaggccgggcccgcttaaatctggtagctttcataggtcatagactgccctcacataccaacaaaagtcttttctacacactttgttgtcctcactcgtgcgcaccgaggccgggctcgcttacatctggtagctttcataggtcatagactgccctcacacactttgttgtcctcactcgtgcgcaccgaggccgggctcgcttacatctggtagctttcataggtcatagactgccctcacagaccaacacaagtcttttctgcacactttgtcctcactcgtgcgcatcgaggccgggcccgcttatatctggtagctttcataggtcatagacttttctacacactttgtcctcactcgtgcgcaccctgacattctttccggtcagtcacccatcccaaattgcttcaggccaagcacgcttaaccctggagttctttagagattggtttccggaaaagaagttgtaacttgtggcttaataggattaatagaacgtgaagggcccatggctcgtccgtactgtcgccttctaaagccacgaaagacaaaatcaccaccccaactgctaagggactaaattttgatagtaagggatactctatactcggttggttttgcaatcgagggatgagtacagtggacttttatggcctacattaattaaagagtccatttttctttggaattagtctattttgtccctcttatctcttgtctttggacaatttgtatccctcagctataaaaccgggtataacatctcctccaactttaaaaactattacaaattaactctttatgtggtatggaaagcgctttctactgacgtgacaagtcgatttggtccaagtgtcgtgacgtccctacgaagaggttagaagcgttttcaagatgattctttctttgtcgagacgaaaaagtcttttcagttgaaaaatgtgagtatgttttgcccactttatcccccatccccctatatcaaaatgatgaaaaaaggaatttaaaatgatcttatccatcattgccctgcttccaaattggcagagacccctgtggagaatgaagaggagtcaaggatcttactctcaagagtactttgataggctccactctcaaagaataagttaggcctgtgctcacaagaaatctcggagccacccattaatcgtaatgaactctatgcaaagttttcctctgtgatatgagttaccacccccttggtcacttatagtaccctaaacatccaactgcattttccaactaaaatggaaaatgactaccgaaatgaaattgtacatctagaatagacctaagaaaacatgatcccaggcggatacttaacatgttccccctcgcccaggcccatcgcaagggaaccgaaaccaagatttgctttatcgggtatcaaacgggccggaactgtgagcaaatataatacctttaaaaagtattactacaaccacatagattgtaaatgtataaatgcgatgtactactttctttcctcttcctactacatgcacggctataatcgttatatattctcttcttttctttactcttcgttttgcatctcttttcttctattgtgagggtagcctagtcatcaaaggaattgaaaatataagtgtgtcccacatgtaagtgacaaattaaaaaaaattaaaaaaaggtgaggtccacatgttagtgacaattctccttctcttcttcgtccattctattttttctctcccagccaccaccgccgtgcatgggcggagggcgggggtctcgtgtcatggcgatgaaatccacggcggagccgtgctgaagagaggaccaatgtggtggagaggcagtggtggtggcggtggccggataagaggagaggaggcaaagaggtcctcaacggcgcaacagcaaatgcttgctgatcgacgacgctggggcctgggggagaagcgagaggggttaggcggagaggtcaaggtgggaccgtggggtaggtgtacaaatgaagagtacaaaattaagactacaaacgaattagaaaattatagaaaaaaagtgtaagggctgatcacaaaacccatattgaaagctatatacatgcacagtaaagagttgcatcatactacattcgtcctaaaatataaaaatctatgatattttctataactacgaatctgtataggttatctgtccagatccataaatctatgatattttctataattacgaatctagataaattatatgtctagattcgtagtataagaaaatctcccatccgatttagattattatatttcggaacagatggagtatatgcgtagctagctctatcctactccatcggtcccaaaatataagcactttcaaaatagtgtcgaatcaaacatttttttactttggctattaatagcaaataaaaaagaaaaacatcaatcatgtaaaattgatgttattagatttatcattcaacaaactatcataatatgtaatgtaactcttttcatttaaaatatcttacttttatagatactgtaagtcaaaatagcatctcgaaaactgtgcggccttgtttagttcgggaaaatttttgggtttggttatcacatcgaatatacggacacacatttgaagtattaaacgtactctaataacaaaacaaattatagacccaccaaggaactacgagttaaaatattaagcctaattaatctgtcgttaacaaatgtttattgtaataccacattgttaaaacatggcgcgattaggcttaaagattcgtctcgcaatttacacataatctgtgtaattggtttttttctacatttaatattttattcatgtatccaaatattcgatatgatagtgtgaaaaattttattttaaaagctaaactgggcctatattgaaattcaaaaatgtttatacgttcggacgaagggtgtatatgtcatagtagtaactttttcacaagatgacactgtgtgtttggcctcatcttttactccagtacccgtagttctgtacagtaataaagaactactgtagtagtatcacccagcactcaacacagtgcattcattttcttctgggtggagtttgagcctgctgacatggtatactacgtactccctccgtgaaaaaaaagttaaactctgagttttaatgtctatctttgactatccgttttatatgatttttttatataatttatatttttattattgttagatgataaaacatgattaatattttatacgtgacttgtctttttaatttttttcataatttttttaaataaaacggacggtcaaacattggacacggaaaccagggtttgtttttttgaatggagggagtataggagtagactgtagctgcgtcgtcaagacccaagagcacagttgcacatgactctgtgagattcttccagggatgagataaccccttttcctcggtttttgaacatcacaaaacgacaagattccttggtcgctgcaagagagtacgtagtggaattcgtgatagtgctgttcagtggttaaaccctaaagcaaggcccatagtgtctgttttcgataagcttttctagatgataatggaaaattccataagtaaatcgtctttgaatactgtatgattcaacttgttttttttttttgattttcagtatctgtttggatgtgacaacttacactaggattttgattttcaggctaaacttttttttcttaaggacttttgacattaattattccatctgaaattcatgggttcaagttcaatgtactaacttggaagatctaagatagtgttccaaacgatgtaggttattagcttatgatcaattaagtactggagtaactactataaactttaaatatatttacttgaaaaatgcatgaaagaatcgagaggcagtccgacggtccgaccctaggaacaccttgcaaaacccttcgtccctttctagcttcttgtgcttacaggaaggaagcgaagaaggtatcaggagaagattaggagaaatgagataattaaatttaagaatcctcctgatctgattttacgtgatggtcttttaacgtgttttagttttgagtacggctttccaaattttttttcccaaaaacgtaacatcgaatctttggacatatacatggataaaagaaaaaactaattgcacagtttgcatggaaatcaggagaagattaggagaaatgagataattaaatttaagaatcctcctgatctgattttacgtgatggtcttttaacgtgttttagttttgagcacggctttctaattttttttcccaaaaacgtaacatcgaatctttggacatatacatggataaaaggaaaaactaattgcacagtttgcatgaaaatcgcgagacgaatcttttgagcctaattaatccatgattagccataagagctacagtaacccacatgtactaatgataaattaattaagcttaataaattcgtatcgtggtttctaagtgggttatgaaattagttttttcattcgtgtccaaaaaccccttccgatatctggtcaaacatccaatgtgacatccaaaaattttcttttcgcgagctaaacagggcctacgttgcaatatcaactatggctgtgtttagtagtttaggtgtaaaaatttttgcgtatacggacacacatttgaagtattaaacgtagtctaataacaaaacaaattacagatttcgcatataaactgtgagacgaatctattaacctaattaatccgtcattagcaaatgtttactgtagcactacattgttaaatcatagcgtaattaggctcaaaagattcatcttgcaatttacatgaaaactgtgcaattattttttttccgtccacatttaatgctccatgtatgtgtctaaacatttgatgtgacggatttgttgaaagtttaaagggaactaaacacagccttaggccctgtttagtttccaaaaacatcacatcgaatttttgaacgcatacatagagtattaaatatagataaattaaaaaaataattgtacacttaggagggaaatcgcgagacgaatcttttgagtctaattagttcatgattagccataagtgttatagtaacccacatttgctaatgacagattaattaggctcaaaagattcatctcgcgatttccagacgagttataaaattagttttttcattcgtgtccgaaaaactattctgatatccggtcaaacgttcgatgtgacacccaaataatttcttttcacgaactaaacaggccattacaattgaatttcacattttgttagcctaccggcctatagatgagtgctccctccctccggcctataaatgaggagatgtaacccttcttaaaacaaacaatatggacttacaggagagtcatatccctttccctcctgggttgagtttttttatggaggaaagttataattaatatatgatcgtttgtcttatttaaaattattttataattaatatttttattactattaaatgattaaacataattagtagttatatgtgttattaattttttaaaataatttttatataagatgaacgatcaaaacattggatttatgttttctttagttagggaaaagagaaaggtctctttttgctcagcaaagtgatgatgagctgatgccaactgacctgaggccatttacaatgcggtgaggtggcgttcagcctcactgcgccagcgcatagattccttgccacgttagcttctggcacacttttctcaagtccgcgcgtccaactttggtcacgtgttcctcggccaaatccagggcgagcggcgtgaggaacgggcacttgcgcgcattgtggaggtcgtgacctcgtttcgtcgttctcccgcgctcgcgtcgtcgtcgagttcatcctgccccgcgtcgtcgtcgagttcatcctgccccgcgtcgtcgttgagttcatcccacaggagagaagggaatccggcctctgcagattcaatcaccaaatactccttcagtttcgtcatcaccaagacgaacagaagaagagagaagcgagcagaagaaggaaaaaaaaggagcaaacatatatgcgagaaacagaatatttgagaaagaagagaagaataccttcgttggaggccatggacgacactaactaaacgggaggagcaattgctgccgatgctttcttgcattgaagtcgaccaaccgttgaagcagagaagaagcaaaccaaaccaactcccggcgccgcctctctgcccgggctggatctagccgcctgccgccgccgtctcgtcagcaagcgctgcccggaaggagagagagagagagacgcgcccgtgccatggggaggccgaagggcggcgccgcggcgtcctcctcgtcgaagaagcccaaggcgaagccgaagcagcgcggcggcgccgccgccgcttcgggggaggagagggtggctgcctcggcaccgtcgccacccgcgccgccgtctccgccgcgtcgccgctggcgcgctccgctgagcccgcctcggggtcgtccgccgctagcgcccttcgccgagatcgcctcagggtcgtccgcctccggctcccgcgccgtgtcgccgccggcgggccgccagatccggagggggagaggggcgacggcggtgtgtgggaggcgccggcggcgcactagacggagcagttttgtggcctggttggggaaggcagggagagagaggagaggaggtaaaaagtgaggagagagaagggtgggacccactgtgaaggaaaaagaagaccacatgcactgtggaggttgtcgcttgtaaagttcttagtaggtggcagtgttgcccctcaaaaattggtgacgcactgtaagtgccctcacgagtagtagacgcgtgggtgttgtactagctgtaggctatagctactactactagccccatgggagtaggagtaggaataggagtagcagcagtaaatactcgcaccagtcactttttcatctcgcttttactgttgcatcacttttaccacgtcctgacccttttgcaacatagtacccctgattgggattttcacctttttcatccttttagaaaacttattatacaaatagacccttaaaaaacttagggcccctttaatttggagaaaaaacataggaattttgaaaattttcaatcctatagaaaaattcctatgagtgcatttgaatcaaaagattgaattttatccgattctttgaaactcctattgtatggacaattctacagagattttggagaaaacttagcaagagttcaaagctcttagaaattttcctttgagtatatctctctattttgtttcatattttttcctactgttcaatcaaacagtcatttctatgtttttcatgtgttttacaattctctattttacacttcaattcctattagaatcttgtgttttttctattcctttattttttcattcccgcgattcaaatgggcccttattctaataatggatccttttcgcagggccaatgttattggcgccgtggttcaacatgatatcgtcaataacgttagcgtcatctccttcgcccatcgtggaagacaagtaactaatgtgaagagggactatttatagaataactttagtcactaatgcaaaaactaacggtgtgtttagttcgtgaaaagaaaattttttggtgtcacatcggacatttgaccagatgtcggaagaggttttagggcacgaatgaaaaaactaatttcataacttgcctggaaaccgcgagatgaatttattaagactaattaatctgtcattagcacatgtgattactgtagcacttatggctaatcatggactaattaggctcaaaagattcgtctctcgatttccatgcaaactgtgcaattattttttatttatatttaatgctctatgcatgagtccaaagattcgatgtgacgtttttgggcaaaatttttttgaactagacaagacctaagtcatgttagaccacatcgtcaataacgttagcgaagcgaaaaagataacactcctaaaataagttttttagggtctatttatagaataatatttttcaaaaggatccaactgtgaaaaattccagctactcctgcagctgcagtgcagaaccaatgaatgggagttgggagagggtcacaggggggaggcaggcgctcacatacataaagatgagtagaatccttttgaaaacctcagcttctttctcctcgctgtggctcacggagcagcggaggtccggagcaagcgaggctcgtactggtaggagtaatctaccataatgtcttctagtctagtagtagttctacttaactacacacatatcactctctgatcacaatataatgtgttgatccacacgcaccgatcgacacaaactgatctaatactagtatagtgtttttgtttgttgttttgttcagagaccaacaacacaagttgtcgatcgtcgccaggagcaagcaggcggtggatcgagagaggcaggcaggcagcagcagcgaatcggatcggagaggacgttcgatcgccatggcagcacacacagtgagtttgcatacataggatgtatagtgttgtagtatttcttagctagctaactccagatgtgatgttggatttctctctccatcggaaactcacttgctagctagagtagcattttaattgttttctctgtctttcctatgtgtgatgcaatactattcattcattcattcgttcatgctctctagtacgaaatcatacagtatgtatgtatgtatgatcgatcttgggcttttctttctttcgttcgttctttctttctgtgactgggttttgtgattttcatttcattattactagcaagtagagagtcgtgcattcgcaccactatattctctcacatgttaaatgttaagttcttaatgaacaaagtttataggaagtgcagttacagtttttttctgtaataaacaatattttcgtgaaaaaataattaacatgcctagcgtgtaaaatttatcgtaaatatttatattagcatatgttctcaactctatatatattattagcatgtattatattttaattattaattagtccaagtaatttttaacatttattttaaagctttaatttctgaacatttgaagaaccttgttctgtaccgttgaaaccacgcttcaaaaagcattagtttcttttaatattttttcgatcttaactctagattttgtttatgtattcccttttctaatcggaggtacacatcgtgtttttattactccatgttttcttccaatccttccattggaagtgtcatgaatcttctcctgccctctacatttctaactgtcctttccaaatccatttagagtgattttagttttcctttcatcacagattattttccagcactttctttttacaaccattaccaacatagatatattatcataaattatttttgttttcttagttcatttttctatggtttaccagtattagctcaaacgattaataatatatcctgattagtgggtttattttgcaatatacacttgttaactttgaggaaaaaaaaagtgatggatatttctataaaatagatagtttcatgtgtgagtaatagaatagatagttccacatgtgagtaacataatagtagaaaccatatgtcctaaaataactgtatcttagaatgtcgatttctattcgtcattttgcattaaaattgcacggaaaaaactttggactacctttttaatttatgcaaatattcccaacgatcctagcacttttctgtaactaatcatttctataaatctagttttcctgtttatcgttttcatttagttatatgtattgcttacttttttttattatacacatattgtactgtatttatccaaaaaagaatcagtgattgtaatgtaatccttgctacgatttgtttttgcatttaaacatatgatattatcatcatgatgttactttgttcgattttcatctaacatttagccgattcttttcattatgaaaggttcaaactcatatttttttccatcttctctatcttgcctttttaattacttcattttctttctttttctatattaaaatgcatgacaaattctctttggaagtctctagaatctagctataatgtttaaagtttggaagcctatggaatatagatagaatgtttaaagcttgtttttcttggaattttttttatcatatgttctcctaatttatcttaaattttagccatgccaagtggcccaatcatcttgcatcttccatgccagctttagaaggatagacgtggctcaattgaaaagcgaataaacattctacgttcattatatatgtatatatatatatatatatatatatatatatatatatatatatatatatatatatatatatatatatatatatatatatatatatatatatatatatatatatatatatatatatatatatatatatatatatatatatatatatataca

SEQ ID NO: 7709 - DNA, 1079 bp, Oryza sativa
agaatagaagagaagtacatcatgaaaatgagcccatttaagggtctcttctctcggttacacaatagtttgtttcgccatccaaattcacgggatctccgatcacaatggacaggtttccactattgtgcaactctaagtgggtctcaagcccatttccctcgatgcattgtctatcacattacgtggtagccccttggtaaactgatctgccagatttttagctgtctggacatagtccagtgctatcactctggagtttttctgctttctgacagatttcagtcttctctttacatgcctagatgacttcatgttgtctttcgaactgttcaccttaataatcactatttgattatcacagttcattaggatagctggcactggtttttcaaccaccggcaaatccatcaggagttcacgaagccactcggcctcaactgtggcagtatctagtgctgtgagttctgcttccattgttgacctcgttaagatggtctgcttgcaagacttccaggaaacagcgccacctccaagtgtgaacacatatctacttgtggcctttatctcatcagcatcagatatccagtttgagtcactatacccttccagtacttttgggtaaccagtatagtgaatttcatagctcattgtaccctttagatagcgcatgaccctttccagagcttgccaatgatcatctcccggatttgaaacaaaccggctcagcttgctcacagcaaatgagatgtcaggcctcgttgcactagccaagtacatcaatgaaccaatgatttgggagtatctcaattgatcccttgctattcttcggtttttccttaatagcacactggagtcataaggagttggagctggcttgcagtcactataaccaaagcgactcaaaaccttgtccacatagtgagattgcacaagtgtaatcccaccctcatctcctctcagtagcttaatgttaagaacaacatcagccactcccaaatccttcatttcaaagcttttggacaaaaagtccttaacctcctcaatcacattgaggctggttccaaaaatcaatatgt

SEQ ID NO: 7710 - DNA, 20189 bp, Oryza sativa
aatggtcaaacacatgctaaaaagtcaacagtgtcaaatattttgaaacggagggagtattacctattttcctgaactatggttgtgccacattatccaattgatccacaatcattggatgaaatctgaatggtttgccacttcacctaccataccaacaccaaagtaatcgaaccgatcggtacaacgatgagcgatcctggtggaatagcaagcccacatgtaagagaacccctaatgtgcgatcgatcgatggcatctccccgcgcgcgatcagatacgataaaacatactccctccgttttacaatgtaagactttctatattgtccacatatatatatatatatatgctaatgaatctaaacacatacctatgtctagatttattaacatataaatgaagagagaatccacttagtgccactgagttttgtccgcttctacaatatacccctgactttgtcaagttgaacaacatgccatcaggttttctttaactttcactgcgtgccatcgccatccacgagccgttagttggcctccgttgaccgtattgaattgtctctaaataactaaaataccctttgactaaaatatcattgtacttgttgaccgaaaaccgtaacacaccatccacccccaaatcgatctgttgatgtttctcctccagtgagcggcgccgactccccatcgatggaacgccagctgcctgactcctcgacgcgccgccggccggccggctccccgatgacgcgcggttggccgccttgctccccgacgacgcgaggccggccgcctggctcccccacgacgcgcggcccggagctcggctccccctcgacgcgcggcggctcgccggcctccccatcgacgcgtggctggtcgccggggtcccatcgacgcgccgccagccgcccggcaagcagcgtctccatctcaatggactaccaccgaatccacccggtgggcgtcggcgcaggagccgcgggcggcggtgctgtcggtgcgtgtgctggacgctgctcgccgtgctcgtcctcgccgtcgccgtcgccggcgagacgcagctggacagcgccgtggtggcgcagctgctgcagcagcaataggccgggttcgtgccgctcacggtgtgggcgcgcgtgccgatccgcatcaagttcggcgccatcaagctgtggaagatgaccgggaaggcgacctgcaacctcgtcgtcgacaacctcgtcgccggcaggcggatccgaatccgctccaacaactacagcttcaagctcaaggtctgatcgagctttgtagaggcgttgatccatctccatctctgtgaatccatccgttgagttgagattagcaggtggtagaggcgtgtatttacatttttaccgatactagtttctgcgaatccattcgtttttggaagcactgctactcagattagttttaatatatgagcaccgatgtatatatgaaaatgcatacgcgatgaatttctttgaaaattggaataaagatggctaacatatataataagttagaggcaaataggtctttttacatcgctaacagatgctaactgttctgtgatggcacgtagtgaaggttaaagaaaacataatggcatattgttcaacttgacaaagtcatgggtatattgtagaagtaggcaaaactcaatggcactgagtggattctcttataaataaatatgaacaatgttagaaagtgttatattgtgaaatggaggaagtttgtggtaaggcttctacgtgcgggagtccacgatgaattcaaaaatccatccaaaactagttccttgaaaaggctcattaactacatgccctccctctcctttcgacctatgtgtgaatagataaaaagcccatatttttttgctttgagctggcaaaaaaataatataaaaaaatatagtaggtagcaattttatacatagaaactttatacctagaaagtttatatatagaaactttcaacatatgacaaattggtatataagctttgtacataaaataattggtatagaaactttatacatataaatatttagcatatgaactttgtatgtaatgtaaaatatccggtataaaaacttttacacaaaaagtttcgaattaaaataaaacagaaaaacataatcacaaacacttgattgggcaaatgtgttcagcccaacatgtgcaagaaaaatgaaataggccaagtaaaaaaaatccatgcgtttagcccataaaacgaaaagaaaaatgacggcccaacacaagtatcatctgggccaaaaaaagcaaacggacgtacattaacttttggaaaaagtataatttgactccctcaactatcgtccgagtattcatatcctccaaccacaaaaccgggtatatcgactcctccaactatcaaaaccggtgtaaacaatatccctggttttggctgatatggcgcctacgtgacggttttgaccgagtcttttcctacgtagcacttacgtggcattagaataaaaacaaaaattaaaaaatatgtgggacccatatgtcatacaaaaaatatatatattgtaggacccacgtatcatcctccctctccttcccttcttcctccccctctctctcctttatctctctctctccccccggcttttctcttcaccggaggagcggcggcctccaccggcgggatgcgtataggtacggcggcttctaccaccgtggggagggattccatggcaacgagaagcagctggtggccgagatgcccgtcgagccggcaacggcgactaccgtggtgcttcccgtcgcggagccagatccggactcgagccacgatgccgccgtcgcggccgccgaggagccggtccatggcgaggccgatgaggaagacgaggatgagatggcgagtagccggacttcaccggagggatgtttgcgcagaccgttcacatgccgtccgatgtccgtctcctgcaaaagcacaaagcaggaacttcaacttcatctcctctccttttgttgcaaggggaacagaacagcagtgacggtgaaagaagaatgggggtaaaaagcttttgttttcacctggagcgccttgtacgggatgtccatgtctgccaggctctgcagcaagctcagcagctcgtcctccggctgtgaggaaacaaaacgaaaaaacgtgcagctcgtgtcaaatttcaatggtttctttgatcgaattcgtcggcgaggtggtgaaagaaaattaaaaaaaaaaacctcagttgttgtagccgccgccgggcgtagagccgctccacgataccgtcgcgccgcgcgcgcagctcgtcggggcggtcgtgcgcggcacaggccagcgcggcatccacgagctcccacacgccgccgcctcctcctccaaattccgccagcgcgcggcgcagccactcgtcgtcccgatccatctcccccctcgcggcggcgccggcgagacccgacccgtccgcgccggagtatatgtcggatctttccaactcagcgccacacctcacaaaccccatcaaccaaccaagaatccgacaccaatcaagaacccaacctccccatcaccactgccgccgctcccgaccgccgccgccgccgctctggtgaagagagaggtcggggagagagagaggtaagggagagagtgggggaggaagaagggaaggagagggaggatgacatgtgggtcccacaaaccatttttgtgtgtgaatgatatatgggtcccacatatttttttaattttatttttattctaatgccacgtaagcgttaagtaggacgaagactcggtcaaaaccgctacgtaggcgccacgtcaactaaaaccatctccaaaaccatctaggaacattgtttgcatcggtttagatagttggaggagtcaaaggtatatttttttttccttaactttttcgcacagcaaaggctcctatagtagaatagccaatcttgtccacctcctgatcttttttgtcctcaaggcacccgtccattcctcctctctcgcggaagcgcatcgccccacgagggagaaggcacgctccctgcgtccatattcagagagcttctgcaggccaggcatcttctcagtcaatatctctttgccataaccaccatctccgatctcctactctcttttcaatcgtttgatgttgcatctgttcgagagctccagctgcttcgtcctggattgctgctgtacaattgcaagtgcaacatgtactagctccatgaatcggctccacaactccacaagattctctcgcctctcacaacatgtttctactgtatttattgtttcacattcacaatcactgatcttttgatacaatgatattaggcagctcgctaggattaattaacatttcttctttccctttttttttcccagcagatgggccatattgcttagattttattttccctgacctcaatgctccagccagcttctactcgacgcctctctttgatgtagtttattagtatctcccctgttttttctatcttcaaatttaatttgtctctcccctatcagaactcaggtgtcctttccctaataagaggtggtttctggaattatgggggttgcagtcctttttttaaattttcctcaccattgtcatcaggtgattccaatgtactaaccaaataatttaattgcatgaactgatttgatcaagcacaaaccaacagtgcgcctgatgtccatctgtagtagtgttaaggtatttgatcctcctctagatattagatttccactagcaaaatgctttgctatgggtaaaatatacatactttgctttgaccattcttatttgaatatatgttatttacatgattgaaacaaatattaaagtattgcacaatatcatagactaatttgtaatatgtacaaaagtagtggtggggtcccccaccaccactattatcttttatagcggtatagattatctcaggctgataagtttgtcaatatttgttctcataatctcattggcttctatttgtgtcattgatgggttttcacctttcttgcttgacccatccatcaaatatcactttttctttcgtttacaaaaagtataaaaatgtttaagctctactgggaaaaaaattcagctatcattttagccaataaattgtgcagtatactgctgcacacgacgtaaaattgaccctttcaaatgtcatctcatatatttttactttttttttgttcagaactgaattatatgtactttttatattatatttcaatacagtatatatgttgactaaactgttactttcacacattggttgtcactgttctattcttttcctacatttttgggcaattctgatgtggtaagcttgctgcaacatgcatactgttgctcaatcaatagtgtttgttacttagaatgacagttgtcaacttttcattggatataaggcgctatgacttaatcaggtggtccattcaaacatgattttagtatataaaagagaatgtgactcccatgagcccttactaaaaatgtgaatctctcgattatttctcaacttgggtaattgtcttcttggcctaactttcctaaagtagtacttttttccctaacgagactactataatcgctcttccggcctcatcttttcgtttatacttatacttattagccaaaatttaaatttttaatataaaatttggagttgattttgtgattttttttcatcgaagtttatttttcagcctttgttttcagatcgctaagaacacgtatataaaaattttattcataaattatttttaatttgcaaatatgttgtttcgtttattccccaaataagcgaaccgatgggtccgttcattaataagcttgtacaggtacaactatttacttagcaaacatttattctatatttctaaaatttgaatttcaagacccctctaaacattgccatcactaaacaatccaaatcacattttggatttactattttctttcagaaaactacaccgaaacatcatatattcagaagcaatcagacaccacagtcttgacaaactctcgaggccggcagacagccgccaatggcgtcgccattggcatcgtcaacccgccgccttcggccatgtcgacggcgccgccttcgccgatctcccaatcgaagcactgcacgagcgccgccaccgtcaggccgacgaggcgcacggcgagcccctcgccggggcaccgccgccggccgagcccgaacggcagcatgggcgcggtgaccgcggtcaccgcgccggcgccggcgccgtcgtccatgaaccgctccggcctgaactcctccggcgagccccagacatcgccgtcgcggtggatcgcccacgcgttcacgaggatcatcgtgccacgccggacatggtagccacccaccttgcaatcctccatggcctcgtgcgccgggatcaccgggccgacggggcggagccggagggtctccttgacgacgcactggaggtaggggaggctcgccatgtcggcctcctccaccagccgcgccgcgccgacgttggcgtctatctcggccctgaccttcgtcatcgcctccgggtgcgccaccagctgcgccatcgcccactccgttgtcagcgccgacgtgtcggtgccggcggtgagcagcaccaggacgatgcccttgacgacattgtcggtgtagtggtcggggtcggtttcttgcagcgtgaggagggcgtcgatgatgccgttcttcttctgatccttgtcggcggcggcggcggcggcgcggcgtgttcggcggtggtcgtcgacgaggccggcgacgaacgcgtcgcgccttttctgaaggctttgtagggtggccacgacgccgcggagacggtcgacccaccggagcgccgggaagaagtcgccgacggtcggcgagccgctcgccgcgaacgtctcctcgacgatctcctggaacctgcgcgtctcgtcgccggcgtggcggcgcgcggtcaccgcgcgcagcatcacgttgagcaccagctcgaacagcctgggccggagcgtcaccgtgccgccgccgccgccgccggcggcggcgtcgcggaggacggcgtcgacgagggacgcgacctcggcccggcggtcggcggcgagcgcggcgaggcgcgcgttcgagaagagctcgacgccgaggaggcggcggagcgcgcgccagtggtcgccgtgggaggcccacacgacggtggtgtggccgtacccgaggacgtccccggcgagcagccgcggcctccccgccaccgcggcgtcgcacgccgtgaagcactcctccgccgcggcgtgcgtcgacacgagcagcgcccgccgcgcgcccagccgcagcgacaccaccggcgccgcccccacccgcgcggcgacctccgccagcgagcggtgcagcggcttcttgatcaggtgcaggtggccgagcaccggcatcgccggcgggctcggcgccgcacctccatcacccaacctcgtcatcacaacaacggcgaccatcaagaacagaacgccgacgacgacaaccaggctagcgtcgccgccggtcaccgctgtcgtggcaacctcgagaccagccatcatcgtcgacggatccgggaacggcaagaacactctcaggaagcgattcctcgaggaagaagaagacaagaagaggaagagcccatcactccaattgatgaatggcccatgccggctgctggccgccatggctgaggtcactgtcagctcagctaagcgtcgccatcgaagctgctattccgtcaatcgaatggaggagattgacatttggcgcattctagacaacttcccttttttagaataatggatttaaataaaacctagccacttctagacaacttctaattttgtaccgaaactgtggctggcacgtcgctgctcactgacatatgggtccgaggggctgtagggtccacacgtcagtgagtaatgctgcagatgacatgcatcctcgctatctatggtgtcctattttattcagcttaaccgtgtaactacttactaagcagacatgtttttttcatactgtttaaacggtgtatttttaaaatattatatataaaaataatacttagttaaatcaaataagtcaatttctcaaatttataatgattaatacttaattatattgtacgctattgacacgtcttgtttggcttgcaatgaaaaaactcaagccaacaccatatttaaacgcaacatagaagacatcctcggaacgtagagttgaatgaaatttggaaaaaattcaaggaaaatgtactagttagccaattactgcaaaaattacttttttattcaaaggaccattggtgattatgttaatctcaaaatatattggcccagttttctagaggtgtttatagggatagtgtgtgcgtgtgtgctcatagaagcgggtgtgtacgtgttgttaatgtctacgtttgtattgtgtttctaaaaaactgacaaaatatccaccttaaaacgacggatcatactttagaggagctcttggtgaggttaaattaatcaacgtgtgcgtcaatggaaaaaaaatcaagattagagctatggatggacatatgatcaagctacggatgaactcaaactcaagttgaacatttacaattaatgtatataaatggacatatgactaattatacctactgtagaatgggggacttttggtggaatttccgaggagttgaactaatttcgtttgaaaatgctgtacaagttcatgtgtttcaaaggtgctttaaagccttatccgtagttcctaaaaggttacgaaattacacaattaagatggatgtatgaccggttttaatggcgatagataattttggacggcactgcaaacttatggatatcccttgcttcaaagttttcaactacttcctcgcacagtgacttatactaaaatgaagctattttttcaccttcatcttctcttagccaagcataaccattctcttcaccttgtttctcatctccactaatcataatcttttttcaattatctctacctattttttaatacccgtgcttgtaaaaaaataattacattatgggatggaggaagtacatattaggcgtaagcaagtattttgggccttttgggccagatgagaaaaaaaatgtattttgggcctaaaaaaaagtggagtagagaccatatgcatgcctataggcctgaaaagagaggcctgattgcagttttggggccaaaatgaggaaatcttgaccccaaaatgaactgagatttcaagtgaggctttgttttcctcctaggtgaactttggctttttaattatgttttatttaccataaatcgagcatcaatttccctaaagtagtacttcctccgtttctggttataagactttctagcattacccatattcatatagatgttaatgaatctagacatatccgtttcaggttataagacttccgtcattaacatctatataaatatggacaatgctagaaagtcttataacctgaaacggacgaagtattaccataggttcaaaggtttctggattgctttgtttataattatcccagtgattttgatctcctgtcctttaatttgaagtgcatgtattgtaattaaaatggtataaattaacctatgaacacgagagctaatgaccgaatatttgactatttggttgaaatcaattacacaaaacaattatttggcgtgacagatcctataacgtatcaaagaaaaaaaaatttctagagacttttgagcacagactccatctccacacgtggtaggcacatggccatgagaggcacggccataggcatggtgagcccagaaccttcactcatatcaaccttcttctttccgacgcgctcccactgaaagcattgtatcataacccctagcgccatccctaccgtcctaagagcaaggccttcaccggggcacttccgcctccccataccgaagggcatcatccacccacttccatcgactttgaaacccttgaacctctcgggtatgaacttgtccgggtcctcccaaacacggggatcccgctgcatggagtacacgtcgaccaacaccatcgtcccgcgtgcgatgacgtgtccagcgaccatgcagtcacgtgacgcctcgtgcgggacaaggtgcggggctagagggtacagccggagcgtctccgtgatgatgcaccggaggtaggggaggttagcgaggtcgggttcctggaggaggcgggacatgccaacaacagagttaatctcatccgttgctttcctgagcacatctggattgttaaggaggagagccatcgcccactcgatcgtgcttgctgatgtgtcagttccggcttgtagtaaactctgtatagttacacacatgttgaaaaagattaaatttgaatatagaagcaacaaatttcaatggcaacatggcttaagcctttggtagaagtgacatatatgtcaaagatcattaccaaaaccattaacttaatcaatgctgaatcattgtgactagtaaataaactaaacactcagtgtgtactacacatcagactgttgacattaacaaaatggctagtgtgatgcatcatcactgacgactaatgccatacatgatagctttctttatatttttttcttgttaaattatcattcattcaagtactataaacagtgaaaccaactcaattcattttcaaacttataaagatactactagtatcaaccgtacttaaaaaaaatcactgaattattgccacaaattaattaattagctatagttcgcagtgcagtacacatcggcctcatttcgcggtgatgagatggacgaattttttgaccgtccgattgaaaatcgacggctaggagtactctaccacgtggcgcgtgacgtcactctgacacgatgcatgcgaggtggattatactattggagtacgtaccaagcagacggtacggatgacctcgtcggcgtacgactccggcgagctctcctgctgccggagcaggtcgccgatgaccgtacgccgcggcggcgaggaggagaagtcatcggcggcgacggcgaggcgacggcggtggcggcgcctgtactcgtcgacgatgcgctggccgaagtcgtgccgctccttggcgatgccggcgagccgccggcgggctctcccgaagtccagcagccggaggaacgggaggaagtcttgccggttcgccgcccccgccgccgcgagcccggcctcggtgatggccttgaaccggagcacgtcctcctccgccatgcgctcgccggcgaccatggacatgatcacgctcgccacgaacccgtacgccgccggcttcacgccgacgacgacggccgacgccgccgacgacgacgaggaggacgagtagagcctcgccgccatggcgcgggcctcggcgtcgcgcgcggggaggtggcggcgaggcggcgggcgcagagggcgtggacggtggcgaggcggcggaggtggcgccaccgcgcgctgtgccccgccgtggcgatggtggggcagccgtcggtgagcagccgccgcgacgcgagccccgggcggcccgcgagcgcggcgtcgtgcgccgtgaagcactcgtcggcggcggcctgggaggagacgagcaccaccggcctcgcgccgaaccggagcaggaggagccccgcgccgccgccgtagcgcgccgccagcgcggcgagggagcggtgcagcggcttcttgaggaggtggaggtggccgacgacggggagggccggcgggctcgggatgcgccggccaccgtcgccattgggtggtggagcttggtaggataggagatggaagagaagccatgtgaggaggaggaggaggagaagagaggcgaagacgaaggcttgtgagatctccatggacaaggtgaatgaaactctgcatgccatggagctcagaaatcacaatggttctggtgtttatgtagcactccctccgtctcactcccaaagacacggtcgaatttgtcatagtcttcaggacaaatatttgactttaaatttatcatatattataatatttgtagcaacaaaatcataaccatatgaaagtaaatttaaatgataatccaatgatattattttcatcaaataaaatttaatttataataagctatttattagtcgaatatttaaaagagttgaattttaaaatacatgtgtgtcttagtgagtgggacggagagagtagggtattgctggtctttaatttaatgtggtgccaagagtatgtaaaagattgaaacaatttatgatttgagctatatatttattatttgaacttatgttaatttagagtgggtcatcagggtttgctttcttcactatgattggctaactctgatcatggctttatttatactccattcatcttaaaatataaatataagacgtgttttatttcgataggataagacttcggccaacgattactctattagggtataatttttatgacaaaaataaattaaatttgttagatttatatctaaaaagtcttacttacgatcatagataaccaggccagaagtacttccattatcttaaaaaggccatgaggagcttagaatagacaactcacatgcctatccatcctaaaaggatattaaaaaaaccccaaaattatgccaatagtgatacgaatacttgtatatcacaaatacatacagtttttcagaacaacaacttacttattctccatgagcatgtttcccaacctgctgaaccgtgtgtttcatgaaaaattttctatatagaattttcagtttataaaaaactttgaagttttttaaatcaaataaatccaatatttagtgtataataattaacttgattaatcatgcactgatgacttatctccctctcaataaaaaatctcagtttacacgctgaaacgagctcatgcttagctttaatttgagaagggaattttcctttaagaaaataatctgacaaaacaaattatcctaagcaagaaatggatacatatgatctctgcaatatccaggaatgtttccaatcgtgcacgtgggaaatgctggcattaggatagcataaatcacacgttttttcatcagtgaaaatcacacgtttttggagagatatcgagagccatgcatatccatcaatccatcatggaccatatacgcgttagggttcaggggcccgttgtgatgcgttcttgcaccagctgggtatgattcggatctatctgaattctgatgatgatctgtcggcgagatgacgtgtacctatgccgaagttgaacattgacatgcgtactgttgttgagtgccgactccacttaattaccactgcctttcacattgtatatttggtgttgagtgacgcttgtcttattatagtattcagaatattccaatatcctaaaatataatataatataagtatttctaattataaatttagataactgttcgtttaaattcatacttaaaaaaattatattttgggcggatgtagtacaaaatatgaaaaataactatgcatcctcgttacttttactcctcaaattttgcaaattgtctaggtagtaaagttttacgtggttactatgtgtaatcactttctacgcccacatcaacgattgagaataggtatactgacaatatatcatatagaagcaggctcaacttggtaataaaccctgagatgcgcgcttatgtggttttattgtgagcttggtccatcatggtaaaaatttgtccaaccccatgggctttcaattatagcctatagattgtagacatattgttgtcctagctggcaaaaccacttgtcaaagctttcacatacgtgacatcactggatataaccactttagcagttatatagacatgattgcaaagtttgatgtaattatttttcatttcaaataatatatatttcattgattagcaacatggaaaatgaattattgttacgaacagatcttccaagagctagacgaatattcccatatccacaaatataagagagacttaaggtttcattccgactatatttaggaggaaaaaaatataccccttaataagtaaggggaagttagagagtgtgagagttggtgagagcaacgttacgaaaaaaaattgagaaataggtgattggattggtgagacaaatagtactcttaaaatactttttatttttggacagaggaataaaggaaaaaaaaccctttgtatgtagacaggggagtggtaactattttggccactatgacgggaatcttgaaacagctataccatgttggtacagtgcccactgccaagaggactttttgtctcaaacttgactcgatccgaccgtccgattggataataatagagaaaagcgtgcctgaaagctggctgccacagactgtaatcaatctctgctcctcaaagatgaacattgcccggtgtgtttttcacgccaaaattgaaagtttggttgaaattgaaacgatgtgacggaaaagttgaaagtttatgtgtgtagaaaagttttaatgtgatggaaaagttgaaagtttgaagaaaaagtttggaactaaacaaacgcccaattgaaggagcagaacatgcatgtcaggctgtcagcacaatattgcatatatacaccttaattatagtgcagtatttagcacagtgtacatttgcatttgtttcattaattttggccttttcttgtttatctctgcttctcctgaagagaagcactttgtaaatatattgtttttttttgtcttgatgttcaatggaatactagaagctctcttgctatcagtttcgataaaagaaatattttcgttttatggaacaactagtatttttccaaaaaaaacatgtatatcggtttctttctcaattttatttcaaaagatatatgaggcatgcaatcaaattcataagtttcctcttattattcatccactattgcattatggtgccaagcttatactatctattctcacatattttactttttactgagaggactttcaagttacttaagtattcctatgcaattacaggggctgacctggactaagtaatctaagccaaaaaggcacgtggtacattttggtgttgtttggataatgagaaatggattaatttcccacctatctgtaactttttaatcctaatcattcattctttccacctcatttcatccaaacctttattcatttcctaagcccattccacatctcatatcctgttattcgaacgggcccttctgagttttcaccatactagtggcccaagctataataaacatggcccaccatggcccacggactagtttttgatcttcattggatgaacagtgatgtcatttcgaaaagttcacttcagatccctctcttgattggatctcatccctcaaccgtaaaatcgggtacatcgcatctctcattttttttttcaaaatcattgcaaatatagtctcaaggaggttttggatggtggtttgccggtttcaagtgacgtggtacctacgtggcgtgttggcttggtatttatctaacatgacacctaaaaataaataaaacataatgccacccatgtgtcaatcacaagaaaaccatctatattcaatgaaatcggcagctcgccgattcgttcaaaaaaaatcataagaaaaaaagagaaaccacaagctcacatatcagttggcattttctagccatacttcagctagtttcgcagcctcggcttctcttcctcctcctccgacatggctagctagctccaacctcgtcctcccagatggcatgcaagagtggcatttggggttgttcattttcgaaggatggcatatagtaaattctcctcgaaaccccttctcttcttaatttctcgtttcattgacatataatccccactcaaccatgtagtacaaaacaaccgtcgaacccacttgagaaaacaaaatggaccagtattgataattgaggaacattgtatacccggtttcacggttaagagacaccgattgaaactgatcctcaaatcgagggatgcaatatagaattttttccatatcatttttgcatttccttggatcctgggttctacttctacgggtcaaaaacaattgtcctgaaaacgcagcaagtttcttgtactccgtgcaacaaaaaaccacacgcatatgtctcacgttgctgatccacctaaagtctcttgccacttttaaacatcacacacttggagttgagcagttgactctctgacaggtgcgccccccgacgcaatccaagtccaaaaataatactacctccgttttttaatagatgacgccattgactttttctcacatatttgtccattcgtcttattaaaaaaattacgtaattataatttattttgttatgagttgttttatcacttatagtactttaagtgtgatttatatcttatatatttacataaaatttttgaataaggcgaatagtcaaatatgtgagaaaaagtcaacggcgttatctattaaaaaacggagggagtactaacaataacccaatggtggaatattgaatacgtactttccttttccacccacggaaatattctacgcacgaaagccgcacacgtgtttcccgcgaccgcgccacgtcaccgcaaaaacaaaaccggggggagccacgtgtgcccacttccggatagattcacgccgacccccctacgtcacccccgcgggccccaccacagccactgacacgtgggccccacgagtaaccacctgttccgctactagaagtatagtaggcttcgcggcggtggtgggtaaaagcatagtgagctctcccgtgccaccgacaggtgggccccacccgcgcggcggaaggttctaggctctccggcgaaggttctggaaggttcgggaggaggggggagatgattctgtcggcgctcgcgacttcggtggggatcaacctggggctgacggtgctcctcgcggcggcgtacacgctgctccggcggcgcccgccgtacgtcgccgtgtactcgccgcggcggccgtacgcgccgccggagccgtggctgcccgcggcgtggcgccgcaccgaggccgacgtccacgccgccgccgggctcgacggcgtcgtcttcctccgcatcttcgtcttcaggtcccgcttccccgctctcctctcctccaatctcggcatacacgctgctcgctttactatgggggatggagattgacgaggtgatgggggattttggtgttgtgcagcattagggtgttcgcggcggcggcggtggtgggggtgggagtgctgatgccggtgaacttcatgggggaccagctgcggcagattgacttctccgatctgcccaacaagtccgtcgatctcttcagcgtctccaacgtgcaggatggctccaacaagtgagctatttcgagcttcctgatgcctaatttttgttcgcggatttagggggttttagtgggttttgtgtgattgttagtgcttcaaggtggatacaattgtttaataataataaattacgtgccagttatagattaaattctcgttttcgtattaggaggatgaatctcttggattgttttaatgaggttgagtattttgtttatgctagtggctattgagatgttcagagtatgcttcactgcacagttttagcttaggattgctcagtttggtgagcactttgatggttttcttttcctggccactagtctatttataaagcatgatttgtttttctcattggttccttatttttctgaaattctaatttgtattttctttgttttgaaggggcaaagtgctaactgcatgaaaaaaaacacagagattcactaattcacctatttgatgctgtctcgagaaaatgcgttgaatctctctcataaaagaaaaatatttcttttagtagtatttagaatttgatgtcggtcatttaaaatccaacggtttcaaacatgggcctgcatgcttaggccttctccatggctccaggctgatgcgaccattttgctagagtgttaagttgatttctgtctggaatttatcttcattattgggctagcaatgcatagcatactcattaccggtggtaatgtggtgaacagattgtggctccacttttcggctgtgtacatcataactggaattacatgctacctcctttattatgtaagtaattgagtattttgcttctttttggctacctactcactgttttcaaactaattcaacattttacttccctctcttatatttgtgctagacctaataatttgatctattttcttgattggatacttcttcagtcaaactcatttgatatttcagttaccataccatgcatgcttgtcagatctggcattcatttatcaaattcttctcgttgaagttctgctttgctgctttcctgttttcacatctttatgtacacaatggtttatgttagctctttgcaggaatacaaatatatttctggcaagaggctcgaatattttatgacatcaaaaccactacctcagcatttcacagttctagttcgagctatacctgtaaccaatggtgtgtctgtgagtgatgctgttgataagttcttcaaagagtaccattcatctacctacttgtcacacactgttgttcatcaaactggcaaactccgccgccttcttgtaagattcgattgttttgctactttctattgcttcagtatggttaacatcctatattttatccatggttccaacaacacttactatatggggtgtctatagattgacttattgcattgggtacatgttgttgtattgaaagtagatagtgataggtttgcaaggcttgcattttgtttcagttataatcaatatgttttgacaacttattagtcctttacttaatttcttgtgactaaaacaactcaccatactggaagttgctattttactttcaacatgtcacttctaactctatgttattagtctgatatatacatctagtgattatgtcgaaaagtagattttagattaaacgtggagtcacagaattgctcctttccattgtttcataaataaaatacagaaagtatctaatatgtttctgcctagacatgtcaaaaaattcaaggggagaatatatacatcagttgtgatcctcatttgaaagttgtccgtatcttatttcacctttcaacacgcagatttattccctttttttttgtcatgcgaacaattttgtttatcctaaatgtatcttaagaaatggtacaccagtagattttcttcatcagctggaaaactaaacagttccatctctacatttagatcaactttataatgtctttgttctatattgcttaatgtaatctccagttccattttgatagttaactccatctctgtccagaatgacgctgagaatatttgcacaaagcttgccaacttgaagtctgtacggcgtacttctggagatcctccaggaaaatttcttggaatatttggcagaaatgatcttgttgggaaatatcagaaaaggctggaggacctagaagaaaatgttagaatggaacaatcagacactactaggagcagacaggtgcatatttctaccaattttggtcttgctcaaaccatgatgtttcaatatctccctatctgtttgttatactgcattggaattagtatttggctctggtgctcatctttcagaaaatttatttataaacatttcaatattttgtcatctgttctgattttctttacatctctttaggaagttcccgctgcttttgtgtcattcagatctcgatatggtgctgcaaatgctatttacataagacaatcagacaagcctactgagtggcagactgagcatgctcctgatccccatgacgtttattggcctttcttttcaacatcattcatggacagatggatatccaagtttgtagtctctgtagcttctattctcctgatactcgtctttctcctagtttcggcatttgttcaaggactcacctatatggaacagctagagacatggttgcctttcctgagaaatatactggaaatgttagtgtttatccatcta

SEQ ID NO: 7711 - DNA, 13661 bp, Oryza sativa
caccgcggtggcggccgctctagaactagtggatcccccaaatagtttgggattgatcggtaataattaatgcaacaacacactttcatatatatgtatacaaaattaaaatgtgtattaaaaagtacgcaatactacctgtataccaaggcacggtaaccttttgttgtaacattgtgatgaaactttatgttgctgttgatgtccatcgagtaaggcatatctccattgtggcaccttaaccactcatcgacacttccctaattatttgttagcataaagagataaaataagtaggtagaattaacattaatgcaaaatgtatcctggcgaatagtaagttgtatatgaaattttaccatctttatcccaagagcttctcgtgtgatgttgttgttagcccaaaaatatattaaataattgccatatgtctgttgctggaagaaattaggaattaatggatattcatatacaacttttggtggcagtggcacataactatactaaatggaaatgaagtgatatacaagtgtttatgtatgttcggagaacaagggcgcatgcaatgttagagcagtcccaataccagactgcatcacctagtcactggtattaatattaggcttagctcacccaatgcacaatgtttaaaatggtccaaataatgtaatttcatcctctcatttttttttcttcttcaaatagctctttcttttcaattgatgcttagactctattctctgctctattagttcatacgaggcaaagcttttgccctcttttcaaaaatgcttaattatactctatatccacgacccaacgagcttggctctcgtgaaagacctacatcatgcccctctctctctctctctctctctctcattgacatacccttttctttatccttatatccccatgcatggccttttagcctcagattatgattcataaattacaagggatgtttgataagttaacaataatgcactctatataacaattatctagccacttgtagtgatatgaatgaagccaatacataaggctgacttacaatacattctcttggaggaaatggtggaatctttcgtttttcctggatcgatccatctatatcactatcgtaaatacaatagttgtacaagatatgtccgccagaactttcgccaagcagctgcagatcgagtaagtaacatcaatttactaagggctatatatatttcaaaatatttttggcatatgcattatatatagaaagaaatattggaacatacttcgttaaacctatccaaagcttgacggcaaatagcattcttggggttgctataatcctctccttggcagtgctccattatcgtcttaattaagatcaatcacatgtaggcacattgagacagcagtcagcataggttcagttaatttctagtgaggtcatctttgattaattagtgtgaggcttattagcgagattaattggaatagcgtgttaaagaattatttgattacctcgtacaactgatctgaaatgatcccaactccatgagcatacggcactctcgaatcgaagtcaatgctttcacctgtaaccggattacctactagatagccctgcttgttatcacaaaatacaaattgatgaccatatatacaaaaataaaatttatcacgaaggatcacactatataactacatactacctttatgatgaaatcatgtttgatatgtgtgatgaataataggcaaaatgggttattgtttagactaatgtggatcaagatagtgatcagaacttgtttccgaaagatgtttctttttatttgatgtgcatgtgaagctaggaagcgaattataagcaatcataatgagttacaagggaacgggagactaggatgcggtttccgagatcagagtcggtcaagagatgtcattagatggccatgctctagcttgttgtatgaagatagaagacatggaacgggtgtgtgttctacgcaattggctccgtgctattctgacatggtggagttggatcggttagtgggtcggtagtttagtttgtgatgagtatgagcttatgagttcatatgggttaattgggccaagttcttttggttatcggattgtcttataaaacttataaggagacaaagagatatgacgggaaacagaagagaataaattcgttttttttaaatgtatatggccttgttgaactttagaaatggtatttgacctattcatcttattaaaagatacgtattatttattttgttgtgacttacgttgacattaagagtacttaaaacataatgtgtatttttttactaaattttatattaagaccatggtgaaatgatacatctaaaagtccatataacaaataacatcttatgctttaaatgaagggagtagtaattaaaaaaatgacatgacttaggatgcgtcgcaagccagcatacagtacagaacagtgcacacggaaaacggaacggtccattagcacgtaattaattaagtattagctttttttaagaaaaatagatcaatatgattttttaagcaacttttatatagaaacttttagcaaaaaatcgcaccgtttagcaatttgaaaagcgtgcgcgcggaaaacgagagggggaagttgggagcaggctctcccgaacacagccttagttatattgccattagcatatatagaaaaaaaaacctacatatgatatgcgggatttctatatattgatgtttattaggaggtggtgatgcttgaatcttaggtggtgtttggatctagggacttaactttagtctctgtatttagacactaatttagagtattaaatatagactacttacaaaactaattacataaatgaaagctaatttgcgagacaaattttttaagcctaattaatctataattagagaatgtttactgtagcatcacataggctaatcatgtattaattaggctcaatagattcgtctcgcgaattagtccaagattatggatgggttttattaatagtctacgtttaatatttataattagtatccaaatatccaatgtgatagctcatctaaacagggtcttaggctaactagtcctctaacttaggatataatagtataagtaagactctgggtctttctcatattgccactagcaaattaactatcgacaacaacggcacatatatactccctccatcctaaaatatttgacgccgttgatttttttaaaaatatttgaccgttcgtcttattaaaaaaatttaagtaataattaattattttcctatcatttgatttattgttaaatatacttttatgtatatatatagttttacacatttcacaaaagtttctgaataagataaacgatcaaacatgtttaaaaaaatcaacggcgtcaaacatttaggaaaggaggagggagtatattagaacataagaagtggataataatgtacctaaataaatagtattgtggtgaccatatagtattggtgtacgtaccttgagatcaacaattggcctcaccccagcttcgatatctgaatacgtacacaccacatgatcgtgtcagaaaaaatgtaagcgcgcagattaattaagcttaatttgcacactaaactaacaaaaatctcctagttgcacgtaattaatggtgcaattaagtaaataattaaccttcagagatcttctgcgcgagaaatgggacgatcttccctgcgtaggagtcacctccaatgtagaaaggatttgcgagatactccggatgatcactaatccactatatattaatcacaccaattaagcaggttaatcatctcaactcgattgactaaatcaaaattaattactattcccaccatttcatcgtagtccaagtcaatttaactttttttttcaaacttatttagatttgactaaattatagaaaaaaattaataacatatagaacaccaaattagtttcattaaatataacactggataaatatttttataatatatttgtttttattaaaaatactactattctctttataagtttagttaaatttaaataagtttttcctaacaaaattaaataagtttgaattgaaaaaaatcaaagagacgtctaccagaagactactactacctccgatctaataaaaattacattatatttatagagaattgaggacaaattcgtagaattaataaatgaccacaataaccttatttaattaaaaggaattttgagacaacaagttagagaagtgattggaaggaatggagattagaaggaaatatattttgatgtaatcaatttgctgggttccacattagtagaaatataatttttgaataaagatttaaatgtagaaatacaatttttatgtgacagatgtagtagtactaatatatatgatatatatgatatcacatgttgtgtatagtatacgtatagattaattaattaccttcgcgaggaagtgcttgagctgcagcgaggcggagacgtcgccgacgaggtagccgtcggggtggcgggagaagctccagccggcgccgaccggcgagtcgacgaagaggacgctcgccgccttggtccagccgtgggggtggtacctcagccgcgggagctcgccggcgtcgtaggggcggtggtgctccaaggccagcctcaccgggccgacctcgaagaagacgccgctgagcacgctgcagcgggcgccgccggtgagccagaggaggagcgggtcgcggcgcgggtcgccggactcggactcgacgaagtagtagaagagctccgcgccgtgctcctcctcgtcgacggcgacgtagcccgtctcgaggcggaacgggagctcgccgtcgtagcccgggagcgtggtgacgacgtggtgatggctcgccgtggcggcggcggcggcggcggcggaggtgggggtggagtgatcgagagggcaggttgggagagcggagaggatggagaggaggaggtggtggagacggaggcgcggggacatggcggtggatgccggcatgtcgccggtactgtgctccggtggacggtggtcactgtgtgattagtctgattatccatggaaatggaagtaaaatatgtagtggtcgtcggcttaggttttaggtaatgtaaaaaataggactgctactgccgtcaacattaaaatcatgtcaattctgaaccattccatcgtgttgagatttacgcacaataaactcccccgtcctccatattttttttctgaggggactacggatcggtagtccgatccaaatgtgtaaaaatcgggcgcgtcacacatgcgtgcaaaatgactttaaactaattttctcttaaattacttatccaaatcttgatttgattgcaccattaaatttgttgcaattaaatcttcaaaacaagaccacacattgatatattccggcgaaattttttttagcttattattgaattttttaaatgttgcacgatgttccaccaaatatatcgaaaatgtttcaatcatttaaatcaagcgttgtttcaccttatataaaaacaatgtttcagcaaatagcgaaagaatatttcaattccctacagcattagatctatacatagtgaaacattgtgagtacactaggtgaaacatttttggtggaataaaaaatgaaacgaattctctaatagagggtttccaaaatatgtgggtgatttgttgcaaaagaatgtttcgttcattgcaacattagatctatacatagtgaaacattgtgagtacactaggtaaaacatttttttgcaacaaaaaataaaacgaattcccttaatagagggtttctaaaatatgtggatgatttgttgcaacatcgtgcgtggtggggacacgtggcagtgtggcagggaaaacgtggtggggcccctaggggcgtgcgcacgcgcgtcagggcggcggccaatttttgctgcgccctcccgagtgctcgataacgagcattctcgttttttttttcttccctcgtttatgccaccaggccaccaccattgccccagtggtgtcacggcaagccccaccagacctcccccgcccctcctccttctcaagctagcggcgccgagatgtccaggcacaccgtctttgatccatatttccgacggctccccatcgccacccccacctcctcgctccgcctcctcccacaaccatccctctaatttaaagaactacctcccctcacctcatcccacccacctcccttcccttgcccgtccctaccctgaaccctaaaacctaacttgccgaaccattgtcaatagccaaagtttgactggggtcattggatgtagagtaggagacctagcatgaagcaaaccctacaatgtcataattgcaaaaaaaaaaaaggttaattggatccatgccattattattttcacggttttgaaaaataccactactatttaactatttgaaatcatgccattacaatttaataggtatttgagatgcgccactatataccctttcattgcacttagaaaatatttttgacaaaattgtccatatcttcctcctgcaccccgaagagcatctccaacagaatctcaatttggctcttcaagttaaaatttggccaacgtagagaaaaaacaagctccaatagactctctatctggatggtcaaattgctccaccgctggccgaatgtagccagcctcctccactggccaaaggtgggtcccaccaccactcctaaccccatccttcctctctctgccgtccacccactagcgcatcggccgggggcgaactggagggcacgccgaccataagcgcgctgccgacgtctgggccaccacccgtcgcggtgtcgtcatctaggccaccgtccgccacgactgtcatcttcgtcgctgccgcaccacggtcatggacgagccgttgccgccgcgcggacgtcgagcgagagcgcgtcctcgacgtcctcatcgacctctgacgaggaaggatagggagcaccttcgggcggtggcggcggcgacagcgagggctgaggaggcggagggggtggcgaggaaggacagagagcacctccgggcggcggtgcttggaggaggtggtggtggtggtggcggcggcgagggccgaggcggaggcggagacggacgagggcataggggaggggccggggacaggaagaggtggcgagcggagtggcccgatgagcggagcatcgcagcggcggtgggggcacaagccttggcaccatgggcggcggccacgctgcccctcctccgccgccacgggggactacctcaccgccgtgctctcacccatgctcgtgtagattctcgggaaaaggggagaaaatgaggaagaaagagatgaggctgacatacgggtcccactgccatacactcaaaatagagaggatgaatggagagactattggagtaaataacaaatttgacatgttaattaaatcgagaattaaccaaatagatatttggagagtcagatttagagagactgttggagatgctctcctctcccattcatcttttcccatcgatggagctagacccggatgacgcaggaacatttcttcgtcccgatctcctccgtcgggcatcaacttggcgtaggagacgttagccccaagcggcaatcaaggcgaggaggacgctcaccgtgggctcggccgacagagatggtttcccgggtattggtagtgaggccggaccaaaaccatcagcggaggtggtagccacgccaccaaatgaggaagccttcctcccacaactgacgaggctggaaaccatctcccaccacaccaccttcgcacctcctcttggcccgtttggttggggagagtttttaggagggattggaagtttagagggatgaggctattaaatattttgtttggttaggagacatggaaattttggtgggatggggatggggaattaaggaatgaactccctccttttcaatacctgggtagggggtcctttacttcgcctaaacaaatctcagccatccgttttcattaataacctaatctctaactaaactccctatcaatttccaccacctctactaaacaaggtactgggatgaaaaatcaaattctcatcttaatctcaccatcaattccctcgtgtaaacacccaatcccattccctcaagttgccaaacaagccgtctattctttcaatcaatctcttcacagttccgctgcacgccaactgtttgtgaaaatgctcaccaaagcaaggatccctcaattcccaggtgttgttgcacaatgcccgtcaactcctccagcgctgctgctgcatgctccccgtggccgagcttgacgatgcaggcaccagctctgcttttgtgcctgggcctttgtgagcctctgtctccgcgtaccttttcgtgccaccgggcctctcaaccggagaagcatcaggaacaagatcaggcctgtttaggggagcttaatattctgaaaagcattagtagccagcttctaagaatttaaaaaaattgggtttggcttctagtttattttctgaattctatagcttatcaggatctgaaaaaaaaaactggactgtttgagggagtttctgattctgagagaagctgcagcagctaaaagctcccccaaacaggcccttagagagagatggtaggagtggaaagagaaggggaagaaggaacacggcatgggcagtttggtccaaaagaaatttttagtgcggtgataggaaatttagtggcacatattaaataacccattaaattgtagtggcatgatttcaaatagttaaatattagtggtattttttaaaatcaccaaaataataatggcacgatccaattaacccaaaaaatttaacgccaaatttctatggaatatgattaatttagcggtttcttttttttttagttaaatttagcagtttcgataaaacagtagatctaatcctggttagcctcgcaccattactgagacgggaggttgccgtcgccaacgtaagccgttgttagcgaagggaacgacgctgatgagtatgttccattgtacggacaatgcgggttcttttagcaaattaccagtcgccactcccatcaatgatagcgaccacaatgacgaactgaaattcctatttggcgcacacgcgtcagtacaccatgtcgagcacacatttcgggccaccagaccacgtgtcgtgttaccctttttgagtgatttttggctcacctggcccactagtccacgtgtcgtgtttcctttttttcgacccaacgtggccatgtgttttcattcctttttttttcattttccaacattttaatgctcttggttttaaaacctaaactttcaactcaaatttaaaaactttcaaaccaaattttaatacttcaactcaaattttaaaaacttttgactccaatttcaaaactttaactcaaaattcaaaacttttgaatcaaatacaaaaactttcaactcaaatttataaattttcaaatcagatttactttcaactcaatttttaaaactttatctcaaaaatttttaaaaagtctacccaatattaaaaaattaaagttaaattatgaaagttttcaagtcaaatttgaaattttcaatttaaattttgaaacttttaatttcaaatttaaaactttcaacttaaattttaaaactttttgattccactatttatttattatttgtttgtaactaatcacgctaaactagtcgcacttaggcgctaaccgccctgcttagcgaggggggcgcggcccggggacgcgtttgtacatttccaggtcgcggcccaccagatatccgcgagagttcaagacgatgggtactttggtccagatggaagcgtgggccggcccatctgtaattattgggcccatttgcattagttgcaaggtacgtcaggcccactgttattgttgggctctgatgcttgtaaaacagacgcctgtctgttcatctccgaccgaccgacagcaaattaaaatcaatacaaaatcagcttgatttgggattatcgcatttcagacaagtatatgcatcacaaattcacgatgtgaagatagaaatgttctccacgtccaaagaaaagcaaccaaaaaaaacagaagaaaagagagcaagtttgccaacgacattgatcatcatttcattaatctctctttgtatttcctttgcttcaggacgacacagtcagggtgttacaacaaatgaaatgaagattacatcagttgcacttcttctcaaacagctaacccttttggaagtcactgtacagtgagtatctcctccaatccccaagtccatatttctctatacgtttgagatgttatgatggtgtttaaaacggccaaattttggttatctttgtcatgaaaaactcttgcgtatagttgtgatgatctgatttggcagctcggtaccccgcaggatgagatacaatacaaaagaagcataagcaagtactgccacgcagagaattgagccagataataggcctcttatttctgaagagaagaaatccagcaagagatagccattgatcgtgatcaatagtgtcgccactgtccaggtcacagcctgcataaatttgacacaactgagtgagaacagaacatcatcggctttacacctcaacaatggcaaatcaaagcaagaatgtcactagagcagtaatacgccatcatttaactaataagtcaaatagttcgtaggcatgctggtttgaagatataaaatgttcaatgcagatcctaaaagaacccagacagatacaggtgggaatctgggatatgtcctacagcattgctgatttagtatctatcatgttcaatgcaaatcctaaatgcagggatggctttttctcaaggctttgcagtggcagtggcatcttgcagcgaagtgtgcaatcatgagcagacagaaacacaagtaggatctataatttccgtaatagaacaccaaattaattgactaccacaattatttatggctggattatgctgtcaatggaagatatagccatctcatgaaatgaaggatgcagaatgcttgaagaacaggacaggcattatatcacagatcaatgacgacttacttgagtatttcgacctattttaaatacccccataactttctccttggaaaccaaagttatcagcggaatcagggcaaaagggatctgaattgattgaagcacatttagccactcgtttagaacatccagcgaatccgatttatcgaagaagagtgcgacaattatcgttggcacaatcgcaaagcttcgggtgatgagtgacctgatccattttttcaacttcaagttcaaaaatccacccattataaactgtccagcatatgttcccgttatggtactactctgccccgcagctaatagtccaattccccaaatgtagaggatagggaaaaaccctccaccaaacttctcctgtagatactgtccagcattttcaaggccaatattaccagcttcttttgtgccataaaatcctttcgcaaaaacagttgttacaaagagatttatcatgaaggacacagccaaggcgatggttgactctattgaatagtatctcaacgcttcacggacttggtgttccttgtttgggtctatttttctcgactgaacaagcgctgaatggagaaacacattgtgtggcatgataacacatccaacaaccccaactgcttgtcttattgtcctggagctcaattttgggaccaaaatacctgcagacaaaattatgcgtaatcaatgggtcaagagtgtgggacaattttgtagtgtcaaaagctgccgatcggtaggatctttacctatgaacaggttcttcatgtttggcttggtatcagtaaacatccatgcaaaggagacagccatagtcgcaattagaatcgcaaatacagcttctaatttcctcaccccgtagttttcaagagacaaaaaaatgaaactgaaaaaaaaaaaagaaacatctcgtaagtgacggtccaaacaaagatagttccacaattttcatgactttgaatactaattttgaaacagacctaacttagcaccgtgcaaagcacaaggcagaaatcctcacagaaactagcaagtgattaatattctaatccaattagtagtttttagtgctagtgaacatgtgagcacttgtacagacttctgaatcatatcattaatcaaagcaagggtctagaacgagatatataaaataactcttgatggacaacaacagaacatgtcctacttttatcagaaccaaaagtcccgtcaaagaattgcataagcacaagcagtgagtacggagttaaattaaaatacagtctatagctgtcagcagcatcaatccatcatgaaaaggtcagcacagtaacttggtactttatattccttcaggacaaacccaaaactatcataagcctctcctgacaaaattaagttaaattgaccaaaaacatcacatcattgagtaatcagcagcttggaattgtgaaaatgaaaaattcggaggtacaggttccgtgattatccatatttggaacttgggcattaatttttcatttctcatgaattcgcagccaaaacagatctgagactgtgttcatgtaaaatgaattggggcgaaagctaaaattcctcaagcattcaaccatcctacgttatagggtaccatgaatatgaagtctatcaatatacagtacagttatctccaacacagtgatcgtacgccgccaattttaagagaagtgaacaatcctcgaaattatgaaattaataaaggaagtactgtggtttacagcgaaatgagaagaactgaaccaacgcccaaaaaagtgaagctacaaattaaacgaaaacaacgaatcagcagcctataacagtcacagcaaaacctcccccaaatccagctcatgatctaacatcacacccaaactctttagtagcaagtagcaacaacacatttctttttttttctcaaatatactaagtatcaagaacttaaagcagcagcatttttttttcttttggaagcatctcaagttaagttggtgatagggaaaaagaaaagcaaacttctaatcttttggaactatggtgtgtgatctagacctcgtcaatcacaatcaccaaagccatgcgaaagatccaaaccaatcaggaatcgaaaccgacccaacaaaaaagaaaaaaaattcacaagactgaccaatccaaggcggtgatgacgacgccggcccagagagggaggaagccgcggctgaggatcttgatggcgatggcgctgccgatcacctcctggatgtcggccccgaccatggcgacctcggccatgagccacagcgcgcggcgcgcccaggaggggtactcgtcgcggcagagctcggcgaggtgcctccccgtggcgacgcccaccctggcggcgagcagctggacgaggagcccatggaggtcgcccacaggagcagccacagcagcgtgtccccggccaccgccccggcctgcaggtccccctcgaggttccccgggtcgacgaacgctatgctcatgaggatccccggccccgttaacagccgcagctt

SEQ ID NO: 7712 - DNA, 3226 bp, Oryza sativa
gctatgaattacagtataagtctcattttttacatagtgtacatgtgaacagtgcatacatatacatatttagctcatcagtcagcacactcttccaaaaactacagtaggatttgacagcctcagcgtttgccttatagcttatacgccgtcgtcaagatgtgaattttaaaatttggttttgatgatttttttaatatagttcccttttcagtattaaattttaactcatggaaaatatatatgtaaaaatttctactcataaattattttttagttaccaataagtcgttactgcttgtaaacaaaagattgacctcagatgagaggaggagctggaccagcaatgacgttgtctagcatctttaatggtggaaaaaaaagctcaagctcgtgagctcagctcgggcttggcgtgagcttggttggcttggctcggctcgtaagccaaacgagccaagcctaagtctcctttttagcttaaatgagccgagcccaaactggctcacgagctgcttgttttggcttgcgagcctataccgtcgtgtgtttatattgattattttactttttatggagttattatttgtcaacttgaaatttatcattaagattttgaagaattaaatatataaacttatttaaattttacatgttgatgatttattcctgcttttttttaataattacaaaatatatatgaatatgtatatcaaccggaaggcttgcaagctggctcgagccaggaaacgagccgagctgagctctagttttagcttgtttctctaactaagacgagtcaaaccaagcctaatttattgcgagccactgcaagccgagcctcgtttccacccctaagcatcgtcacttgctgccatgtgtgccgtatgccatgtcctttctctttttcttttttccatcgcaccattcgtaaactggaccctccaattcctcgatgtgtgctcatggcccaggactctttggaatccaagcaggaaattaattaagcccaatagttacatcaccgagcagaaacccagcccaagtaactgggccgaatccagcccaaacgtcacgctctgggattctggcccagattacagcccaggcttgtagcttacctggagctcatattttctctcaaaaaaggaaaaaagaaactagagttcatatggttggaattctatgatatgctaccgcttgccaaattattgctcggtcgaattttaataattattttatttccttttatacaaagatgttatagtatatgttctcgcaaaaaaaaatatatgttagagtacatgattaattagggccgaaaatgatctaattgttataataaaatatagttaattagtttttatcttatacttaggccgtgtttagttccacagccaatttttttaagtgtacggacacacattttaagtattaaacatagactaataacaaaacaaactacagattctgcctgtaaactgcgagacagacatactgcgcccatgtatgacaataatcaacttaaaaacagacaaacaatgtttcttaaaacattttcatttccattatcgaaagaaaccactaatggccctacatcgaaccaactgaggagatcgttttcaaaaaaaaaaaaggaaatgacattattggttatgtttaagcattcaacaattgatgcgcaagattcattaattggttcggactaaattttttactataaggagggaaactatgcagtggaaactaaaaatttattactgtaggataagaaaattgatgtttgatgtttgtccacgtcataataaataaaacttttacaatatcattatatgtgtggaacttttgatagtagtcattactcatcaaagcggttcattagaaatccaacgcttgaacatggcgagacttctctctggttcaaactctggtactgtgtggctaccaccctgcgattaaattgaataacatatgatgatatttgaaatatctataatgcattatatacaatttattgatcgatttggaaatacaaattttggagcggctttcaaattaaattagtaagacaagatatctccaaaccccctggagcaccacaagtgctatatgcgacatgaccattaatttggaatacattttgagatgccatcgatcagatgttgcaaaccttaaggaatagcagtatatatgaaccaaatcaaaaggtaattaaatagatatattagatggattgttacgtacctttacagtagcgaaagtcatgttgttcatatacgttatggtgaacctgcaatagttatatatatttccaaatattaagtgcaggatcatacattaactgaaggcactggccaaactcaatataattaaggcatgaacaaactatatagtgctatatccatgtaatataatgaatcttaattaccctgctgactggccatcgacgtgccaagccctccagtcatctacaacagagaagttgagtgatctcacccaggcttgtgtgcccaaaaatggtatcattgcatcatggtcaccactgtttacataaacattatatgaaaatacgaaaggttaatcaattagaaaactgaacattcaaccacactataaattaacagtagaatcaccctaaccatatgaaaggtacacaggtaaactagagcaggcatatttatctgattttggcaaagaaccaccttgacgaattttttttttggcacgcggggtataattttctttttctttttagaagggggtcagggtagagagggatgcaggggagtgccaaaaggataagataattaggcagagcttattttttaaaaaacatattgaaagtacaaccaatcttttttttgaatttatagttcgtttcaaaaggatgatttgctttctaagatattattaatttgtttccattttctgatcaactatcctttgtgtttggcacattaatttgtacctttttggccatatattgtaacaaaactttcataaatagtttttgattgatcggtaataattaatgcaacaacacactttcatatatatgtatacaaaattaaaatgtgtattaaaaagtacgcaatactacctgtataccaaggcacggtaaccttttgttgtaacattgtgatgaaactttatgttgcttttgatgtccatcgagtaaggcagatctccattgtggcaccttaaccactcatcgacacttccctaa

SEQ ID NO: 7713 - DNA, 3162 bp, Oryza sativa
cactccctctcccccaccatagcgatagtacacacatttgtcagcttcgttcacaataaagccagtagatgtaagtgttgtgtcaaacttctcatgccattgcttaggtgctttcttaaggccatataaggatttcaacagtttacacaccattccctcctgaccttttagtacatatccgtctggttgattcatatatatctcctcttctagctctccatttaggaaagttgtcttaacatccatctgatggacgagaagaccatgagaggctgccaaagcaagtagtactcgaatcgtggtcaagcgggcaactggtgagtaggtgtcgaaaaaatcatcgccttctttttgggtataatccttggccacaagccttgccttatacttttcaattgtaccatcaggcctaagctttttcttgaaaacccatttgcatcctacaggcttgcacccatatggacgctcaacgacttcccaagtaccattagacataattgagtccatctcactacgtaccgcttccttccaatagtcagcgtcaggagatgaatatgcctcttctatggttcttggagtgtcatccacgaggtatacaatgtagtcatctccaaaagactttgcagtcctttgtctcttactctttcgagttgctacaatgttatcctcctcaggattttcctcaggcgtttgatcattgtgttttatcggtgcaaagtgctcatggggtaaaacaggttcttgactagacgtgctaggtgtatttttcatgggaaattcattctcaaaaaatgtggcatctctgtactcagtaattgtaccaacacgcatgtcgggtactccagagtttactattaaggacctatagcccacactgtggatagcataaccaaggaacacacagtctacggtctttggtccaagtttacgctttttggctataggtacatttaccttggccaagcagccccatgtgcgtaggtatgagagatttaatttcttcctttcccattcttcgaatggtgttacttccttatgcttcactggaattttattcaggacatgacaagcagtaaaaattgcctcaccccaccattccttggaaagtcccgcagtgtctaacatggcattcaccatctcagttagagtgcggttctttctttcggctaccccatttgattggggtgaatagggaggtgttctctcatgaataattccaaactcttcgcaaaaggacgtaaactcattggaaaaatactctccacccctatcagacctcaaccgtttgattttcctttcaagttggttttctacctcagctttatagatcttaaagtaatgcaatgcctcatcctttgttttcaatagttacacatagcaatatctagtgcaatcatctatcagtgtcatgaaatatttctttcccccattagtcaacacgccgttcatttcgcacagatcggaatgaactagttctagtggtgccaaatttctcgcctcagatgccttgtgaggcttgcgaggttgtttcgattgaacacaagtatggcacttggaacctttgaccaaagtgaattttggaattaaactcatgttagccaaccgcgtcatacaaccgaaattcacatgacaaagtcgcgaatgccacacattggactcatcgttctcgctaatatggttcacaacattattattattattacacatgtcatccaaagaaaaacggaacagacctccgctatcataaccttttccaataaaagttccatatttagatacgacacatttattggattcaaacacaagtctaaaaccatctctacacagtagagagccgctaactagattcttctttattgaagggacatgctgcacgttcttcagctgcacggtctttcccgaagtaaacttcagatcgaccgtaccaacaccatgaacaaccgcaagcgactcgtttcccatcaacaaggaggaacctctcccgacctgataagaagaaaacagggaaatatcagcacacacatgaatattagtaccagtatcaacccaccaatcaggtgaatgaaaaacagagagaactgtaggtaaaaaattaccgtaccccgatgttcctccgctctcgctaataaccatgttggcagacttcttgtccttgcgatcaggacaattcttcgcccaatgcccaggcttaccgcacacaaagcagtcgcccttggcctttcccttgcctttcttcttaaaattggttgtagcctttggtttgacatcaggcttgactttcttgttgttgttgttgttgtgggatgcgtgagggttcttctgttgcaccaaattggtgctagaacctccctcgatatttttgccccggttgtcctttgctctcgccttctcctcaacacccaaagagccaatgagatcagtaacactgaactcttgcctcttgtgttttagagaagtagcaaagtccaaccaagaaggtggcaatttggcaataatgccacccgccacaaacttgtccggcaactcacagttgttgttctcaagtttctttgccagcatctaaatctcatgagcctgttccactacagaacggtcatcgaccatcttgtagtcatataacatctccatgacatacagctcgctgccggcgtcggaaactccgaacttggcctcaagtgcatcccacatgtccttccctgaaggcatgtgcatgtacacgtccactatattgtcagcgagtacactgatcaatgctccacggaacaggcaatccgaagcctcgaacttagcctcctcctcaagagagagaggcggttcacttcgtttgccccgtgaaacatagaagcattgcatcgctgtcaaccacagtagtgcacgtgctttccatctcttataattagaaccatcaaaagcatgtggtttcagtgttgcagcaaagccaactaccgaaaatgacctatcaggtttttggattgttggaactttggtcataattcggcatattttaatccaaaataacaagataataaacatgatatttacaatgagatttgatctagtgatagtggtgaatgtaatcaacatgagcatgcttaatatagaataagtatcaacaatcacataataacacaatgttgacattgcgatgaacattaacagtaa

SEQ ID NO: 7714 - DNA, 7112 bp, Oryza sativa
  unsure (1)..(7112): unsure at all n locations
aaaaacacgtattagatatgttggttcatgacccatccaacagaaacgaaccaccacccattcagttttccccatttttcggatctggagagaggtgatgggctgatggctgcggtgctcaggggagcagttgattggccacgatggcggcttggtggagccgctcagcgacggcagcaacggcagccccggcttggagcggcggcggccctggctagaaacgtcaaggcggtggccctggttcgaaggagcagctcagcggcggaggcggccgccaacttcgtggcttgagccggaggcgaggttccgcgcgattcgattcgatttgattttcttttgtgtgtgttcattgacggtaacaatgacggtagcgttttcttgcagcggcgtcaatggaagccagctccacgatgacgggtgaccgctgttctccgcccacggtctccaccgggatcccttcagacgccaccaccctcctcgccaacccttgccgacctactccacccaagccaccgtgacgccgctccaccggcttcactggcgttcagctctccaccgccggccccgtcactctgcgaccccctcgccatcttcgacacggtggccgcctcccgctccttaggatccccgagtcaccaccgcccttgatgtccgccttggccatggaccattgaggaggaccgaattctgcattggtcatttgtctttgttttaatctttcacatgctcattgtttttcagggatgaatacaatggatcattgtggtaggcctgctcctagactgttgtcttcatgatgcattcaacacctcgttccttgctccgatcttaattttaactttagtactgaattcgtctatgcaacgttcaggaaattggaacaagaccaggtgagcttctgtgtaccattattagattgaggccctaatgattgcgagtggtggtggtcatatacaatttcttttttggattgctacttatagtcctgcggcctggatgttgtttttgcgatgcattaatcacctaattttcatactcatatgaatttttatgtggccagacatgaatttgtgtgtgcagtattgttagaaatctgctcacatctaaattttcatttgttcagttatcaggagttggcgcccttgctgtagaacaacacctgcaacatgcacatactctgttgtttctccgcatcggctgtttttgccaatgaggcggggatggcaaccttcacatctgccgctgcctgactacctaactgctatatctgcatgttttttttggaatacttagataattaactagtgaatgctctgaattttacttgatgcgagaacttgcgttggaggcatagcttgatggcacagcagttcacaatgctctgctttaaatgttcatgttctgaactttttgggttgagcagattagttaagagtggattgctccaaataggttagctgaattttgttctactgcaggaatgctctgaataaattttgtagacttgatatttggattaaacccgttattttcaagtttgtatatttctatgcctcattgatatgcttaaatatgacacccctcacttataactgttggctaacaataggcataataaagtgaggttcttatgaagcattttatttcttctttagataattgtatctcacttagagtcatttatgagtgtaaatcacttagatgatttaatctttttttgcaaatatccaggtggccatgggatgcctccctagatgatggccgtgggtgatggatatctgttgatggggaggcctagagaatctgcagcactttgtcagcttgattcgatatgtggcgccggagtcgtcctactcgcgggattcgggcaagggtcgacccacatcgttaggcctgatctacattgttggtgttgttgtaatcttttatttgtttttgtgtattctaccaatatatcgcattgtgtatgttgattagatagttgttgtaatactaaatcttgttcaaacatttctcggatgttcatacatcttttactcaagcagtctgggactaagaacaatcaatttactcatttactcaaggaaggtggatcaagaaaaacataaaataatttatttactaagataagactagggtaatttttgttgctaaatcaaaagtttatacttctaacttgagaataatttctttactgatagaaggttggagcaatcaaatcttaagtaactatgttactaattaaagtttactggtagttttatctttcagtaaaacaattactaaaaagtcaaactttatggtacaataaaaccgcaagtaactttgttactaattgaatatacagataatgatagtaactgagttactcaatcactcctatcatttctccacgtggtgttcgtgcgacccagagtggttttgtgtgggggcttttacatgaatattaaattgttaacttgtcattaataacggtaaggaactcttcgtaaaattgttactcacaagcatattggaatggttgccccacaagcacttaagtaaataaattactaagatgactaccattcagtaaataacatactaatatgtttacctgtcaaaaaaaggtgcggtatggattcattatccaattttcacgaataataaatatgttactgatagtgtattgtactattgataaggcggtagtaatcgttttactatatatgattttgaaacagggattggggtgtggggtggggcgcctgggggtgggtgggggtgcatactgtgaggagagtgttttagttatagcgcaccccatacgcggtttagtgcatccctatatatatatatatatatatatatatatatatatatatatgatgattatttacacatttttacaggatcctcactttaaaacaatacctggttgctgcacgggcatcttttatgcaagtggttgctcttcctgataagcagcattctcttgagatgaccactgtggggtgcctcttcctttcaacatggatccgttgtttcacggacgcattctcaaggggcatgagctggaagggagatttcacgctggatgatttcaagatcgtggatggccacgttcggaggatcaagaagcccaagcggtcttgctgcagggaggagatgcaggacgatgtgagcaagtttgtggaagagatagagcgtatcttcagaaacgatgacagtcgactcatctcaaagcacccaccctacttcagagacttcatctatcgtctcaggaacatggaaatcatctctgatgccctatcgcctcggcataagctactcatcgagtcacacatgtgctttatgacttctagctccagggtatcattcataattaaactctactgcaagtacgaaggtgccaatgaatctgatgaacccaagtgggcgactgcaatacaagatgctcgtagttcaagtgaatggcgctcaaccgtgtctcgagtgatcatctttaaggaccttattgttagagctgacaaagctgaatcaccatatggatcgacaaggtttgaagccttcaggcttgttagaaatgcagccatgcatgctgcagaatatcgattcgatgtaagtactggttatatatattactgtgcaattgatcgattagtgtttttattattattctcttgctaactttctggttaatttgctgtgcatgatacaattaaacagagtacagtactccctccagttcctaatttgttgacgttttagacaggattacacataccaatgagtgattaattagtgtacctacttcatgttttacccctaataaatacggttttaaggcataccaaatcataacctgctcttggtttgagtggccatctcatgcgaaagtgaagctaccagtcctgagttcgattcttggtggccacatttttttgcatggcactgtggatgcatgactgttggcatgcatgnnnnnnnnnnnnnnnnnnnnnngtgctcccggaaaattttcactcgcgcgctgctaacaaaaattttgccaggtgcgtttgccgccaataactcagattttggcgctggtttgcaacagaatcccctttgccatctccatctatttatgctgtgcaatactagctagtttgacgctccaactccctacatattccatctgtttaacatgaacttgaacatggagccatgacctgctccatggcgaaaatggcgaaagtagtacaaggaggcgagtagaaggcaaagagccaacaagcagacatagaaaaaggaaattactcagcgcgtgggagagcaatggttgaacaggaaacgagaaggcaaagcatacatgacgttggaaataatgggagtagtaatggccggctgcatgcatgcagggacaagcaggtccaagatgcaccaaaaaagctaaaacgtcaagaaatatcacacaatgcttcaaactaatttcaaactggagggagtagtagttaagatttctttctttgtttgacgttgtttgtttgcttctcttttttttttcttttcttgcagggtagaaggaatgcaatagttgagaggtttccaaatgatagtggaattgaacttatgataccttgtcacttcgaagaatttattccccacattgttgcaaacataatcaaggagggagttgacatcactcaggagtatgatataattaataaacttagtagtagaaatagtatttttagtcaatcttataaattcaagtcctgacatagtgacatgtcataacttgtagcttgtcggcttttgctgtgtgcactggttgccccacatgtgcgttacttgctcaagaacaatcatagggtacgtatcatctacgagtattactacgtactgcatttttcatcatatatttgtgtttttagtggattcagcaaatatttgttgaataactacatgtgtgcccatgattaacatcagatatttataatgttccaaaatagttatttttagataatcattttttggcaatgtttactgaatggatgcatgacactctgttttgttcaacgacccatgcataaacacaatttagggagttttaccttttcattcaacgacccatgcatgacactctgtttcgttctccctgtcttttaatttcatctatgcatcagtgtccacaagctattagtactatgtgttgaagatattatacttgccgtctgcatttatattcttaactggagtagtacttataaaacagctagccctgcacgcacatatgtatacgtactgaggcaaatatctctgccttctatcaagttgcactaaaacatagtagtataagcaaactgactggtctagcttagcttcttgctccctaaattaaacatataatcggtcggtcgatctgatttaatttctgtcgaggagatgtatgtgaaatcaacgtcatgattaatatttgtgatgaacaattggctgtgcaaatgattttatcaatgaattggtttgaaaagatgtgtggatgttggtgtgagctgcgtgtgattaatgtgggtcagattgtgatatctgtgcctagaaacggttgttttgtctgattttgtgcaggtgacttgaggtcagccttagtcaatggtgaggaccggggctatgctcagggaggagtagaggtctagtgcggtcgggataccatgtgagaaggttactagagtctggattcttggaggacaacttcggtcaacggtggggatcgggactaaactcagggaggagttgaggtccagacgatcaaggataccgggtgacgaagttggatacaacatggcatacggtggatggacatcgtgtaggagagatcttcgtaacgggcttcacgaggtgtgcgtgcaagcgtcggtgttcgcgaaggtattggagaagagtatatggtgctatagtacggcatggtactgtagcatgcatatatgtgtgattgatcgtgtctgtgattggctggcatatggtgctacagtacgggcggtactgtagcatgcatgtgtgtgtgcgttctgtgcaaacaggtagcaatgcagtggctcggttggatacagaccgtgtcggcctggagggcaaggtagagaggccgagttggtgtcgtcccgtgcgatggagaccgagaccgagccggtacaggagatgcgtgcggctgtagtttgagagaattgtagtttggtttggtaattgaggatagagttctactgtgactaggagttgttctactactttaagtaggaggttttcggtataaatagagagggagaggtagcctcccggtatcgcttttttatcgttttgagagcaattgagttgatagtttagttagggtttcgagtttagtcgagatttttgtaaggagtgctgttgttgcactttgtaaacacagagagaagcaataaagttgtcatctactttgagcgtttttcgatttgtgtttcttcggattcaggcggcagcgtgtgagcaatccgaccggcggcgacaggactatgttgagatttccatcgatttgagggtaacttttatttccgctaaaagtttttgggtttttggttttccctactattcaccccccggtaggtttggttgcttgtgttcgatcctacaatgtatatatgcctcctagtatatacttccttcgtcctataatataagggatagtgggtgatgtaagtgtgtatgctgggattaatggtataggaacttgtaattagactggaaacattttttttccttgaacggtcactggtaacatgtttggagtggctatctttcttctcgtttgcctgcatgctccttggttaatgcgatgataatggagatcacccttggctagctataacttcacttggagttcttttaatttatgagatgtaggcccaatgggatcatacaagcgaagcaattagcaatgtagtatagatcatctttacaattaattaataatataagatcgggagcgtagcgtatagatcaacatgaatataagtaaacattcttttctttggttaatactgttggaattaatgaatgggccttagcccactcgaagattaattctttggaaaattacaaaagcccacctcatgggatgg

SEQ ID NO: 7715 - DNA, 34558 bp, Oryza sativa
  unsure (1)..(34558): unsure at all n locations
cccaggattgggttttttttgggatggagggagtatgtgatttcaggcagaccttaattattgtgttcagcattcaacataataaaatgaatcatgagaactctcagcgcctcccaggcggcatagcacatgcaccttaccgctcagtgcctcagccaccgtcatatttccaatgtcatatttcccgtttggtttggtctgttattcgaatggttttaaatttaaaacctcctcgaaatgtaactcatatgtttgagtattggcttttatgtgtttctaaagacatgagaatctgcttttgatgagcgcagcagctctttgttggtccatttggctaagcaggaatggagtattgtttggtaacaaaatgttgtcttctcctttgcaggttattactttagttacccggtggctatgcacctggactatccttcacaaaccgggacttcggaatactattgcgctggtatcacgacgtttggaccaggtggcgcagagttttttaaccaggagcatggatggcagtctagtctacggattgatagctactaattttatgtttccttcacactcctgtgcttgggatgaggttgtttcttttatggttcctttttggctgtgtgtatttcgtgcggaggccggaggtgagcttagttggattgtatcatctggtgtaattgactgagtcttaataaagcttccattatctaaaaaagtgcctcaacaactgcttaagccagatattggcttaaactaatgcaagactgtcagggctttgcccaacaatgtattttcattttaaaaataaaatatttacaagaagttaaaatacatagtggatccaaaattttacaaagtttgtaaccaatcaacaactaactntgcttcagggatctttattctgcatatatgcaaaaaaaaaaccttatttcataaattgagccgtctaagactggaaagtgggcagaaacattatgaaaaataagcccattcctctgttttcaaatatgccaagatgccatgaagaagatttctagaaaacctttttgcccaaacctcaacttgctaaggcaaccatctgcaagaaatcacgattggaattccaaataattcgcaggtgttgccaacatttggtgttgaaaagtaatgcaaattgttgatgcaacatcttacaactgaagaaaccatacgatctccgatgcctcctaggccaatcttcacagaatcgttcatcttgatctatcttctgtaccattcgtcttttgtggtcgtttctttgctcattcatcaagttatatattatagactatcagtacaacgtactgcactatttagtacaggatctgccactactacaaaactggtcttttgtggcggccaaaacacattttcgctgacggccacaggcaccgccagaaagcaaaggccagtaaagataaaacatcttcgctgacagcgaccaatcgctagagaagagatgttttcgctgtcggccagcttaagacagatgctagcgaaaattatcttcactggcggcagccatacgaggaccgctattgacaattgaattttgctggcggctgtgttaagccggccgccagcgataatcgattttgaggcaaaaaattgaaataaccacgtgcagttaccctttaactgccagcaaaaaaaaataatccacattcaaaaacattgatgcattttcaatttttaaatccacatcaagagatctaattcaattcaaatccagatttacatcaacatgtaaacatcaatttcacacaccatccaacagtccaaacatctacatcgatttctcacaacattttcaacattcaaacatcaacacatagacatcggtcatcgtcgtcgccagcgaccttggaggttgctgttgccgccatgtaacaccctgaaaattcctgataataaaaatcactaaaatttcaaactttttaaaacttttgcatcatgttggttgttatgattcctattgcttgccaaaccataaatgatcacaagaaaagaactacatttaagcaatagatatgatttacgagaatatatttaatcctacaaataattatgcacaagatattaaaatcaaataaaagaaaagttattattaacctattttatcaaatattaaaatatttgaataatgtaggtgggtgccataatatgagtacacatgaaatgatgattattcaaataaattgagctctctgtatatataatagaattatgggagtattaattcgatatgtagatcgatattacaccaagttcctaattgcatttagggattgaaatttaatatattaaacccctccatataaactaacatataaataaattgaactaatgtgctattgtgttaataacggtctcattagaaaattatagaatctttaataaaccttaaatattggacaatattaaattttgggcaaattcacatttgaacacttaatacggtcacccaaatgcttaggagtaaatacaaatttaatttacaacttttctcaatttataaatcaaccaaaaccctaaaagaagaaaaataggaaaactttgaaaaatatataataataataagaatatgttcaatattaaatttgaatataaatttcgatggaataacttagacttggtgtattttacgttgtgacaaaattagtggcaatagtatattttttctaattgcaaaataccttctaaaaacaaaaatggccggctagcactgttcattagcccccctaggtgttcgatttggttcctagccatcctagccctcttcctccgcactgccgctgccgcgtcatgtcgcgtcgccgtcgccgcgccgtctccaacccgccgcgtactgtcgccgtcgccgtcggctgcgccgcgctaagccccgtgcgccgtcgcgtcgtcatcaccgtcgcccgtgctgccgcatgttgccgtcgcccgtcgcgtcgccctcgagccccgcgcccccacaccgagtcgtgcgcgtcgcgtcgccatcacccgtcgtgtcgctctcgagccccgcacgccatcatgtcgccctcaagccccgcgcgccatcatgtcgtcctcgagccccacgcgccatcatgtcacccttgagccccgcgcgccatcatgtcgtcctcgagccccgcgcgccatcatatcgtcctcgagccccgtgcgccatccgtcgcgtcgaccattaagccacccttcccacaccctataaatatcccctcccatctcccttcttccccacaccctcttggctgccatcacaaggccccaagagcccccgagctcgtcctcccctctcagccactcctcctcccttctacacatttcatcgaacaccttgtgggcgtgctgcatcttcttctctactccacggccgcgacatcgaacttcgtcgttcctccacccctcggtaagtcctcactcctctggcctctcctagttccgtagaaactagagccccctttaatttcgccaattagcaaccgaagccgtgccggttcggccgccgttccaccgccggcgagctcgccgtggacaagccatcctggagctcctcctctccatctaactagcaaaatggaatccccatacgccgtagatgctcaagccctcaccaatttggtcggaaaccctccccatcgccctagcacctagccacacgtgcccagccatggtggccatgctgtgccactcgcccccgcgccgtcctgcgccgtggcagccggcgggagatcgccggagccttgccgcacccttccctggccgccgtcgggtcgccctcggccggccttgccgtgcgcgtcgtgtttcccctgctgctcccgctcggtcgggaggaagaaggagacggaggaaggagaagaccatccgagccactgacaggccgggccctctccttgcttttccctaagaaaattaattcagtagaaaaagaaaaggaattctgggtcccacctgttggtcactagggttatggattagattacggattaaaaaaaatcatttatgaacggtagccttttacaatttttcggatttattccaatttgaatctttaaactagcgtaacttattcgttttaactccgattcgagtgaaacttgaacctaaattcatctaaattcataagctttccaatggtatacaattaactgtttaataaaatatatttataattataaattaattaatatcaaatgattagataatagttaacctaaatagtgtgccaataaataaaaatggatattgtacagtagaataattatctttaatatgttttgtcactgtagcaaccacataaattaattataatcaatgtttgaaattaatggatatataggaaaatattagtgccatttattaatctatgtccaaatataattaaaacccatgacttattagttatttaaatagagttagccttataattattaggtaagtaaaatatagatacacatagatcggtcctaagcttgtttatggcaaataataacagagctagtgtgattaaatcacctatatgaaattaatcaacgacatatcccatataatagcatatagtaggagaggtgagcaacccttagttaaccaagcagtaaatagaaactattaaaataaatgattcaatatattaagatattatgcacacatatattgtacatcccattatagatatatggtatcgtattaatttgcttgttgcatatattaatttagagggagtatatgacaaacatgaatattagataaatactagttatacatcttgtcctcgtataattacagatcaactgtaaatttggattattcattgtaaaattatgtgatgggataatccgtaaccataatatgattaacctaaacaattctaacatacaaagcatgggtaattgttaaccttttataatttattttgacaagtgaaatatgtacataattaaaataaagcctccattaataaaataataatacaaatgattcacagtaattatttgaccgatccaaaatccatccagtaacagaacctctagtgtataaccgttctatttagatagatgcatgtgtaaccataatccttccttagccattagctagactgaaccaccatgtagatagatgcatgtgtaaccataatccttccttagccattagctagactgaaccaccatgacaacagaaagactaagaaaccttagctcttagcttgattagagtccattagcaagcgcgaataatatgagcaaccttaggttcgaccttagcaaatatattttgtttgtgcatatttgattgttgcttgaatattggtttttctcgcgtatttatagactttgtgtatcggttagtcgtgaggcaacgtctgcaacttccaggaggtgaaggttaatcaagattatatcgagaatagggattatcctgagcaggcaagtcatcaccattccttgaacatgttgatcccaattgcgaaattgttttgtttacaaataaaattgtatgcaatgatgaacatcctacttgtgattatgccatgccttgattattgtttacccttaaaatccttgtaaccatgattacgtatgagtccctagtcaattatgacaattgcttagaaatgccattctagaatcatgcatactcatatttatcaaatgctatatgcttgggcaattacctttgggaaggcaattgagatgcggcatgtggagacatgagcgccacattgccatgatgttgatgacatgatttttgaaaggagaaataaaattaaacaattgttttcgactggggcggacggaggatttgggtggtatctgggaaaggctagtaccgtccccggtcaattaaggaccgagccatgaagttaagcatgaaacgacccccgtacaaccgtacttctcgaatgggtatagacctagcggattagatagccgagcggaggcagtatccctacatagatggttcacccctgagtgatgcaggtgcgctacgatgggacagccgttgaggtaaggccgagaggcgtgccctacatcggtgtcgccattggtaggactgccatgagtgtgtgagagagagaacttaacttgaaccataatttaatatgtgtgagacttctctttcccgggagtgccagaactcctcacactgctagaaacatggactcctagagtgcatgaggatttaagttcatggagcaggtactgccaatgcgaggttatcgaaaagctttgccgtgacgcgtctcatgtgttgggacgaggctcatgtgttgggcagtcgcggagcgcgggtaaagtgtacatccactgcagtgtgagtaaaccaaatctattcgaatagccgtgctcgcagttattgagcaccgggacatgtattacacttggctagactctaaattcttaacctgtgtgggataggatattgcatgatgatttttatgctgatggagccacttcctgagaggagggaaggtggacgtcctcagaaaaccatgacgactcaatggcgggaagctatccttgggatcacaatggatggtggacagaaccgtcgttgtttaatgtgaacactggtattaaaacttgatcaatctatgctaggtctcatgcttgtgaaaagatttgcaaaagcttgctttacgcaaaagaacctggagcccttccttgaaataccctctatcatatgcattgttgttgtggtggcttgctgagtacggttggtactcacccttgctatttatatatcttttaggagagtgttgaagagaagcccttgtcgatacgcttgcgtatccaacaagatgatcggagtgcggtcttgttctaggtctcgttccccagtcgactgcctgtggcatgttaaccgggcccttatattattttgtcttccgctgttgttctctgatagttgttggcctacctggccctaacgtaagtatttaactcttttagcctgaattcattcatgatatgttgtgatccaactatgtatgtgtgtaccaactactgatccagggattggtacagataaacacagaagatttccgatttccaaaatcgggggtctacacgccaacgaagccatcccctcggctactgctgccgccgtgtccctatggccagatcggggagagggaggggaggggagggagggcgtcaccggtctccaaccatcgcgccactggatccgtcccccgtcaccatcaccgccgccgccttgaggctggaggaagccactgtcgcctagaggggaggagaaggcaatcgcacctagatctgagagagggaggggagggagggcagggtcaccgcggccctccgacggctagatccaccgctcgcgcccctcccgctgccggatccgccgcctgcggccctgcgacggtcagatccaccgtgcctgcacccgcacccgtgcccctcccggccgaggatcacggcacccctcctggcccctcctggtagccgtcgtcactatcgctagtccgccgtgttttccaacactgaggaaaggctggagaagaagaggaggagatggaatgggagaggaggggataaggaatgggaagggataaaattagtggagattttaatatagagaatattttttcgtagtcggtgctcgttagctaccaccagcaaaaaaataatttttcgctggcggttgtttaagtgggccgctagcaaaaatagctatattttctctggaggtctacgtaacccacccgccagtgaaaattgattttcgctggcggtttttagccccttacccctcgttacaatttcacaggcgggatacacaaaaaaccgccagcgaagaaaatatggtaccgccatgaaaaatctattttgcagtagtctgctgatcttgaagactgtcacgcctctggagaagaagaaactggttgctagaatcataccaagaacaaaaatattttcactgaaacatttgaggtaaataaaaaattaatggcctttgattttttactgctctttctttagcagggtgcgtgaggtgtgttttggttgtgtgcactttgttgtgcggagcccatgagtgttctcagaattttgagattagtaaagcttccattactaaaaataagataaaataaataaataattagtgtctctctgcggcctttaactctcctatcccttgcacccctggtgaatatacctgggtgagttttgcaatgtcagataatacatgaacgatccagattgatgtatatccctacccctgaatgcatgctggtgtccagtgcaaaagctgctcatctttactcccctgaagcagcatggggaaaatatcctttacacctaggtaccatggtagtatgcatgcggtttaaatagttatataaaatttcatacaattttgacgacattatgagaatataaaacagtatgcaaatatgcaagtccaggtagcgtgaaaccaaatggcccagtacagcacctgcggcaagccatgttccttgctgcacaggcttcctccagggctcccccatcgactcggcagatcgaattcaacagggactttctgaagcttgtcgaattcaaattgcagccactgaaggatgcaactgttagtgactaccacacatccaccacgcagtgccgtttttgccagattttggctcaatgactagctgaggcacaacaacttccatttaaagcattcatacatttcctgattcctcctaggccaagctgctgtctgcactgaagtggcttctagctccttgagagttgagacgacattgttcatctagatctctctaccgttagcattatatttctttgtgctgcataggttgctcatggatagatgcgtatgtagactaggaggatatatttatatatgatttgatgtttggcataaggaagatgcgttagccatctattcaaccaagccatctcagtgaaggatctataatatttatggtgtgatctgtttaactgttttgcaaagtcacaaaaaagatgacccgaagaaaatggagggagcatcctggtgttgtattggagaggatgcagatgtgagttctcaaaaaagaaaagatcagatgtgctaacatttaatttcactcggttattagttcagtacatacatacagtcattattttgttcaatcaagcaactagcaggctacaactgaaaaattaatgttgaccaagtaggatcagccagatacttgctggatgttcatctgttgaaacgggcaagcaaattttcacaagatactagctgaataatgtcgttttgtcacaagataactcgtggacgcgtagctgaagctgatgtagatgtagcaaattttcgagatgagcaaccagagtagaagctttgctactaaaacttgcatgagcaggatcatcatgtcaatttttgctaccaaagaactaatttcctatgaactgaacctatgtataccatatgaactagcactcaacatggccccatctgtactccaaaggtgtagagttcgcgtgtgtgctttgagctcctatatatcatgctaccaaatgagtgtattattgtcttctttgcatggaaaataaaaggggaaacggaaagagagaaaatttcacaaaactatatgttttggggttcaagttgtagaaaaccacacacattttttatatgtgtccatcaaaagtaaatgaagagagtatttagggtgtggacatggcatcgtgattgttccacctaggataaagctcccaagtctacatcctaggtggaacagccatatcatctcgccggtggccatgtttgttgacagtgtagttttatgaaattttttaatccaaaatatatgtagttaagtgtgcccaagtgttaaagtgtgtgtggtacaaataaagcagtgttagggcctacttgctccctgcatttgtattcgttgagttgatctcggtcgaatgctccgatcaaggtctttataatcactcgtcctgaagctgctaatcagctggtcaccattttcgtaatcattagcttcataatcaccacatgtccactattgggtggaaccaataaggcataccaagcttagttcaaaatgccaaaacaataagaggatccaagtaggagacattgcagttagctgatcaccattttaggttaaatttgaaggataaattttctcctcacaatataatgtatacataacaggtggtctgcaggttgcagctcaacagattgatgatgaagtaccaatcaggatcagtaaacttttctctgatttcgcctgattaattatgcgggtgatcagaaagtaaatgacatacaactcctatcttccagtggttcagaacatctctactgcaatgaacatgctgtcaatatgcagttgaaggtgcaaaagaacaccacgaaatgaaaagagatagccatttgcatatccccgtggtccattcttctaatatatttttgcgaacgcacaaaagagttgcacaccaatatattcttgtaatatattgacgtgcaatccttttgcgcgttcgcgaaaatatccccgtagtccatgggctcatgacatgaaaactcccgaatcctgatgcctcccaggacaaccatagaaacccattgctgtgacctttgcctccatgaaaggattatctcagtctctctgaacaaaatatgttcatttctcagtttgggagtctttactcactgttaaaaaaaaggaatccttgctctttatctgcctgtaatagaatgttttttccaactgatggatgtgaggcttattcatatcttaaattatgtccatcaccctttaagacagataaataatttactacctgtatcaccatcactgcgggatctgcccttggatgtgtgacttcttcatatcttaaaaattttgttcggctttggaacattagtaggttcaatatgtgtttaattacattcctattactgctagtcagttgaaatgatcagtatgaccaaagctatgcaaaattttgaatcctgtgatgggttaacatcgctttgtaagcaatgcgagatcgcagtggtggtcttcaagaaagcacttggtgaagaacaatttgctcgaatctgacaagcttgctttcatttttgttcgatgtcatctgtacaattgaatttggtgtggtttggtgtgaaatctgaatgaggcaactatggtgcgatctgtttgtcaaattcagaaataaattagcccgaatggaattgaagtgaacacccttctgatgcatgtcttggagatgcatatgcttaaacaaaatgtctccttaaacctagtacaaccatccacccaagtcactgaaagttttagtctgtgatcaaatgtaatactaatatctactccctccgttttacaatgtaagtcattttagcatttcccacattcgtatagatgttaatgaatctagacatatatatgtctaaattcattaacatcaatatgtatgtgggaaatgctagaatgacttacattatgaaacggaggaagtaaatccaagcaatttattacttcagtatgtgaagtcattcttgtgttcacttgggaactagtagcaggcaaggcaaggccaggcgtgcaacagaatgagagtagttattattattattattattattattattattattattattattattattattattattattattattattattattattattattattattattgaaaagaggagagtttatattgttgttgcactacatcaagcacattgattttcaaacaaaaatcttatacacaacacatttagcactagattggaccgaggtctcgtatcatcccattgtgccaaactgaaagagagctcgaactacatacatggatggagcagcgcaaaacctatagcctagcagagcacctgtggaaagccatgcccatgaggccacctgtggtggcaatgctatccaagtcgcacacagccgccatttccgagcttggaactcgacagcttcttcgagggctccattccgctaccgtcgactcgatcgctggatccaactcaacatggagatttgcagccactgcaggatgcagctggtagtgaccatcacacttcaactatgatcatatcaagtggtttaaaccattgtttggctcaaagcaggagaatattctggggtgccacatcttctctttgaagtgttcatacatttcccgatgcctcctacgccaagctgctggctgtagtgatggcatctggttcgctgaagcattaatttgtttaacttgatctctctactggtagcattttgtaacaagataactccttactcctagccgtggctgtagtaaagtttcgagatagagtgacttgagaagatactaacagatactacacattttatagcgtaaaattttgtacctctcggtactacaataaggtttccactaaaaattttgatatctctcagaaactgtaaaatttgtcttagagataagcaacgagagcataggctttgctagctacctaaacttgcattagcacgaccatcatgtcaattagaattcatcagcaaacactaatttcctaggaagtgatctccatcgactcttctttcgtttctcagcttatgttcatttatctcatttgtatggagcaaaaaagtgttccaccaatttaatgaatacactgtggcactgcttggtggtagcaacaggaggggttactattttggaacacaaacaccataaaacttctctgattctaaaatgtacgagaaatttctgaaccaaataataacccctagttgatgggcaatttatgaacaaattaataaggcaaaaagagaagcatgctactaaatcactggattgcaaaggattttattacaagtacacttgtaagcatagtaccagataataattgatatactctcaagcttaggtcacaaccaaaacgcatacatcttcaagctgcttagaccatgcaaaaaaaggttacaacctccacatggagatcatttcttcttcggcatggagttcagggtagcaaccaaacatgcccctggcccgccgtagacattgtttgtcattgtcccaggtagaaaatgtcctaatgcttcccatacttacctaacataccatatgaactagtactcaacatggccagccccctctatataccttgctaccaaatgaagtatgcgttgtcttcctttcatggaaaataaaaacgggaaagaagaaacaacaaatggagcaatataatctgactacatgcatttagcatgctcaacgttgaacttcgctttatgatcagaaagagcaaatgatcaagcatgcatgctgaatgaacacaaaaaagttagttaatttgtatatatgtaatactttttttcctgaaaagaatatatgatatatggttattcttcttctacatacgtactgatctttttttttgcgaggacatatgtactgatctagtatccatatttttcatcagcttatgtattaatatagagaaaattcgatccatagcacacaaaaaaagccggtaccaaaaaatagcacaaaattttcctctttccatcagaagcacatgccactattttttcttcgatatcacattttccatccaagtccatcggttagccatgattaggagcgtgaaaagacaaatttgccctttattccaaaccttagtttggacggtgagggcgactggatgtaggcgaggcggtggggtggtcgacagcgatggccctcccatcccatggcctcagcccccatccccaagctcattcggcgttgttgccactgctctccaagctccgcctccaccatccccatcactgagctcgttcgtcgcctcctcccccaacgcataaggacatgtactgcttgattcaaatattgttaactatgccagggtcttcaaacattcgtgttcgttgtgtttgtgcacacaccattagggcctaagacccttaatatctaaaaataagtaagtatgaagccttaaggcctctttataattaacttcagttattaatgacccagtggttggaggaattttgcaaaagatatcttataccgatggatataatcacttatgagtgatctagactcaaataatcaggtatactactctggtaacagcccatctacctcaaccctagacataggattcctttgcggccatctgatagctttacatcgatgattgctgagtttccgtgacaccagtttttgagatgagtagcaaaagaactcccaattcctcaaaggcctatatatgacagcaaattagcaatccactggcctagtccacttaacaatctctttcatttctctgtcagcttgagggcttgaggccaacaatagctacccattgccatggcctttgcctccatgaaaggcttctctctctgtctctctgaagaaaatatgctcatttctaagatagggagtctctggctctctgctccccttcatctgcttgtttaggtttctctcctctatctgcatgcatgtatattgatatggtgcaattatcgaacactgtcattccacttcaaagcagagcctacaactggaaaagaagcggcttcagttcagtctcaaggttctggcaaggataagttgatggctatgcctctttgtaccttaattcagagccatccctatcaatcaatgatgaaatcaacggctcaggtctagcaaacaaaaaaaaaagcatcacatataagtcaaactatgtgggagtgatatgtacagtgaaagtaaacaaaatggattgttattcttgttcctcttgtggtgtcaagtatttagcatctgatgaatgaaacttccggcttcacatactcaatcaaaagaaaaacaagtgcactgaacaacatgtatctgtattccatttttttattgacgatggctaagtgaagtttgaatttggtgattgtcggtgttatagataaggtatacccaatagtcttgggtagggttcggcagggcccacaatataccatgttttatatagaatcatgcctcatatacgaaagatgttttggataaggaaggaaaagcagagttctattcaggcactaagaactactcggatcatatccatacttgtctccctaattccacttatccgagggtataaatacatgaccccttagaaggaggggggacacccctcttacccctccgccgcccccgccaccactggtgttcgccttccccgccaaaggaagaagatggtggcagcgccgtcatcggcatggcaggatctccccaccgacctgctggtcctcgtgctgctccgcttcccgtccctcaccgaccgggcccgcctccgcacggtgtgccgttcctggcgtgccggcggccacccgctgcttcctatcttaagccgccatcatattgcagggagacgccatttctgtctcctattgcaatcaacagaaaggaatcgtcgtcatcagctcatttacagacaggaaaaagaactcaaccatggatgtatctgatatcgccttcttccgagggaagctatacactctcagtagagagcagaagggcttgcttgatgttcttgatctctcgatgacgaaaaaaatgtcatcatcaagatgttatcagtattcagtgcatcatccatgatgatcctaaacagccggtaatgtatcgttttttaggactgatcatcagtatgtgttgagtccaatggcacctaaggtcttcgaggcatggagctgtggcgcagtttctgacttggttcttcccggctgatgtgtaattgcagcttaaaatgttgtttggttttgggacattactacgttcaatatgtgtatttaccttcatatcactgctaatcagttatgcaaaactgggaatcctgaacattgttgtgtaattaagctatacaaaataggtcgtcttcaggtcagtagttgatgaagaacaactggctgaatttatgttatgtggtttgctcttcatttataaaaaaaaaatcgaatgagcaacttgctgatgtcttggacaagatggagatgcagatgctaaaacaatgtctccataagcctactgaagtcatccatccaagtcactcaagttttaagtttgtgatcagatacattttaagtttgttatcagatatacattaatttcacgcaattatcaattaattgcatccagtctattgtgctctaatcgggcaatgcaacacgaaaatggtgagctgggtagagcagctgcggcaagacacaaggccgcccagttattcctggcaatgtcatccctgctgcaagcagccactatcattgatcatggtgctcgatggcttccttcctggctccacagccatcgactcaggggatccaactcaacagggattcccactcgcttgttttccacgatttgcagccactgcaggatgcaaatgtcagtgaacatcaaacacccaccatgtctgaccaatttaagccagattttagctcatattaaggcgaaacagtgaggtaaaatcggcttaccattgaagaaatcagagggtttccgatgcctcctagcccaaacattggtaactgataagtgttcatgccttcgttgcacagtagagggcacatgatacaagcaaagctttgctgctggtagcatctgcagtggttggacatgacagaaactggcctgttgcttctaatctaataatgataagaacgaacgaacatggagcagacatcagtcaaatgtgcagttataagctagttcaatacatgaaatcattatcgtgttcaattggacatttgcgcaacaagcgggctacaactgaatgttagctatatataggttcaagtcatgaacttattgagtaaaagggcatgtagcctagtggttgcagtaacctgagtagcaccccaagatcctgagttcaattctccaaaggagcgaatttcaattgggttatttgagagctaagttccctgttcgataggctaagttcctaatttaaaaaggctgcatgtatccggttggatgtagaggctgggtaaaaatacccttctctaaaaaaatgaacttgttcatcagttcaaactgaatgggagttgcattaattgtcgttatattacatcgagaatcaaaatttccaacaggttagtatacgtacagcattgacctccaaactcattaaaaaaaggcaaatgtcatccatgagtttgtaaatcataattatttacaggtctattactccatttttatacattcatcatccacgaagagaaaaataatggtgagtcgatcaggatttaagaagagcatccttcccctcgaccatgggcctcctcccccttgatgatagtgggggtgttggcattggctcgttgtcctagaccgcgccgatgcagatctagtccacggacacggccgagctgcagcggcagatccagatccagtccaccatcttcaaagaggttagtcgtcaagttcaggtgaacaaatttttggtgtcatctctagattggaaaaaagtttgttgctgttagatgtgtgtctgcaatattgacaaggggttgtgttcaaattgttgtgtataaatgtctgtgtacaaaaattgatgtgtaatttgggtttgattctggattgatgtggatcgagtggcttcctttttttttactgatgagatcctaagagtgatggttttttatccagcactgatgagccatagaatgccggcacaaaaggctggttccgactgacaccaatggcttgttctgtactagtgagaccccctttgttcattggcagttgcgtgaggctgccattgacatgctccgacctcgacggctttctccatatggctccatctctattgactcgacggattcaagtcgacagggattatctcgcacttgttttctgcgatttgcggccactgcaggatgcaagggttaatgaacatcacacatccacatccaccttgtttaatcaatttaatccagattttgactgaaactaaggcgaaatgatgaggcaacatcatcttatctttgtcaaatgtttatgatgcgggtaattttaccatccttgagaagatatctagaggtaccatattttctcctccagataccaaaatttggtacctctagatactaagtatcttaaggcactaaaaattctcgtgtaaaattttggtacctcaagctaccttttaaaggattgtaaaattcctcttatgatgctgcctaggccgcctaggccaaccattgcaagctgctgggtgcagcggcctcctccagctccctaatcatttgatactgaagggcagtgaactgcctcttctctttttgtgtcagttcacttcagtgcgccacaaattacatacaggttcgcatttgcgaaaatattgtgtcatccctcagctatacatgtggcatcttgcatgatatagagataaagaaaatctatccagccggtattactgaattccagagcagtcaccacatgctgggctccagcgactgtgccgccgaatgctttcgctcgccgcggtttgccgcttggtggcactggcttggcagtcagcacctacacgactacatcctctgacatgagaagtcctgatgcctcctaggccaaacgccactttcaaaatcttgaagacgatatgtcatgtagaatacttgtgaaattcccggcgaagaactgcaaggagttgcctttctcatcatgctattttcctttgtggcttcgtctcgtattgtgtatgtggagcagaagggataggttcatatatatagatgcattgtctgatggcagcaatttaagatgtgggatggacaattcagaatatatgtgaaatatccgtgtcaaattttaaccccatagcttgatttttgttggtaggtcagatcagtttgtctcttcaattgttcaactcaatgcagcgagttatcgaccatgccagctataccacttgacttgacgagttaatttcgaacatatagcttggcaaagaataattaacaccggtaccgaggtttgcaatttcgatcataattattaggagtagctcatatcaagttcataactacttacatgtttttttatggggagtgaaatactcctataacacctatacgtgttcttagtaactgaatcgaaaagaacaacaaatatttataccatgttgaaacacgaattagtagtagaaagcaaaatcaagaaacaaattttgtcgaccagccaccatggttgtactataccagttgcccaagggagggtcgtggtggcatgtctggtcactgttgagaggttcttggtgatgcctgcctgacaatttcaacaggtgacatgcaagctcctgatgcctcctagcccaacacccatagccaccatctacatggctggagtggcttctgttccatgaaacattggttgcaccattgttatgtcaattgaatatgtatccttcagtcctttctcagcttgtgcaactgcatctcatatttatagagcaaaagggtgtaccactacgtacattactaatggatgcacatcgcagtctagtggtacagaacggagtgtggttgtttctgaaaatgtatgacaaatttctgttacttcaattcttcaattcaaagtagaaagtcagtggccacgcgaaccactcatgattttaaattgcagaattttgttacatcatttcagaaacaaacaattactggaatccataagttcattattagttggttgattcgatcacaaaaaggcggcgtggattgatcaaaatctgtggctgctagccaactcggagctcaagaagactgcgcatctccttcatgcatagggtatatgacaatatccagctagcatttgcttctgtgcacatgccgatcatctccatgattctggactgtacaacatgtgagatggggtaatcaaaccattgctgcctgagtctgtgatgaaagagctgcggcacaagcgccactttctgacttggttcttcccggctgatgtataaattcttcgtagcttaaaactgctgtttgctttcggaacatcagtatgttcagttatgcatttaccttcttactccttctaatctgttgaaacgatcagcacaaccaaactgtgctaaatttagaatcctttaatggcagagcaatttctttgcaagctatgcaaaattggctgtcttaaggacaacagttaatgaacaaaaatttgcaactgtgctttcgtttttatttgatattaactggcaaaatttatgtggtttggcctgaaatctgaatatggtgtgatctgtttggcaaattcagaaacaagatggcctgaataaaattgaagtgaacatgctgctgatgtcttggagaagattcagatgctaagacaatgttgccttaggcctagtacagccatccaaccaagtcaatgagagttttagtttgtgatcagatgtaccactaatttctaattccaagcaattatagttcagtacatgcagtcattcttgtgttcaatggagaactagcaagctacaacttaatgtgggtcaaataggtacccaggtccctaatttcttcagcaattctaatcagcaacaacgcaatggcaaggcttacaactgaacgaaagttgcattgttgtttcactgcattgttgtcgtacaacatgtattgctgctggtggcattgcagaaattgaacatggcctgaacatccgcagatagcagccaagggggtcagagattaaaacgctggcgccaattgccattcaatttagaacaatcagttggacatggtctgaacaattagtttcattttagctagctgctatcagtagcagtggcctccactaccaacaatcggctaggatctggcaagttagagtcctttcatgttgttggtatttactgggtaaatctatgagttaattttgtctgaaatctgaatttggcatcgggggtcaactttcaaagacttgtttcagtccaaatgataatagcagggtgtgattttttagactggcagcaatggcatggtttatttcagaaaattcagaaaataaggtggccttagaagaacaattgagtgaacatcttgctgtgtaccagggaagacgcagatgatcccataagcatactttatacaatgcgataccgggcagttatttgttcactacatgcaaactttattagttcagtgactgaattgtctagcaggttggcgtacaacattcaggattcaggaagagaagatattcggaagaggatttgagctgaagaagcaggacgtagatatccaactgagtagagcagttgcaccaagccatggcgtccgagtggatcattggcagtgcttccatccttgttgcacgaggctgccattgacaagctccgagctcgatggcttcctctctgcctccgctaccattgactccacggttttatggactgtctcacgcttactttctgctattccaacgcactgcaggatgcaaactgttagtgagtgcacatccaccatgtttaacaaacttaagtcagattttggctgaaactaaggcgaaagtgatcgaggcaacataagtttaccttcaaagatttcaaaggatttctgatgcctcctaggccaaccattgcaagctgctggggtgcagttgcctttgtctccctgaaggactgaaccaatgttcatcttcatcactatcctatagcctatagcatttattgtgctccttcattcactcatgggtttacatatggatagcctagaatggatatatatgatgtgaatgagtcatgacataaagcaatcaagtgaagtgcattgaattgttttgttctctttgggtgtcaggctttcaacaatgcaagccatcaagttctcactccgtctaaaataagtacagtgtattgtgttcttcaatagaggatctgctgatctggaagactgttacatctctttttttttagaaaatggattaaaatccggcctctacatccacaatggatgtatacagcctaaagtcatacaagagtacttagacccgaattccttacaataaaagagtaccaaagtgacaacacttaaaagagaaaagagaaacacaagactacaacaatcttcttttaaggttccacccatattttgcatacaactccatgacccttgcctccaaaatcttgcaacattctttcaatttgtggtcatcctctttcttaagcaacaaagtctattgaagcacccaataagtcctcttgaagatcagatgtaaaaaagaattagttttggagccggacactggttgctagcatcagaaccaaaatagcaatcgtgtccactgtgatttgagagaagaacgggagataagaattcccggtgcctcctaggcctaccacacccatggtaagcggttaagtgcagcagacactgaatttgttttactctatatatgattatagtcctacaccttttgatagttcatatgatttctgatgccgcagccagaagcattttttgtgctccgttattcgctcatggatttacatctatatacatagactataagggatacatattatgtgatacctgacataaggcagtcatttaacactgccagtacaagtgaagggcagtgaactgttttttccccctctttgttgatcaggttgttagtcaaaatgcaacctagcaagttcaccttccatctagagaagtgcagcataatgtattgtttagaaactgattacatcataccatcaaaaccaaaatagtagtcatccgctgagtactgaaacattggaagaaattgaagcatcatagataccggcacctcccaggcctaccaggcaaacccattgtgaatagccattgaatttacctttcatccactatgccaaacgaaaaaaaattgttctagcaactcatttctctcatggttacttcctctgatctttcatcgagcaaaagaacaataggcctgtactgtagttattccactgagagatctcaagatgcagtatagccatccgacggagatagtcaaactatcaaacaaagcgcagatcaaaataggtgatagttttgaaaacacggtaagatcgaacttagagaggcaagaacttgaattcctggactggacaaacaagtgaaatctcggtacctcccaagcctaccatagccacgcagcaaataagctgaatttcgagtttggcatccatcaaaaacctgaattccctgtggttcattctcctgtgtctctcagctttagctactactcaccctcttgttatctcttttatatatgggctggattgggagagcttgtatatcatatatgtcgacaaccaaatgtactatctgattccatgcaataattattgattcagcacttgcagctagtcatgttcagtacatcaggccaccaccaaaatagtgctgccgtgatgcaaggggagccgcataagtctgatcactgatcagtttgggcacttcaattgttcatcagttcaagcagcaagtgaaactgtatccttgctaccactcaatgggaatcatgcattccgatgataaattgcaagtcttagaacagaatagcttggaaaacaacaaacagttaacacaaagggaggatcaaatgccaccaattgctgtgcggtgctgcatgtatccacattgctatgtcagcaaatctcaccagagttgtcgctttaaggatcgtattggcattagcattgtcgagatggaacagatgtggaatgttactgcgactacatggtgccattgcatgcttcggttcgccatggagaaagctcttcgtgatgccgttgccagttcgacacagtcgtttcgtgacatgaaaactcctgatgcctcctagtccgacagccatagcaacccagcagcatggctggttggagtggccactgctccatgttcctcgaagagctactcgtgtcagctactccatgttaacttgcaagaacttgatgatgcgcaccatgaactcttgttcatgatgatctctattaattcttgctagctaacatgagaagcgagaaatacaagcaaggttttgtgcaatctatttctcgcgcacgcatcacttttgccacctcatctggccttcttatggagcagaaaatatatagcacggcatcatgaatgaatttacaatctgaatatctctgaagcagtctgattttttatcaaatgcaggaaaaagaagaaggggtgcacatgaatcaatgcagcacatgaaccaatccacaccacagacttggagatatgtccaatcagtttgtagactgcgactatggcgtcgtacgttgtatgatgcggtcaccattgccgccggtgatccctgatcacacggcgccctggaacgaaactctcagggaaatcacgaactcacacagatgcacaatgaaaagacgaggtgaaaactggcccatctagtaaaacatactcgaatgaaaaactctgaaaaatgagaaccagacgcgctccaggaaactgaaactctgaagggcagcacaggtttacaacatagaaactaatagccatgcatgccgcgatgatcctagtgatgccacacattcacttcatgacatgacaactcttgatgcctcccagtccaacagccagagcaacccagcaccatggctggttaattggagtggccactgccccatgttcatcgaaaagcaactcgtctcagaaacattattgccgctacaacttgcaagaacttcacggtgttcatgatctctctcaaaacaagaagcgggatacataaggttttctctctaatctcacttttggcaactgatctccttctgtatggagcagcgtgttgaatagtcctacattggttgtggaagggcaagggacctagctaatatataagtgggagggcacgggacctagctaatatttttggtaattggctaaggggagcctagatccattaaaaaaattgattttgtttgtaactagcaccttgtgttggtccatttggcattgccgcaatgatatagtttttgataaccaaaaattgtctaaccccatgcaggttgtcttcatgtcttccagttgactccattcttggtccttgatgctttcataggaggagtagaatattttgcgcagtgaagctacactcttgaaatcgatagccatgggacttttgttcacatgcatgtaaaaggaaggtgtaggtggagtcactgtgcaatcttctttgctccataaaaggatcatcagaagtaccaaaagtgactatggaagctttgatgttacaatatcacctctaggaaattccttaattaatgaccattcctcaagaatttcagtggatatatatgatatatggttgtgcaagtttcggtagcaaagtttcttgatggacagtgtttcatggagaagaggccaatccatccattgaactagttgctatggctattggcctaggaggcatcaggaactcctgtatctcatgataaattcatcagccagaatcaccaagatcctccacacatggccactgaaattctcttcatctggccaaagagcaacacaatgcacatggagacccaggaggctgtccaccaagccacagccccaaacctttactacgacaggagcttgacatgccgatgcatcctcgtcgtggtcgtgctgctctccggaggttgtgtggcagtggtagtctatcgtgattgcaaagttcttttcttttgaatgaatcgggaagccgccaatttcatagaatagagaatgagtaaacagtacataaccaggagaaatgaatgaatgtacaagcttagggcctttggaccaagctaactatatatagagtgagccagttgccgaggtttttcgcaattgcaaagttcaactcatcgaaaatgacaagtactgttaagttctagagtaattttaccatccaatatttggtaacttgaggtaccacattttgcacacaaagttctgataccttgagatactaagcaccttgaggtaccacattttgcactagaggtgccaaattttacactataaagtacctcgagataacgaatatttgtggtacctcaaggaaccaaatgttggatggtcaaattaatcttttagagcaattttacactatatatagagattttctccggtccaataaaaagtatctcgtgttaccggtagcaaatcgtttcccatcgttggatctaacaatgcccattctgcgcagttagattcaatgatcagaaacgaattggtaccgtgaggtaccggtaccttgaggtaatttttgctggtcggaagcaaatctctatgtataaatcttacacttcgatcactcccactatatatgtttgtggatattgatatattagaatgttaggcagctcactctctggaaagtgtgaacatgacttatatatctcaagtttttttacaggtaactgcagcattgacctgaatttacttttatgaaatgatatctcaccaaaccagatcatatatactaagtagtaagaaatggcacatgctgaggggggagatgaacaacgtatcacacaaccagagaaaagtttttggtttaagccacatacccaaatctttttaagaacagaaaagcatacaacaaaaaggtgaaagcaggtcctgccagtgtgttggcttaggagacacttctctgtctggctgcactgaatttgatccttagctagtgcagccattgaactagtccaaagtcagaagatcaagcctgaaacagtgagatcataaggaggccccgctcgatgacattgatggccatagattccagtgatcatcaatgtcaacctcgtgcaggaagcatgccagtacgttatggcacaacgaacacagcactgcttgtagttgttgtagcaacggcagtggcattcttgtggcgtatgttttttaggtggtttatatatggtggtagaattttattatcaatagtatcatgagtagaagtgattaagaaatttgatttatcagttctcctatcaacagaaaaaacatattctactatgaaaggtctagattagttgtactatcaagaaagaccatttaaaaattgtaactgaaaattcttatgagaaaattgccgcccgtttgtttcacaacggctgacttgtccgcttaatcttggtccaacagtatgaaattaaatgactgtcatccaattggctcaggggatatggaggctaatggacactataattccactccaaagaggattcctctgcaaaatgctactttgttcatactttgaacaattcacggtcagtcatttaggatcataaccgacgtagcgcgatgcacatgaaaagtgtaggatcgtaaagggcctttcccacccaaaagctagccaataaggtgaggggctcctccacttatatattaggtatcttgttctttcacaaccactgtaggactattcaacaatctcctctttcacatattggtgtccctcagccattcaccgctccttcaccgtatccccactgtcgctcaggtatacaggccccgcactacacaggcacagatggtccttcaggcttacacacattgttcctcgagtcagagatgttgaactagccaagctctgataccaattgtaggatcgtaaagaacttttcccaccccaaaagctagccaatgaagtgagggattattcaacacgctactcttccacaaccaatgtagtactattaaacacgctgctcaataccaatgtaggacaattcaaggatggttttttttaacatccttgttgtttggaatcctttattagagcattttggtttaaacttgttacttatgttacatgtatactagctgatttgcccgtgtgttgccatggagtcttaaaaaaaatctttggcattcattttaaagcctaaaaatatttagctctccaatcattttttgtcataaatattttcgattcttacctagttagccagagtcatgagacatagagctatgtttctttgacatacacattgtgagcccacacatcagtaagaggatggtgatggtagatttactgcagccaccactattaatatttaaagtagtatagattaagcttcactgttttttttttgttttgctcttttttttgttccttctgtttttcaaagcccttcttcaaagtggttgctaatccttaggcctgaggtgtcgagttcatgtcagggcaatctgattttctgtttgtatgggatgtcacattatgtgatggatcgtgacgcgtgcatatctatcagcctcaatggtcaagctctgtttttcattcatattaatgcaggaaagaaagctagagagcagccttgtcgacaaagtttgcatcaccaaaaattccattggttatcatcttcaatcaagttagatcatttgatcctgccaacatatataagatcgtcaaatcaccatggctcacctcatgtccagaagtttagacataggtttaccattacagatttgatttttctggatgacacctcctttttttagatgaaaggcattgcgcccagcttttactaaaaagcataagagtggatgacacctcctttatgttgcaggtgggtcattgttgctctcgcctgattggttcatgggccacatacgaaaatcaattttcacagacagacctcttaacccatagcttgttttttattggtaggtgatcagtctgtcatttcgattcttcagttcaaaaagcagcgagttaacgcccaggtaatcctgactagaggttatcctgatattaagtttcaggttttcgaacacatagcttggcaaagaataattaacaccagtaccgaggtcttcaaattttgagcataacatattcacagtaaactcacacatcataagttcgtaactagttacaggtttttgtctggggagtgaaatgcttccataagacctatatgtgtttcctggtaagaaatttacactaggttgataggagaatcagtagaataaaaagcaatcaagaaactaatgtgttgacgcacactcatacgaccagctgcgatctctttgctgtgcagaggttgcctattggcccatttgaactggtgacatgcatgttcctgatgcctcctaggccaacatccatagccaccatctacatggctggagtggcctccatgaaacattgctgaacatttcgattcttcagttcaaagcagcaaatcaatggccacgcgaactactcaaaattttaaattgccagaatttcgggcatattagttcagaaaaaacaataattggcacccataagttcaatattagttgggtggtgcagattgatcaaatgggtatatgactagagcgccgttctatatatagagagaacatcttgtaagcagaaatatcagtttcacccacctgagaaatgtatcgctgttattgattgcaatcctactggtagctgcactgctgggctccattcactttataggatttcaagtctgggtattcactcgataattaattaatttacatattaaatccatcacaagaatacaagatgatatttagtaagagttcactcaccccctaaactatgatttccccagtccccagctggtcgtgttgtggcaggcgacactgatgcatgtaatatatctccatatatcaaattattttagaaattttgggtattcacaagaaggcaggcctcattgtgattgatgtgcctacggtaatgagtatcgcgggacgaatgactgtgttatatacaccatgcatcatctcactgggatcaccttgacttgcaatggctgaaccggctagagatctcctgaaactcttctgtttcaccaaatttgagcaaaattgcaatggatccaaaataaccagaagattattgtggctttgatctcagcgacagcagcttgaatcgttggacaaagtgacatgagagctcctgatgcctcctagaccaaaaattactcatagcaacacataggctgtttgtggagacctggagtttactctacctccatgaaatacgtgttaatatatctccctgtgtgtgcgtgcgcacgcatgtatgttggtgttctattgggtctatataatatttgatttgatgcaatcatttaatacaagtaaattccaattcaatgcaacactaacatctgaaagcctggagatatatgtcatgttcatcctaataaaattcagaaaaaacagacacagtgggctacctaatattcttagtaattgaatcctgatgaaggagatttatgccagactgattgaatagcagaaacaaaaatcagtgactgtgcacatgtcagtgaaatacagcctcctacggagttcttttcatatgcatcacctacgttggttatgatcctacatgaccgtgaattgatcaaagtatgaacatagtagcatttttcagaggaatcggcctctttggagtggaattatagtgtccattagcctccacaccccatgagcagattggatgacagtcatttcatactgttggaccaagattaagcgggacaagtcagctgttgtgaaacaaacaggcgccaattttttcataagagaccttatagtagaattaatctaaaccttttgtcttctttcatccattaaattattactagctaccgatagtagaacgatttttttgttggtaacagaactaaatcaatttcctaatcatttctacttctactaatgatactacaggtaataaaatactaccaacataaaccaccgaaaaaaatatatgccactgccgttgttacaagcggtggtgtgttcgttctgccacactgccatgcttcctacacgaggctgacattgatgatcatactggaatctatggcaaaccctccaccgccatcatcgcaaggtcagggcctccttatgatctcactgtttcaggattgatcttctgactctggactagtccaatggctgaactagctatgaatcaaatacagtgcagccagacatagacgcacggtgacatgaaagctcctgatgcctcttaggccaacagccctgcatactaacacattggctggacttgctttgatctctgttctgttgtatggttttcttttcttaataaaatttgggtatgcggcttaaaccgaaaagttttctctggttgtatgaatcgttgttcatctctccctcatcagcatgtggcatttcttattgtatgctatttggtcaatatatttgctggtttggtgcgatgtaatttagtacaggcaattcaagttcaatgctgcggttacctgtaagaaaaaaactggagataagtcgtgttcataccttccagagagtgaattgcctaacattctgacacatcaattgatcaaagggtatgatttaagcagcaatgaattctgtcttgaattgttcttattctatccacttttgctgtcaggaatggaacttcaccagtgaaactataaccacctagaaaccagagcacagtataacatctcatacttcaagttttggtggtctaagcaaaaagtgacaaatacatcaattaactaattacttggacaaatagaactcgtgtagtttactcttaactgaattatgtttcttccaaagtttatccaggagcaatagtagtttgatcgatggacatgattgtgacgttgaacctaataaacctgagagatgcagtaacccatttgtgtattgatctttctaaaaacatttatatcctcttgcaagtgattaaaatgggcaaggcctgatcgatgcaaggtggccgcagtgcaaagatgcatcaatgcatttgaaaagtatatctggtttctccaggagactatcattgaattatttccaaaattcaatatattttttgaaacttcaggattactggtgggtcctagcaagatattctatttgccaaaaattccaatttctgttgattttgcaaaaaaaagaaagaaaaaaaatcaaatttagcacaatatgtccaaattttgattttttttccttctgaaaattccaaatttggaattttgatgaccctggtatgattttgcgttcgaaatagtgaactctggctgtagtgacctacatatcaatgagagagaacccatggccatggagtaaattcccttgatttgataaaaaaacaatggattttattttctaacataattctaagagatttgctccggtccagtaaaaagtacctcaaggtaccgatactctacagtaccgaatcgtttccgatcgttggatctagctgggtaggatgggtattattagatccaacgattagaaacgatttggtaccgtgcagtaccggtccctcaaggtacttttcgttggaccggagcaactctctaattctaatggatccaacacaatggaaaccaccggtgtaatagaaagtttcaatggcattgaaggcatcatcatgatgcatgcaagtaaaaatacaatggttactcacttgatttgatgtgattatccattgctctaaattcatccagatagacatgtgtatcaaactatgccatcatccagacagacatgtgtatcaaactatgccaattgtatgatagggataacatgaaaattgatccatcagtcttctttgtagccgtggcgagagttctttgtgatgcctgtgatgtcgtctcatctggttacatgggagctcctgatgcctccaaggccaacaatcattggtgtagtagtgctttttgttccatgaaaaaattttgcttgtattgacacattggtagtgaaacttcctccactctctggtgtataaacttgctagttatttacttatttctcagcttgtgcaactccatgtcatttttatggagcaaaaagtgttccacactatctcatgttactgaacagagtggtcaattctgaagaaaatgtacgagatattttggtcaattcaagtcttcagttcagagcatgaactcaatggtcagttgaccacacgcggcagccactgcactggattggaggtaaaaggcactcataaattcgttctcagacggcagattcgatcacataaaagagctgcagattgatcaaacaagtctaggagtatatcgatgttttgtacctttcaatttgtagactaatactttcatcgtaatcagcaaatttaagttgcctagcctttttgctctattgtatggcgaatgtactgaacactgtttctttttctacctgaaatctatgaaatggcagaactcctgcctttgctttatacaaagaaaaagttattttatatatagcacatattgtaaacaaaaatatcagtttgcccaaccgaggtgaggattgtatacctacccctgaatgcatgctggtgtccagtgcaaaagctgctcatctttactcccctgaagcagcatggggaaaatatcctttacacctaggtaccatggtagtatgcatgcggtttaaatagttatataaaatttcatacaattttgacgacattatgagaatataagacagtatgcaaatatgcaagtccaggtagcgtgaaaccaaatggcccagtacagcacctgcggcaagccatgttccttgctgcacatagcggcagtgctgcactggttcaccccattaagcttgctacgcaaggccgacattgttgctcatcaggttggaagcaagttctagctccgtggctacggttgtagcgacacaagctcaatttactatgcgtagagagtagatcgaggcacactatggtgttaccggagctcctgatgcctcctaagccaacaatttactatgcgtacagagagtagatcgaggcacactggctgtagacctggagtttcctcttttacctccacgaaaacattgttcaccgttagctctacctgcatgtaaagcatttcttaatcatattggtgtaatattgggcctatatatatatatatatagagagagagagagagagagtatattctactccatattttttcaggtaatgatatagtactccgtattttatttgatgcaatcatttaatgtacaagtaaattctaattccatgcagcaccaatctctggaaaagaactggacatatgtcatcatgttcaatgtctgcacgttattcctagtaattgcatacaaaagagattggatttatgccaaactgacgcacagctcatagcagaagtaaaaccaactcaatgatttgttgactgcattttgtattgtcaactgagacaattccattattagagcatcaccaagagattacgtacaatcttccccaaaaatttgtttttgggtttcttaaactgaaatagaaagcaaaataactaatctctccaagagaaagcctaccaacagaatttccgtttcctccgtcggcgcgtgcaacctcctgacactccctctgaaaccgcgcgccgatctcccacgcgtgggaaggagaggaggaaggtgtgagcggcgagattgggagtgggtgagggcaccgttttctcccacatatcaacagagcgaatatttcggg

SEQ ID NO: 7716 - DNA, 10490 bp, Oryza sativa
gccaccgcccttccaccccccgccatctccctccccttcgctctccccccaccacctccgccgcccaaggccatggcgatgatggccatggatacgccaccgaccaagggcatggcggtggggatggaggtggagctcccgttcccggacgacgaggaggacgagagcatggtcggcggcggcgtgagggtgggcaaagagaaggtgaaggagatggtgatgagcggcggcggcggcgggtgggaggccgtcggaatctgcggcatgggcggcagcggcaagaccacgctcgccatggaaatcttcaaggatcacaaaatccgaggtaaccaacaaatcatcatcaaattttgcgtgttttttgcaaaaattattcgattcgattcgattcctcgtgtgaaaaaaaggaaaagagaagggtttcacatctttttccttcaattattgtggcggcttagggtgtaaaacctgcaaaattattgtgtgctttttgtgcgcaattaggtaaagttgaggttgatgcttccgtcttgttcttcactactgctacctgcttggtcaaaattggcgctttgaccaagcttaagtgtgatgtgtacgatcctaatgggattagattgctggtggagcacacaattacgccacacggcctaacttttttggagatgctgtgaaaaattatttttggtccaaattgagtagtaactcgttttctgttcatggccttttgccttgaaatcatggcatggtatgttcttgcttagattcagattgaaattatgagatttgcctagtgttcattggcatggtttaatacaaaccccggtatgatcatctgtaagtgcaaagggagttataattagtatgttggtgaactcattcggctcaacgtagcaacttgtgttcatggtgccaattttaatcaacataacattagaactttcttcgaatttattcgcctttttcctaattgatctgagcaaccccttggattttgcgttaattgtttgccatcaagatctgttcacaaaagacagttgtatttgatcctttgctggtttctctggaaaggtttgcatgctttattgtttttcatggtgctaacatatttcgttcttgtttctgtaggctacttcagcgatagagtcttctttgagacgatctcgcagtccgcaaatctggacactatcaagatgaagctatgggagcagatcagtggaaaccttgtgctcggtgcgtacaaccagatcccagaatggcaactcaagttggggccaagggacaaaggacctgttcttgttatccttgatgatgtctggtctctctcacagctagaggagctcatcttcaagttccctgggtgcaagacacttgtagtatcaaggttcaagttcccctcgttggtcacccggacttacgaaatggagttgctcgatgaggaggcggctctttctgtcttctgtcgtgctgcctttgatcaggagtccgttcctcggaccgctgacaagaaactggttcggcaggttgctgcagagtgcagaggacttcctctagcactgaaggttatcggtgcgtcgttgcgggatcagcctcctaagatatggttgagtgcgaagaaccggttgtcgcgaggagagactatatctgactctcatgagaccaaactcctggagaggatggccgcaagcatcgagtgcttgtcagggaaggttagagaatgtttccttgatctgggttgctttccggaggataagaagatcccactggatgtgttgatcaatatatggatggagattcatgatcttgatgagccggatgccttcgccatcttggttgagctatcaaacaagaatcttctcaccctagttaatgatgcacagtatgtacagcttgccctgtatttcctttcaaagcctttaataatttggatgcgacaaaaggacggatttgacatttggttactctatgcaggaacaaagccggcgatttgtacagcagctaccatgacttctcggttacacaacatgatgtattgagggatctagcgcttcacatgagtggtcgtgatgctctgaacaaccggagacggctggtgatgccaagaagagaagaatcactaccgaaggattggcagaggaataaggacactccgttcgaagctcagatagtttccattcatacaggtgattcattggctattaactacactttcatctttttttttcttgctatgagaaaaaaaaataccatctaatttgtttaactgatgcttaatccttcaaggtaatacataaagttccatttgttattagtattacctgatcttgtgaaatatttcccttatttaaagttctatggtagtgttacttgcaattatttgtgtttcccctttggacaaaataatctgaccaattggtttcaatcttcaggtgagatgaaagaatctgactggttccagatgagcttccccaaggccgaagtgcttatcctcaacttcgcgtcaagtgtatactatctcccaccattcattgcaaccatgcagaacttgaaagccctggtgctgatcaactatggcaccatcagtgcaacccttgataacctatccgccttcaccacgctcagtgacctgaggagcctttggcttgagaagatcacacttccaccgctaccaaaaaccacaatcccactgaagaacctgcgcaagatatcccttgtcctctgtgagctgaccaacagtctgagaggatcaaaggtggatctctcgatgacattcccgcgcctatccaacctcaccattgaccactgcatagacctgaaggagctaccatctagcatatgtgaaatcagttccctggagagcatctccatctcaaactgccatgacctcacagagcttccatatgagctgggcaagctgcattgcctgagcatcctaagggtatacgcctgcccggctctgtggcggctcccgccttcggtatgcagcctgaagaggctgaaatacctcgacatttcgcagtgtgtcaacctgacggacctccctgaggagctcggtcacctgacaagcctggagaagatcgacatgcgagaatgctcgcgactgaggagcctcccgaggtcgtcctcatcgctcaagtccctcgggcacgtcgtgtgcgacgaggagacggcgttgctgtggagggaagctgagcaggtcatcccagacctccgggttcaggtagcagaagagtgttataacctggactggcttgtagactgatgttcctggatgcttttggctccaagctcacctttgtacagatgatgtgtatatttttccctgtctaatacaggatggaggaacaatccactctgcaattttgacatgttcagtgttcatgcaactgactctccagcagcagccaaagcttgctgagaaaatagaaccatagaattaatagagattttttcttcttggcacaaagcatatttacatacacatagcaaatacattaaccaatacatctcttctgtctctctgtttaatacaatacagaactaggttccatacaatgcttctcatttctcagtgttcccaagaaacagtcttgcatgatatcatccggtgctaaatttttggcacaacatacataattacatactacacaatctgctgcaactcagctgcagtatggttcatcagaaattcagactcaagaactaataggcagcagagcctgcttcctagtagcctgaacacagatctcttctggagctctacctgctctgaaacaagctgattttcagtgcagtttcattgcaaatgttgagatgattacatggcatatacgatctctccgctgctctcaatgtcaaggtcaaggtccgagtccatatcctccatgtcgtcgtcgaggtcaaggctgtcagtcaagaactggttgattccactggtgcctgctgctggaattgttgcttctgccagtatctgcatgatctcgttcatattctgcatcggctggtcaggctcctcgtactgattgctaaccatgccatcatccatgaggtcagccgggatgttcttcatgaaccatgggtggttctttatctcaggcatggtgatcctctgcaagagcaaatgattgcatatgttgtctcacatcagagctgaataattgaagattgtgtggcaggaatagaattggtactcacactagctgggttgccaacaaaaatcctcgtaatgagatcgcggcactccggagatatgtggacatagtctggaattgagtactgaacacccaatattttctgcaaattgagatcagtatttagacattatttatctaaaaaaagtatttaggcattactatttagctggctgattataactgtaaattgtggtgctgcaaagctgaatggttggcaaggatacctgaattgtctttctgaagttcttgggatcttcaggatcctcgaaagggtatgcgccaaccaacatcacgtagagcgtcacaccgcatgaccaaacatcggcaatctccatccaaagacaaattattagggattgagctaactaatgcattaaaagggttacttcacaagaccatacactacccatgccattgaaacatggatcaacacctttacaacacaatggcagcttctattgtcgagcaaaaggcatagaagttgggcagctgctggtatcagtgtatctttgcatgcaggatggcaacttttaaagcacaaaggggatagataatacctttccatcgtattctttcttgagcaaaacttctggagcaatataagctggagttccaactgttgattttggttgtgaatgaagaaccgatgactgcaaaatcagaaagcaacagtacaatattatccaggcagcaatcacatcgagaaaaatctagcgaaagttctctcttcttttcactactacagaaagtaatttaagccacattgtgcaccctaaatgtcttgtggatactatctaccttcagatcatcaaatcagtatcacatagtattgccaaatgatcaaagtaatcccaactaaaagcatagcaaaaataaatagaaaaacattagtaccttcgagtaaccaaagtcacatatcttcaagcgaggagcagtacttccatctagcagagtgttctccagctttaagtcacgatggcatacttgctgaacaatgcaaaaacacattaacaaaatcgcttcagctcaatgcagcaaaccgcttatagttatagacaagcgaaaatcacacggtaactttgaaatcaaaatgatactgtaccatggaatggcagtagctaactccagatatcagctgctggaagaagaaacgagcctgaaagtacaccaaaagttcagagttagccaatacaacagtacaatacagatactacacaattattggtgaaagaaatagacatgatcatagtgtatcaggacagtgatatcgacctcgtcctcgctgaagcggccggcgctgcagatgcgctcgaagagctcgccgccggaggcgtactccatgacgatcgcgagatgcgtcggcgtcagaataacctgaaaagattcgtcagagtcggaattgcaaacgaaacaagaaggaacaaacaaaggtgtccttttacatcattcagcatcagcaatcagcatgatctccaaagaagagaggaggaagaggagaatcgtgtcatggtcacctccttgaatcggatgatgttggggtggcgcagcgacctgtggttgatgatctccctctgcacgttctcgtcaatctgcagtcgaattccacggtcgatcaaaccagctttgattttacccttttttttcttctcaattttgctaagctaagctcgcagcaaagaaaagagaggaaggaaagagaaccttctcgccgcggtcgatgtacttgacggcgacgaggtcgccggaggcgcggttgcgcatgaggcgggcgacgccgaagttccccgacccgatctccttcaccagctcgtacctgtcaccgtcgtgcattatcggcatctccatccccagcggccccgccgccgccctctccatcgcttccgccggcgaccaaacgaacacaaacgcaaacctcgatccgactcaacacgccacctcctcccctcttcttcctcctcctcctcctccgatctcgtgatctctctctctctctctctctctctctctctctcttcccctctcgcttgctcgtgttcttgattttttttttctcgctgttgtttttttttctccttttgctcccgcgctttttcttattgccgcgggaaagtgggggaagacgaagcaaaggacgttatccacatacgaatcctaaacccacccaactacctacccactctatcacttacacgtgggtcccgcatgacaccgggcccacatgtcattgtgattgctcgtcgacgttcaggtgagaaaaaacatcccgggatgctgggacggatgcttattctacccgcatcctcgggtgggtggctgacaggtgggcccgactgatggtggggctcacaggtcggtggcgggtggggatgacggagggaggcggggaaaaagcggccggaaatatctcgcggtggggccgaaaagcgccaaggggtggttaattaccatcgtgccctcgcgcgtctggagcagtcggatggagatcggacggtgtacatgggttgactttttttatagggttgttgatatttccttggacggctgcgatcggattggcggctacgcggccacaaggacggtgagggtatttcagtcatatcatcatcgtctgccgctgctctttaattgggctggtgactgtagattttaagcccaatttgggatgagcatattatgggcctatttgagaagcccagatattttaacaggttttgtactaatgggccaaaagcccatcatttgtactggatcagtgtgcttttgagcccctttctttcgggcccatgtagttgaacaatggaccagtgatggccccgtaccacttggaattttgggcttgttcattttgtgaaaaaaaaacacttagtaatactcgattttggcattatcaagtttcggtagggtaaaattgaggtgagtagtgtttagtttgatgcattaccaaatactgagaaaagttttttgaatagaaagttaattatcaactattgataaggctattttggtattactaaattttggaatgattgataatggtaaagaagtgaacaaaccctttgttctctcaccctcgtttgattgttcgcttataagtcatagataaattttaaattttaaaacttattgagatattctgtcaattttcttttttcatcatggtcttttagaccattcagagcaaaaatataaaaggttctgctctaaaattattttcatggtaggtgacatgtgtgtgcgcgtgtgtttataggtatgagtgtgcatattataaacgtctacggttgtgctgtgttttttttaatttctcaatttcataatactagtacatatagctataggttatacaaaattcattgattcgtcgttattcatagcgggtgattacctgctcgactatgcttaaattgaaagattataaatttgactagttttctttctagtgaacaaaataaggggtgattttatatcatgaatattggtaaaccgaatttgaattcgggtctaaggatggatggtgcagcacttagtgctatccaatggagatctcagtatctcattctcacccagatcggatatcatctccatccatatttttgctgatcgatgcatcctcctgctcctgtcattttcctctcaaagcagatcagcagaacgagaaaacttgcagagattcttccttccacgagacacaaattgcagttcgcaacaaacagctaattaatcttttgctccacagagagattgagagaatcgatagttcatttcatttgtgagcagagtttttcagcgagctaagcgtatcatattcttcagaaaaagggcttctgtattagtactcttgtgttcatttaggcagaacagccgatcttttccatggcacgcaaaacatttttctttctttgactcttttggttttactcaattcatgaaaaaaaaaattaaactattaatttatttttatccataatggatttatgtgggctaatacatgaaattcttatgatgtttggagggatttattattctactaaggggtctatgtgtggaatacaacttatttactcctgagcaaaacgagtaatgtgggagcaaaacgagaagaaccattagctcgtgattaattgagtaggactattaattatgataaactccaaatttagatttatattattttcagaataaatttctatataacaagtttttcaatgaaacataacatttactccggtggtttggaaagcgtgcttacgaaaaacgatgtagtcgttcaatgaagaagagaggattcaaacacaatccagaatgtgtttatgttgttaggtaaggcaagagattcttctccataattcaggtacaacaactgcaaagaaccaacttatctgtggtccaactgcaaagtcagcctgtccaccaggagagaacttgaggagaggggcattctgaattctctgatcctgaaaaagccagcagatagcatacaagagaaaacagtgcacataaagtcgagatccatggaaaggaggaaagaaatatactcatactacgaacgatgataaaaaaagaagacgaataaagtcatgtgtgtgtgtatatatatggtccatttccattgctgaactgtgtgcgccaccatcagcagaatattctctgcaaccacacgaacaagattgcaaataaagtcaccatatcagaaaagaaaagaatttctcctcctctttttttttcttttctcttatgtcctcgtcgtcacggttgattttatgtgataataactttttaggttagtctagaagatcggatgaaaattttctgttcataataagtctgtccatgttagtggcagaaacacagggaagagttcataggctgatgctaggatttcagtcaagtttcagttaaaaaatattcaatgtctaggcttcagatagcaccaagatcagaatgaatttctctccttttatcagtccacagaattgaatacagtaggtttttgaaacagagcaccggctgggaatcaaacatggaggaattcctaacaatttttcactcgaatttcagttaaaaaaaattcattcatccagtttgtaaaggtcactgcatacagcatcagagtcagagaaccagacaacctcaccattcacctttcaggaaatttcagtgcaattttcccagatgctgacgtgtacacattccactctctctctctgtgtgccagagtggtgggccccactacgcggcgattcgatgccaacctgtgccactgacagcctgccacgtcagcacccgctgccagggagagaccgacaaacgcagcgtgcggtgcgagattcccttccctcttttcttttccacacacacattcaagaggaatctcttctcttcctcctctaattttttcccagggggaaaattgcaaaattgcacactgcattattaatttattaatcattttttagtgctagagaatcttcttagctactgtaccaatatgatgctactactgtttgcttatactttgctttatgtacaattttggttagtgcagtctcacctgcatcttgattttttttccctttttagaacatcattgctacatgcatgaccagtgaatttcaccaaattcatatgaaaaattgtgcgaaaacagtgggtttgctcggtgcgactagggggtgtgggtcaccggtgagtattgaacttttttttaagatcggcatgagttttgcgtacctgtgtatatatatggcatgtagaattcgtaatccaaagtctcggcttaaaattttgagagggaaaattcggtcaggggacaagtgcaactgctacaactttgtggttagtttggcgtttgtttggtaccttttctttaagactcttcatgccaattaagaaaaaggagataagctatggacttaagcatcccacacttgattagtaatgactgatgagtcagctggtgccctgtcacaatcttgtgagaatcttgagaagaaggtgccttgcctgcctgcccatggcaacacaccttcacacaaaaaggagaatatctgatgaatatggttggcatctccatgctcttatagcccaaccaaaaggaagggattaggatttgatctcacatcacccttaattaacaattcatcaagggttaagacatgataacataagatactaatatgttgcataatgcaatgtaaacacacatacacacacagagagagaaagctagaggagaaagaagacaagttgtgcaagtctttggagtaatctctgggggatctcacagagattcttctg

SEQ ID NO: 7717 - DNA, 23299 bp, Oryza sativa
  unsure (1)..(23299): unsure at all n locations
agttattttttgtgtagctgacatatgggtcccactattttaattattttttcgagataaaattgccacgtaatcgccacgtcaatgcccgtgggacgaagacctagtcaaaggagccacgtaggcaccacatagatgccacgtcggctaaaaccaccctccatactgccgagggaccttgtttacctggttttcgtaagttgagggacgggtcgtacccggttttacagtcaagggacgaaaatcagattgaccgacaaatagagggacctaaagtgaacttattctggcctatgttggatacttgccccgtggatttccggcccatcctgtgtacaaaatggaacatgagtacacaaacagtgatcctgtgacttcgaagtcagaataatgttatcaccgacatatattacctccataaaaaaaaacttctggtttacatgtagcctacgtgtagatttgtagttaacagttgatcttttaggatcgaagatgtaggttttagttttatagaagttagaagaatctgtttctgtgtacatttggtgaaaatatgtgaaaaaaaatagagatttggaggaagagacgtccctccaaatattttattaagaagaaaattatgagcgtgttgggaattgaacacatgccccttgctatcatatggtttctatgtattattagagtgttgataaagacgataatgtttaagggcgacacacaccaccgaatatgtacaccatgtttacacatttgcaacgatatttttctagcaatacaacactcacattatagtataaggttggatttttttgggggaagagagagctagcatgcgtttactttataatggaagacatgttatgacaaggtgtggcttaaaccaagcccgggaacagacacaaaaggtattcctcgtatttttgaatatccacaaattttagaagaaaaaaagacccttatatatataggtatattacatatcagtatatgtatacaatcgagtgattctaatacttttcttcgtaacttctaattaactaggtgaaaccccgcgtattgctgtgaaaatttagtatgagaacaattaaaaaaaataacgtgtaagatagctagataccatcagattaaggaaattaatatggtttatgataatttaaatttaaatagtatgtagaatagtgattcaaatgtaaaaagtacggtggtatgactttatggaagaagaaaagtagggagatagtttggaccgtagattaatcatctaaaggctaaaaataattgatgcgatatgacttaattagaggaaaaaaggagaaatataatttggaccatagattaatcatttaagcactaactaagtgaggatgaactatataagaacataggatatatcataaaacataataaagatatacattgaaacattatgttgaaacattatgtgaattatgttgaatgataatttaacatgtttatatatatttgaaaagctcttaaattataaaaactataaagatataacatgtttgcacgatgtttaaatgtgatgattgttagtggatgatgatgtagcatcttgttaattagtgaattagtggataatgatgtggtatcttgttagtggatgacgatgtggcaactttacatgttaagcttaagaagttagtgaaagataactttatagtaagataggatttggccaaataccttaaacctcccaaccctagccacatcccctgtcatggcacgatggggatagagtcgcactatggttggcacataccccactagtacatcttgtcacccctacatggctacgtagcaatacacatataatacagaaattaatgctcacgaaattcctgctaattaatactagttgattaggcgcccgtgttgcaacagaatcaaaggatagattggggattagggatcagaagcgtttgactaaggagcacaaaattttcactgacataaggaacccacacgttagtgatatgggattagggcacgtacaaaggtctctatttaccgtctctcatggttgctaatgaagaaaattcgctgatgtgaaagagagatgatagaagagagaaacaccgttgttttgcatgacatcggctagacaacactcatggtggtagattcactaccaccatttttatagtagcatagacacactccgactgagtcatgcgtctacaacttttccactaccttttccgactaattacccaattacattagcgatgatcatgcgctagcatttactccctccgtcccaaaataaaccaactccataccagatgtgacacatgtatcacatcctatgtagataaatttggacataaatatatccggatttatcgtactatgaagtatccaaatctggtacgaggttagttttattttaggatggatgggtgttttattttggaacggataaaagtagattatattgggtgcaacaatcgaggcaacacatatgtatatgcaaaacaaagggaggaggaagagtgtgatgccaatatcccggataatgcgtgccatgcccaaaaatttaattaanaaaananannangggttctgtggttctctgggccggctgtcgtccgtcgtaccccgatctcgagattgaccagaccagcagagccattgtattgttgtgtgcatgcggccggccggcaagtgcacggcctcataatgctcctcgccgctcccaactctctccagcaagctgcacccaccacatgtgtacatagtagcattcatcaccattcccctgataataacaagtccacgtgtcgcgtttttatggtgattcatccatgctgtgctttgggtacaactttggatataaactctccttattttctcctaggggcggagttgaatgaaatgaaggaggatgtcactggcttactttactttactttggattaagtttagactaatacaaggatctgaatttggactgaagggatgcacatatggtgaaaattgatgaactatatagttaaatagtttttggaccggatttatgaaccccccctccctctatgtagctctgcccttgctccctccggctgggaaagagaaaaacagaactctcttatcttgatctcacgtgaggtaaggagctccgtaaagggtagtgagtgccggttgatggtttctcgggcgttggagcagaaggctggagagtggttgtgtcggcggtgatgacagcctcagtatggtctctgcgcaacaaggctcagcaagcaataatcgattctaacatcaaggtttctaagtagatgaataaagtgacggattattgctgtatatgataaaagcaaggttcggcggcgcttcctctgggctggaacaggggacatcacaggcggcaagtgcaaggtcaattgggcaaagacgtgtatgctgaccatgcagcgagacctaggagtcttgaacttagagaaatttacaagggccctacgcatgcgatggctatggcacaaatagaaagacccgagcaagccttgggtgggcctcgagacgccttgtgacgagattgacaagatcctattcgtggcggctacaaatttatcgatcggcgatagaaacatagcacacttttgggactcgccgtgggctgatgggcgcaggccgaaggacgctatgccacttgtctacgcaatctccaaaaggaaaggaaagtccttgcgtcaaggaaaggagaacaatgcatgggttggagacctagatttggaagcgaacccgctggtctcgctcgagctaatcgactagcttgtggccttatggacagcagtccgcaatgttcacctgaacgatgagcagcccaaccagatcgactggaagttcactagtcatgggcaatactctgcatcctcagcttatcaagctcaatgtattggagcccccagcacaaccttcgactcgctgatttggaaggtctgggcaccgaggaagtgcaagctccatgcctggcttattatccaaaacagagtgtggacctctgatagacttgcgactaggggctagcagaacaatagatgatgtcctctttgccgaagaactgttgaaacagccatacatctcgttttcgaatgtcgcttctcaaaaaggatatggacctctgtggccagatgggtgggtaatcatcttcttgaaccagggcactgggagcctacgcagtcggtccaggaatggtgggagaaactggccaatacggtaggagttcccaaaaaaggatggcacactctcatcctccttgttgtgtgtgagatctggaaagagaggaatcaacggattttcgagaataaggagtccacaacgacgtatctgcttgctaaaatcaaagaggaggctaagctctggatgctagccggcgtctgaaggttgcgtgagcttctgccacaccttgtatagtgtacaactagccccttgagttttttcccttttcatctctaggggttgtattttttttccttgctatgcgcagtctgtgcctttttcccttaaaaaaatagtttttcccttaaaaaataataaaaacaaggttgaagtaaggaatcgctacattaccagtttaccacatactagctgctactggtacttattcacacggtcacacacatgcatgtgctctcctatacttttagttaaccaccaactttcttaactaatcacgcgcatcaattgtttaacttgtcctctgcaggtgatatacgactttgttgtgtattttgtcttgtctaggtataataattaatgtaacatgtatataatatatccatgcttcggttagactaatccacctttaattagtgttttctttcattgtggcaattaattgctttatatgatatatgcatgcttgctgcaatgcagtttaatgcaagctctatgatcagcttaagtgaaatcaatgtatcgggggattgattttagggttttagaattgagacttcacacgtccctgtctctcctcatctttcctttatagagatgtcggtgggactcgaggattaatctcctactagaatatgaactcgtttgtaccgatctcacaaaaacaaaatttatctctaagtttctttcttgatttggaagtaaaccggtgattttatctcctcctaattcttatcggcagttaaccaataatatcaaccaacaatgctatcgctatgttgccgtttgagtggatttgatattttaaaatagtcaaattatcagcaaggcgattttaatttgaaggccgagaattggattcagaataattcaaaatacaagtgaacggcaattcattgcaaatgaaagtcctgtttgcaatacggattataggatttgaattattatccaatgaaattcctattccaaaatggccaacatttttcaaattactgtaaaatttgcacacttcatttaggctgagttcgacatcatgggttgggaattctccctacatggcacgcaaaacgaagcagcagattatcatacaattaaataattattagctaaaatacctgaaaaacgagatttctatagttataattattagctaaaatacctgaaaaacgagatttctatagttttgaagcagcagattaacatgattttttaaacaacttttctatagttttttttttgcataaaaatacatcgtttaacatttagggaagcacacgtacgaaaaaatgagagtagaagttaggaagagggagtatagaacacagatttagactgagttactaaaacacttcaattaagcctatttgaacaaaattcacttgaatcggccaaaatgaaaagagtaattagacagattacaaccagtttaacatcaatctaggcctagggtgcggtgagattgagaccacacagtagacagtacatcagagaattaccccatctctgcaaatgccatacatactacaggactaaattcctcaggggacagatcatcacatttcaccagcaaagagcccagcataagaaaccaaaacaagcaatagaaaacaaagccatatgagtgagttcctttgaccagatcaggatatgtgttgttattgcctgtgttgcagctgctactgtgtgttgtgtgatgcatgggaagatatctttgtgttggcttctttgtctttgtgcaggtttgtagtctttagaccacacatccactccaaatacatggtctgcttctgcagtagagagagtgcaatgcttgtgatgctagcttgtagctagatagggccacacctgtgcctgcctgcctgccattgatgcaagcagaccatctttgtttcaggctttcagttgaggactcacagctgtacacattccaactgccattccctcatccttctccttacactttgcaaagacttcctcttttttttttgcatgtaacattgatcagtgattttcgtactagtagcacataaacacattttgtcagatgttaaaaagaaaatgcaagaaatcttagggctctctaccctttgtgtaagctttcctttttcattttttacatgtagcattcagtgatttccatactactagtacatatgcacattgtgaaaaatggtaacaaaaatgcaagaaatattatggctctgttggaatataggaagcatttcgctgacgataagtcgctgttttcgtttgtataaaattactgaaatatggagtttttattgttattataattcttgctcttaaaaaaattgtttgtgctttgatagggccaggcagccggccaagccagtgaggtgcccactcacttctaggtggtactcctttgaaccaacaaaattttaaccaagctttgtctccaagcctgtttttgactgcattggtgactgagaagctatgcagggtttttttaacctttctggattctgatttctattcacccaacagcaaccatatgatctctatctctattcatgaacaatctagattcagaaggagagaggataatagtatattatcatgtaacactttagatacaagctatcagatgcatcgattggttgaaccatgtattatagtttatcttttgtttggtcatcttaacattgtacagttgattagttcgagaaaatcttctaaacatgttgatttgatctacttcagttggacttgcaaatatattttttttctccggtcttcttgaccagctcgatctgaggtttcataagatggatgtagattggagcaggggcgaagctacatacaactatgggggttcctaggcatccggctaagagaaaagttttagctatggttaccccatctccaccatatatgcaccctctcatcccaacaatgtgtaccctcaagcagaccatcaggccgagcaaaggtaacaaggccaacagagaagtgcacagccatgaggattttcttgtggtgcagcatgttttgttgacaaatttgccctgcataacagcgttgttaactacttcacggtgaaacagaatgcactcggtggccagccgcagcctatggtcttatcacctattaatcgtagcaggcaaggggtgacgtcaaaagaaagttttgcaatttgctttcatagtttcattccattttttcgataatttcaaacgaaaaattaagctgttttgtcttttttttcttgagatgctgatgttggacgagtagttctccagttttggcaacctattggttgtgattttaatcttaacttcttcagtacactgcgctgataactatcgtcattgggaattcctattttggcaagtagttttataatttaccgctaagttttcgttcttatatcactcgttcatgttaatgtagatactgaaatcaatggttttagtattgtttaccataatgttctttgataaaacatggtaggtcgtacgtatatcattttcgaacatggtagtatatcgctactatagtggtgcaccaccctctattttgctctagcttcgccactggattggagaggatgaaaaccaatgcatttttctctctcttttggtatcaaggaatcaggtcttgatatgtgtgcaaaactttagtaatagcctaactactgtcacatatgaaggttctcatggctgtgatcttaggttttaatgacactctggatcagcatttgtatctatctagccacaaaacttgattttgagcataataagcaccacatagtcaaatttgtttcaaattatgtgcttatggaaaatactaattgaaatatcttcttatttaattaaatattgggtgactaggaaatgacaagagctaattaattttgatctttttgagatggcaccaaattaaattcttttgtcaatcgatgcctcgatttcaagtttgaccagacctgacccaagatgttctaaaagtctagacccaattcctctcgatcttgggaccctcatggcacaaacatgacacattgattaaacatatccaatttgaaccagccagacatgcctaaaacctctcaatttttgtactaattttgagttcagctttccatgcacctgccagcacaaaaactactcaacacacaaaaagaacagtgcttgagagcagcatcagcattagtgaccatgcttcaatgcaactaagcaaggaatccttttttttttcattttatcagctaagcaacatctgtccatcgaagcaagaaaactaagccatgaggccacatgaatgagagagaaagatgaggagctgcaatgcaagctagcatagagcaagcatgcattgatcaggttcagagattcagaagatggtggtggtgtggcttcagaaagtcactccattgcattgcccatgggggcattttcattgcctgagtgcatgcagctgcagtttgcagggcaggcaggagaaagagaaaagctctttttaccagctgtaaggcagtgtgcagcaatgtaagacctgcattagttagtggatgaacccagaagacccaactttagagggttagggcttaagggcacctctctgtgcatgtaaaggataatcattattattgtatccaagaaagtaataatatttcagcatgtgtgttgcttcatcttttctgctagggcatgtggcacatttcaagcctcctgttccttggtttgcattgtcatcaactgagagtgtagttttagtgttaaaaaaaacctccgaaaaggaggagggagttcctggttttttattatagaagaaaagaattgacccggtttattaagggaaaccagccctaaaaccttaccgctgcacggttaattaaaagaaaactgacgaaaaacctctacgaagagattagttttaatatagttagagttatcttaattgaagaacaggtgggctatcttattgtgttaaccatctcatcccagaaactgaagtctttcaatggaaagtactatactatatacatctaagtactcttattttagttagatgttgcagtgacattagcttggtttctaattaacacttgcctcgtgttgtctcttcatttgaactctcctttgtcctgtgcttcaactagtaagtgccagaaatatcaagctcaagtagttccccagactaaacacagtggttaggagttacatcacccaaatgctaatcttcatgcaattattgttgtaaagtaatctcatgtatcttgtactctaataccctcataagcaacatttgtcaccccttccaacaacagcaaacacagctgatacacaattattaccagaaggagacagtgtacttatcaatcatgtttgacaaaagagctttcttttctttacagatcatctcttcatttaaattactgtgaaaaaatttttttgcaatgaaaactatgccatgttcttgtttggacatttataatggaagtactgtaacagtggggattacccatgcctttgtggaatcaagcaagtgcaagctggttgtgcaatgtaacagggaaaagtttgcattggattctcacttctgacagggagaggaagaggagaaaaacagtggaccagaaactgaatgaatgaatgaatggcactggaaattttcagctgcagctgcagaacagaacagaactgatcaagaaacccacagggagctaggtcacagacatgcatgcatatacaccaaatgaaatcagatttcatttctcaagaacagggagagggttactggttacagaagcttacagtgacaaccaatccaatatggcatagcttgtaacaaaaaccaatgtggtatagtaaccccatgcaagtgcagtgcagctgagtgaaaccccacactctctcacacatcatccacttgcaagaagagagggaaaaaaataacagagaggctgtataaacaatggccaacctttttctgaacactgctgctggttttgcaacttctgcatgcaacagcatcttcaccatatgcagacatgcagtgcaatgaaacatggcatccacaatggcatttcaaattgtgcagctttggactaaagttttcagaggaaatgtgctccatttgggcactggaatttggggcttcaagtaactcaagctctcctctccttaggagagctcactcagccccttttttcctttgttcattatctcttctccttctcacaaaccaaaccaatccaatccaacaacatttgccaaatgccaaccaatggcaatggctcaaagaacctaataaatattttggaaacttatgtcaaaaaaagggagaaaaaaagaaggggaaaaggagaagatccaaaccaagcgccccctagacatctgactaaaaattgtgtgtccctggtggtgctagcttcctcaacggattcgcggcggctctggcctgagccgcttattcatcgccgtcgcagcgaaggcggcggtgtcggtaacatcatcaacaagaacagaatcatatgtactggtggtggtaatctcattggagtctgaacattgcaatggtcgcttgctgctcctcctgttgttgttcatgtccccaaccatcatactgtagcaggcatgtacattctcctgatcaaagaaacataaatcacaccacataccaaagtcaattacatatctaatttataacgacattttcataatcaaatgttgctcaactactactttgaattagtttttttctgttctatctgaaattattcaagtgactgtctgactgacattctcaatgttgagaaacacatcaaagttaattacatctaattttcatcatcaaatgatgctcaaatcctactgatgtatgttgggaattattattagtttgcttctaaaatgtattgaagtgagtgagtgaatgagtgactgaccttgtcaataagacaagatggagaaaggttgctcatcttggactccaatgcttcttttgtcagtggagctccataggatgcagccaagattgcagctgcagcaacagttgatggcctgtaatctagcacacttccagctgcatcaaacacaaatcaaaatcaaaatcaaatcaaatcaaatcagaacaatgcaacaaacaaagaacacaaatcaatcagatgccagatattttttagagagagagagagagagagagaatattctgatttttgtgtgtaccttcagctgtggcaaagatgaagccgacggcgttgagggcaacgcgggcggcggcggcggcgccatggccggcggcgccggcgccgccgtggtggtggcggtggaggcgggaggagaagcaggggaggaagtcgaatggcgtgacggcgcccatgcgccaccccagcgtggacagcacgagcagctccatccggcggatggagtccgagcagaacacgcggccgccgccggcgtcgaactccgacagcgccggcgactggtactcctccatcttcgccgccacggacacgcacgcgatagacagcagccgcgccgcccacggcatcgcctccctctgaacacacacagataccacgtcaccggcgagctcccaagaaacaaaaatggcggcggcggcggcgccgccgcggcgggaagggatggatggattagctagattacatcgacgcgtcgccggaggcagaagcggtcgaagtaggcgatggcgaggtacgccgtccggtggccgaacccgaagtaccccctcgtctgcaacgcaaaccaaaccatggcgtgtcaggtgttcgaccctgttctcgcatcaacaagagctaatcgagcttagctaagctagtggtatcgagctcacttcgaggatccacttgacagcggcgaggcgggcttgccggaaccagtccccgtcgccgtcgccgtcgccgtagccgtcgccggcggcggcgtcgaagagggaggaagaagaggagcagcagaagctagcctccttggagaccatctgctccacgtactcctcctcctcctcctcgtcgtccgccgccgcaacggcattgtagaacaagaatacgtcgccgtcgtcgtcgtcgtcgaccacgccgtcgccgaggtcggcgccgtcttcttggcacgtcagcgagaagccgcacgccgccgagcactcctccgcctcctccatcgacatcacccctactgtttattcaggtcagtcaagcaagaaccatgctacggccggcggcgatggcggcggcggccggagaaggaggagagtgggcagcgagagtgagaacctctcctcctcaatttaagtgggctcacgtttcattaactttttttttactgccgtgttttttttttaccatttgtgttgttgttgaccattgacagttctggtaaattcaggtttgtactaacagtacgtctctggggtatgaaagcgcagtccgtgaaaaacgtaatcatcatggatctggtttaagatccaaagaatttaatgtgccatttactctgcaaatgataagagtttatgcttacgcttattagccaaaatttgaatttttaactttaaatatggagatgattttgggttttttttttcatcgaatcttatttttcagtctttacttttagatcgttaagaacatgtatataaaagttttattcacaaattacttttcgtttgcaaatatgttgtttggcttatttcacgaataagcgaaacgatgaggcctttaatcacattgacatctatctcctcaagaactgtattttggatggatgcaaaactttgagcagaagcatggaatgtagctgcaatgtgattaagatcttccgtgtaaaatgacacctgatagtatggtgaagaaatctcaaattatattggtaaaatgatatacaaaagtgaaaatgttttaaagtaaccacatattggttggcttcagctcataaaccctaaaaaataaagagggccgggtagtaacgcatccccgtcccccctccctccccgcgtcgctctagcgcaggtggctcgggggttgtgcggcaggcggcgcgatgacggtggcctaggggccctcagctgcgactcaagaggtggcgttgccggtggtggcgcggcttggctgcgcggcggcagggtggcaactcgccactacgtcgctggaatggtgtggtgcagctagggcggctgggtgcggcggtagtagagcggcctgcacggaggcacgaccaagcagaggggcagctaggtgcggtgatggtggtgccagtgttggcgcggcagccggtcggctcaaaaggtggcgcaagcgtcggtgcagtgatcgagaggccgggaacggcagtggtgatgccagcgcagacttggctggagcaggcagcgatggcagtgccccttcttggagctcctcctcttctccttggggagtttctaggttggattaaggcggtagctggttaacgggggaagctctgaccgccgacacgacgccatccaggccgggttctcctttggccaaatatggcgaggaggccagcgagtggcgggacggaggaagcctgggccagcttccaagggtggcggcagggaacaacaacaagtgtgaaagtaggccggtggtggggtggaggcctcatgctgccactgtctgtgcggtggtttctgagctgatgggcaatgaatttcaagcaaggttgcagagttctaggcgaaaaccacgcctctctctcccttggcgagtttctctaggtgaaaaccacatctcccatagatggacgatggcggcgtccttgatgtcgtgacctccgtgggggcatcgttttcagagtctcgtcttctggtgttgtcgtaggctcagcggcaatcagccacgcatagctaagatcattttggttggttcctctctcagtgggttgtgcttatgtggttggcatgtggttcttggtcgtgcactttggtgcacttccgacctcaatagttttctatcgctttttcttaatatattcggatggcctcctttggccttctccgcgaaaaagaaaaataaacgagccagagaaacataatttagggcaggacatttatatttctactcataacggtttaaaaaccatgtctggaaataagaaaacaattaaaaaggcctagaataatgtaaaattaagtttgaaaatttaaattttggccgtgtcttataagccacaaaacaaacattgacggtaatagcatgcattatgcatccagcatccatatttgagatactactctaaactgacaaggcatgctagaatggtcctaacattttcacacaaaaagtggtattttagtctgtgggcaaaccctagaatctaggaaaaattggctaatgatctgaaaaaaagtaggttgaagcctctgcaggctacatataaaataaggattttgttgagagtgtaatctcaactaccacctagcatcatcttctccccaaaattctaaatgcagccaagaaaatgccacatttcctcttcagaatgtactcagggttgagacaaaaacactcggtttaatttggctactaatgaatcaatgtgggccccacccccatcagggaaaaacaagcaaattctgtgggtgatcagagacataatacagccacaaccatggtatctaatcaataataatgcagctactctatagcatctcacaacctaatcctccctagctactgacaaaatttgacagatttttaaccttgacaatttttttcagagttactgtatgatttctttttcccctacccatgtccatggaattttagccttcctcgtgaactaggacaagctgtctgcaatgtcccaatcttgctactacatccagatgctaattaatagtggggacatggcaaatttatatacacatatatatttacacgaaatttatttacacacttgaatatttggggtcacatgacatgagatggtgctgaaaatgttgggagagtgaacaaaaacccaggattcaagggccaatgttttggagtaccaaaacagtgccaattcaacacgcatcgtcccatgccaagatgcaaatttcagtagtacccccaggtcccccaattgcttgctgcccatttgaaaacaagggaagatgccaagatttggcctgaactcacactaagatcaaggagagcaatatggaccacttcttatccttgctgctcctgcatttggtgattcagacaacatgacgagcaaacggtccgcatctgaaatcaaaggatgaaatataatggagtgcagaagttaatataatcaggcatgtcaaatttacatatttgtttttagataatgtcaaactttcagatggagtgaaaacaaatggcaatctgaaagtttttatatatatatatggagcctgagtttgttgacagttcttgtgatggactgagacataaagaaatcttcgaatacaagcaaataacagattatggagtttgtaatttgcagaatttgtacaatcgaatatcataaagaaatctcaaattcagaattgtactttgcagagagagcttcagtacctcttatggagttttgctgatacagtgctcttcaaacaaacatcagcatgaacacgcaatgatgatagcatctagtaacactgatcatcaggtttcaactttcacctgtaagaacaaaacaagaaccatgaacaataacttctcaaggaaattattaaaacgattcacagttggtcatgttgaaatgtactgtgaccgacggtcctggatgtggatggagccggtatactgcatttaaggttgtgcaagccattctgtccaacatttcctgcaatggacaatcgtacacagtaaaaaaacctgtcctcctacctgaattataggtttcttcgacattcatttatggattgcaagcaagcagatgtgtgacacagatcaaacaacctcaggacacatcatatcatcaagtttgctacaggaccctgcataaaccagccttgaattcaggttcctcagtcccacatgagaaaaaaaaaaggaaaataaaacaaagtgaagaaagaggaggacataatatgtatcctagccaacattgaagttgcagcattcaaggatcaagccacaagtattgacttaacactcatcagcatttcagactagtaggcaaacctaatgcacacaaggtgatcagaaatatattcagaaaagcaactagcaagtaaacaatagtaatcagcatttgagagaagactatatattaagaggtagagtgttcttccaagctgcccccactttggtgaagcaaggggttcagagactatagtgatgctatctactctgccacttaagaccactcagtgatgtcttctttgaccaatgcttctacaccttcacagaagcaagatgataaataaatgaagcctaagtttggtcatgtcaatgtctcaatgcaaggggcccttcaccatctctccctatttcaatgaaagcagtgaactgtgccaatcactaggggacacaatgggcctttgcttgtgagatgaagcaaagcattaggaggagatcttgtccactaatccactaaagccacacagtggctaaactctactagtgccaaacttgggcatgctagttctagcactaacttagcttacccttttttgaatcaccaaaacaccaatgatattatatatagagtatgaaatgaactagattatggagctaagtacaaaagggggcacaaaatcttgtagacctatttgtttaccttttgttttccaggcctatttgggggtcaagtctttctgtccaaagaataagcaatttcttctgaatcaaccaaggaaccaactctactgcttctagcagtagacatagtaccattgcagtgtaatggacaacaatacctcaaggacaggttgattggatagctcaggacagatattgtgccactatgttacaaacattttgaacaagaccttcaacaggaatttgagtgcaattgaaactattttgtaactactaactgcatgtgatttaattccctcataattaaaaatgtacttccatgtttcatttactcgaacccaaacctaacagcgatttatagttgatcacgaataattttccttgattattaattgatattcccgcaatttatccgtataactttaacaaagaaaattgtctgaaatttgatgattttgccaagtttctgtcaaaatccatccacatcagctgcttgacacttcgacagtacagtatggtatttatataaaataaacaaaaccttgctccaaccatctaaaatgaaagctgtgtaggcccttgggaggctttaagtcatgcacttatgttgccatcattgatgaaaagctggataagtccctgcacgtcggctaagattatcagccaggctttatgccaacccaatcagattaaagtggctaatcaaaaagtctaaccttttacaagctttaacctaacattaggacagcttcccaatgtttgactggtacaagggttcagtcagtcagcaacaccaagaggagcacatgcaagcactcatgggaggcacttatcttgagtttcacaagaaaatgttacaataccaactgttgtaatatgctggttggcagatgagacaatgaaccacaatgcaaaggaaaagacagccgactaatagcaaaaaaggacttactatctcagaaagcatatatgtaagtgacatgataatgaagcaaatacatgtagataagatagttatacaaaggttaatgtagcaaatacatgtagataagatagttatacaaaggttaatgtagcaaatacatgtagataagatagttatacaaaggttaagtgggagggaccactaatatgtagtggtctcaccattttgttggcaccaattacctgtagtgtatctgtgcatgcgatgtattgtttgtgattttgattcttattttgcaaccataatagaatgatccatccttcaatgattcaatcttaccaggcaatcaataacaaatatgcagtatatatgtacaaagttaattttaaaagtttccttgaaggcatgataaatgggaagagccaacaggacgttgtacttgattgaaaccatagtatgtgcaaatcttgtatagagaagattgttccaaaataatcgaataaattcttcaggttacaatcttttgcagacagaatagttggtacaggagatgtgaccaatcagaatactgtaatcacatggaagtttctgtccaatgtctgtggtcttgagatcggtggaaacttgctggcaagtgacggtctgccccatcaggctatcactatacggatttcatacaggtttcaactcttaagagtaggaaggacatacagaaacatcaggaattgagtcaaggatataatgtgttgaaattgtaagtatctggcagaattctgaataaaccaatgccatgctagatagaaacactattatctgaagcaagtttggattatgtgattatgccaatgtgaggagcccaactaggcaggaatctctgctgtctttctggcactacaacaaaacaatttgaagaatatatgtcagcaactcagcataaactataagataaatgattaccacattccaaaatgacttttacagcattaccgtatgcagagaagatttttacagcacaaaataaaaggatgaagcgaaagattctctcttacaatatattcgggcttcactgaaatatcaagttcagtttccatcatcattttcttcaagcaggtactcttctatttgatctctgaaaaaaaatgccataaacaatttagcaaatcagtgcactgaaggactgaatagggcaggactttaacagatgaatgggccaactgcacatactacacatggtcacgttaaatcaaacattatcagacaaacaagctccaatatccaaaggttcaatgttttcatttgctaaactaccaatagcgctcactgtttataacaagaaatgaagtactccataaagaaacagaaaccactatcaccttagcaagctatggctgtcagatatggtatccatttttccagtccataattttggtagtagtgaaaagaaatgttcattcaagttttcaccggctggtagaatctggaaataacagctttgacaacaatgagcagtataaagatcaattttcttctgagccttgtgttttgtgctttccaaattctggagttctgattcactgaacggacttccacacatcagacagagaatctcagaaaaagtggactcatcgctatcaaacttctggaattttggacgtagtcgcgatggtaggaaatcatgatagccatctgccgagaatttgttaaaagagaagggcttgagcttttgcgcagttcttacaatggtatgctctcgagaagggttctcttcctgcagatggtaataatagctgtaaagatgtgttgtcctccaaacaattaacaaaaataactgctgagcaaggatgtagttcaactaagaataggtgaagtgtaatttgacatgtagtaattggcatgataggactgaacttacccgtagtcgtttaataaaggatgcaactaaactgttgatgccgttcgaaggcctatcgagatgttgctgtgtttttaaactaaacacattcagttagaatcaatggcatttcaagaaataaacaaataaggtttttcccccttctcttacctatctagttcacagaggagagtaagctcttgggctaggcaatcacggagtgggagaacaacaggtatttcccaccgtgtatcaacatactggacatcagcaggtaaagagtaaccttgcccctgggtagagatatcaatttcatagtgctcctctaatttccatcatgttcttttcaagaattatgaattggtaacaaagaacagaatacagagaaagcagcacatggtataccttcacagtcgcggacagaacatggcatgctattgcagaagcacatgatcctagcatgatcttagcgtacccgttttccatagcaatctgatcaacaacacatcaacatgaaacaatagacattaactcatccactgatcaaaaagcataatacaagagcaaaaaagcacactgacggaccttttgcaacgaaagcatgcgtaagcaccgaaggaaatcctccctcccagtgtcatcaccaatcatatccaccgcctccctcaacctgcgttccccatcctccgattcggtggagaacacatcctcaagacgcgcaatgtgcatcgctttaacgcctgttgacaaactcgacacgatcgacctgatatcttcaattgccatctcaatctcgtctctcggcttcgaacagagaacactttcatccacgaatgccaccccgacaccgaataccggtaaggcttgtgaattgctcacgtcccagctctcaatcgccttgcaccgcatctcatgtatgaattgcagcgctaccctataattacatcacgtagtagtacaattacacttccactctaatgatcataaacacatgaagattctatgcaaagtactataatacaataacacttccactctaatgatcataaacacatgaagattctatgcaaagtactataatacaataacacttccactctaatgatcataaacacatgaagaattctatgtaaagtataatacaataacacttcaaatctaatgatcataaacacgtgaagaattatatgcaaaggaagagtaataactttatgtagcacaaaagaaatgaaaattaggaaggaaaaaaaaaagaagagggaagcgaacctggaggcggggccgccggagaaggcgaggaggacggagtcggtggggcgaaccatggcgttgctcgtgacggcgagcttgaacttcccgagcaggttggcccggaagcactcgccgcacaggccgaggcctccggcgacggcgacggcagcggcgccgccgccgcacttgccgcactcgcgggagagtgacagggggcctaccttctccgccgccgcagcagcagcatcttccacctcggcggcggaggcgaaggaggagcagtggggcccgcagccggcgccgccgcaggaggaggacggcgccgccgcccatggtgtgggtacgcgaggcgggtaagcacgcgagcgcgtaggtttagtttagggctttgggattctatactactcctcgaattgggcctagctgggccgtctcagtccaggcccaatgggctttcacctgggccgtcccctcgaattaggcccatttttttcccttttgctttgaatatttgaaatgaaacgcaccagctggtgttaggtttcagtgtttcatattgatacagtactagcactttgctacgttatatttggatgaatgtatgttacatctttaaataatgtaaaagtaatgtggagatgacgatttgacattgtttacgtattaagttttaaaaatacaacaaaatcataaattatactatgtcatgctaacatgatatttaaaataatcgatataataattgttagtgagtgatgatgtgacgtacttgtatatgatttaaaatactatagataatacttaacagtggatgacgatgttgtacacttgcatactgagttttagaagttagtgataccaactatattaaaagtataagggttgtttagattagtgtcatttcaaaccatgtcttttttaaaaaaattgccaaagatatacatttagtttttttaccaaactttggtaaatatataaggaatcctatcaaaatttggcaatattacccacttaccaaaattttgacattgccaaaatttgataagatttattttgataaaataacagccagttaagaagaagttagaagattataatcatgtataaggctataattagaaaaaagaggaaaaaaacgtactcagggttcacaatctctgaattttgaacatctcgagctggcccgaatgtagatctcaaatgtttttgtttgattatttttcaatttcattcaaaatttgtcgaaattcatcaaaattaacaaaaaaaaaatctacgtctcattgtggcttgaaattcactggcaggggatcctagagtcgacctgcaggcattcgagattgtgaaccttgttgtcagttcggtatgttggctatttacaaattcatttaaatcaggtcaactccacgcatgagccaacatgaacaagtaaataaaattgataaaataataattctacgtgtgcttaagatcatgcttcgaggtggaaactggaaatgagatattgagacaatgggacttaaaaatttgcttccaaaaagaatcaaaagcgactagattttgcattgcttacaaaattcacagcaaacatatagtatcttaattttacaaattctcttcaaaagtatatgtctttcatgaagacaacaaaaaaattgtcacatgcaaatttgggggcaaattgaaccgtcccatgatgcaagtgtagtagtgcacaattagccttgctcgtcttcagttcttcacaagtttcaggaccagttccagtttgataccggtgttacctatgatccttcagtaactgatgacgaactggaactatataagtaattccagaatggctaatttgtgttgaattcattgcatggttagtatgaactcgttgtgattaacatgaactgcattgtccagttgtgagctgagacttctgaatcatgtatcaatgttcagatcgagcccaatgttcatcccgttgtacgcaattggcgcatacatccacatttcatcggagctgaggagctgcaggattggacaaaatatgataagtggatcttgttacaggataatggatgatatgaactgaactgtattctgtagatgctcacct

SEQ ID NO: 7718 - DNA, 14240 bp, Oryza sativa
ttttttggatgcttaatttgggatactaatatttacaaattttaccatgttggttttaatttttctaatgcattgcacaatatgatgggattcactaaccaagctaaaatttatttgattgttgcagagctgttgtcagtcagttggttacaggatatcttcccagtgtcattcttcactttctttcctcttatgtgccctctataatgaagctgttttcaacaatgcaaggattcatctctgttagtgggattgagagaagtgcttgcaacaaaatgcttcggtttacaatatggagtgtgttctttgcaaatgttcttactggctcagtacttggtcaactcgagatattccttgatccgaaggaaatccctaaaaggcttgcagttgttgtaccagcacaggtacagcttgcatttattgttgcctttaaaactgcttagtgagtgaaaaagctctttgttttgtagatattactgtgggcatttcaatgtaaaatctgctttcttaaacaactgtctcttgtgtagtattgtattgatctcttcctcaaccgtgcattgctaaactgtcctttgtttatgctttgctctacaggcctctttctttattacatatgttgtgacatcttggacaagtatagcatcagaacttactcaaactgctgcccttttattccatttgtggggtagctgtgcaaaatgctgcaagagggatgagtccaaacctccatcaatgcattaccatagtgaaattcctcgggttctcctgtttggacttcttgggctcacatacttcattgtatccccacttatcctcccatttgtactggtttacttctgccttggctacttcatatatcgtaatcaggtgagagtgttgcagttcatttatcagtactttataattttctgttcttctactcatggagtctttatgctgtaatatacctggttggaatttggaaggacatattagtacctaaacctgttcgaaatttggatagggactgaccaatttgtttgacacttgcatagtaatttactgaacttggttttgcagactgccagacttggtacttaaaattcacttacaccacaaggtgtagatggaatcaggataacgtgggtccaactataaataactttttcttagaatgtttagcacataatcgtagtgttgtttcctgaaagatgatctagataatctagtgatgtaatttgtaacactcagtctgaaaggcatccaacagttcaagtgttataatgaggactttcttgtgtgcaatgattgcctggtagaacagtagaaattgctttcccgcaagtatttgtcttctttcacatcttgcaaataagattaagtttggttttttaatctcagtgagatataagagaacaaagaacgccctttatatgttcttaagaatttcgagaacttccacagttgatttcatgcgtttgcaacggtcacatcatctataataggtgttgtaaatacttcaggcgtcctatttatccatgcatttggaagctggtatcagtataccatgtattctggttacactggtcctgcaaagattaaacgatgtattatttgttatatgaaaaattgccaaatcaacaccatgcattctaaaagtggattgtttagctggataaatgtgccataccagagaaccatgacacagttaaagtgatatttttccatccatatagtagttaataaggcaccaataattctacattgcatcatagtaatactttaggcccctttagtccgaccaatctggaatttgcacgtgtttaactctgtaaagcattagtttatccgtgtacacttcttaactttgcatagtacaaatgcagctttttaatgtatattcacccaagtatgacactggtggaagattctggcccattgtgcacgggggaacaatattttctctggtgctgatgcatgttattgcaattggagtatttggattgaagaaacttccccttgcatcaagtttgctggtacctcttccagtgctgacccttctgttcaatgaatactgccggaacagatttttaccgatcttcgaagcatattctactgaggtaatgtgtttttcattttgtccaagggtgcaatgtaattctctttgtgcaactatgtatcaaaacgaacaacgcatcattctggtccttttagcttatcacttcgatagttcgattagatataatgtgtattcacgttctacctttcgtgctgcagtcattgataaagaaagacagagaagaagagagcaaaccagaaatggcagaattcttcagcaatcttgtaaatgcgtactgtgacccggcgatgaaacctatccaacactcctcgaattcagatgaacgcactacacctctattgtcttagatccagataagtaatagcttgcagccttactgtcatggcgtgaattttggtttgacaccgataatcaggcatacaacaatacacctgtgcttcttcttgtgatgttactgttgtaaagcattactacatacttgactgtggagttgttgtgcatatttgatttgtacatcttaatttgtgcttactgcgtagagatgaataatgcattgctccttaatgaagtgctgtcaatgcaaacctgtgtgggttgtacttctagatatgtcaaatcacctttatttgttcccttcaaattttgtgtatatggatgttcttttgcttcaacctattcagtaatgagattatttggcagttggaatgatgtgatattagtactgatacattattatcagtttatttgagttatacttgtcctttttttgtgcccctctgagactattatcatatacaatttgatgccaaaattcagttttctaaatacaaaaggtttcaaaccgtgttgaacagaacataatttgttagcctgtttcctatagtttgctatcacccaattaattatatgctgagattatttgacaagttcatactctacagtcactgtggttttgaaaatgtcatgctatccttggatttggagcatactgttctaatatataaatagacatccattttcttttgtccctttttgtgtatgattctcaacatgctactccaacaaagatttgcttgcatcagattgagcatatatatacatgatcacaaacaatgtgaatatgggccccaaaaaaaatcagtcaattaaagatcagcaatattgacgtattcctaatcgattgttctattatttggcttccatggaaaggaaatgttcatgtgattgcctgccacttggagagagaacagaggtgtagtgttgtggtaatctatcttaagcaagcctgtaattagactcgtactgaggcttaagtcaccattaacaaagattatgtgattaatgttccatttggctcccatgttgtctgttgtagtagattgttgaatgctgatgaatcctaatgtggcaagtagaaggccatgtcaatgtaagccataggccttaaaaaaaagggtaggagtaaaagccatagcatattgtgccatttgtcttgattgttcaaaggaaatcttatgtagaaacatgctatgatgctgataatattttcctattggcaagttgcatggacaaaatgatatcacattcataccaagttggtatccctgttagtagtttaatccttttactttgtcctaaagtctctgtcatttgtgcctcacaacttgtagacatctgctggattcttggtcacaaagcatgaaaaggcattgtgatgtgaacatgatgacatatctaattggaatgtagggtatattgttagaggtccttttctaatttgtatgtcctcagccaagacccatggaactctaatttgcaactgattgcagccttgaccttttcatataccctatgtaagaccattagctagacttgaccaagagactgtgaaggagatgatgatgagaggctaggtcaagcagtcaataacagcaatataagcacgtcatgtttgatctcacaaccattaaaaggaagagttagtgactaaatcatgtacatatacaaaaccgattacatgtttgataaaaaaaaatcatgccaaaataaaaaataaaaatatgttgttatagtagaactcgaaccatgcatgctactcaactctcatcgaggttttaccaaaatgaaaattacaagctaaaatttaccaaataaccactactatgaaacacgttttgcagatggccaaaacacgtttttacatgtggccgggcctacgaccaaaggcaagtgaaatatcgcgtaggattttgtgggggaaatagttgttttgtgagcaatattgtttcatgataagaacatatgtgttccatacttgtagcatttctgatcatttttatatgccgataatttttgttttgaattcaccaatgggaatgaactatcctttaaaagctggcagcagatggatacatgacatatatgaaaagaatatgaatggtatattctataccacgaactactttagtttgtaagatttttttacccattagaaaccagtgatagagttacaatcattggttgaagaaagggcgtgtaaagggacattggatagaccgtcatcgtcatccatgacaaacacaaaaggataacaagaaaaaaattatatcgaagctgtttagattactcagttcaactggggatgaagtaagaaagcatagaattaaccacactcgttgcagttacttccaacaagcaaatatcatacacaatttacagtacacctttgccttgagaatcgtgatatataatttggcaatatgtgcgtattttttatactccctctatcccataatataaggcgtggttaaagttggcaaggtctccaaaactaatcttttacttataatttctcatatagtataagatttgtagcaacaaaattataaccatatgaaagtaaatttaaatgtcaatctaatgatataatttttaataaataaaattcatttcatattatattaagtattggacaaatgttttaaatcttgaaatgtgtgcacgccttatattatgggatggagggagtatatgagtatttcatgtatgactttgtcttgtatgccgtacagcttagaggacaaaactaacatttacaaagtataaagtatgaatctgatgaattgttccatgatttttaatgagtgaaggggacatagttattgtggtgtatttggtgaaactctgaacccttagcttggcaaaaaaatggactaattaaccacagttaatctcgatttactatgttgatcaaatgcttcatgctaattaaattttattcacaattataatctcacctgctagctaagtagatctttgatacttgctctcatgctatgctttgtttgagaccttaatttcaatgaactttgcattaacaaaactaagctggatcactaattaacttccctagctttttggttgtccttggacgacgttataatccaagttatgtgcattgccagtaataaaattaatggtgcaagttgcatagaatgtacaatgaaaacatactactagctatgtagctatagttgatcaattcaatcccataattcaccaaatataatataagccaagcttgcatcactctaaaaaggttcttgatttagcacgcaagacatgggctaatcgccaaaaggtgatatctggatgtcccggacctagtcaacaaggcaatgcaagtatgaactgggcaaggtccttttcatggttttttttaccctttgttcattgtcttacttctatgagaatgacgactacaaaattaatgtgagaaaatgatttacatcatagacagtacataatttgtttgatgtgtgacttggactatatatttataattcattgtagtttatgtgggtccatgtgtcgagtatgtgcgtacttatgtgagaaaccaatagcttaaatgtacacgcgattgtaaaaatcgcttaccatgttgcatatattaatttcttggcctttaggatcacatataatttggtgtggtggttccaatttgcatgttataaatttgatatgcggatgatcaaaagcccttgcaagaaaaaaccgcaaacattaaccaatcgcggagtgtctgtaaatgcatgggaactatattataataaggcaacaactcttctggtgcggtttacgaaataacaaagaggtagaatgacttagagttgtaatagaaaagtattcaacaatatggcacagtccatctctatgggcactccactccactcctactgttataatccaacatatattaattgttatagattgaaaatcatgtttctctagtatgatatgtgtcttcccaacaattttcttgagaaaaaaaaacataactttgaatgctgattacagatggggagtatagagcgtgagctgcaaattgatcgttctcttttgcctaactatatatacaatgtatggaaaccacaaaagtcttagcatataaaaagtgaggtaacaatgtctgcactactgcaatctcaatgtcatgtccacctgtcaatgactaggcctacacaaccttacactcatatcattagctaagcaataacatcaactgaattaactaagtatccaatctctctcactagattaccttgtccccctccacaatctatatgttcatcacaaacttaaaccacatctcaatccatcatcatcaacaacaacataagcacaatagattatatatacatgcatgcaatgattttccaaaacaatactaataatttggtctaataataatgatactacccatattctttacttgacatcctaaaatctccgccgtcaaactttctagagtttaactacaactataatacattactagttagcaaattaagggtctgttcagattgtagccaaaataaaccttaccaaattttggcaagatagcaatattgtcaaaattttagcaggatttcttatgtatttaccaaatttggcaacaaactaaacgtagacatttttttggcaactttaccaaaaaaatggtatggttgaaaatggcatcaaagtgaacatgccctaaatacttccgcttggccgttacacaactcttgacgttttggacaatgttaagatcaaacttttatatctttgcctctaaacaattctaaaactgtttaaaggtactggaacaaaatatatgtaaatttttcttacaaaatattataataaaagtaaaagtttgtttttatttatttattgtatataatatagtgaaaaaacatagtcacagatataatcatttcatttttaatataaaattacaaaatgtaagtctaattgtcatctcaatgactgcaaaatactaaagaaaaaataattaatcaaaacttatgcacaagcggttgcactttcaataggtttttattactaaagctagggatttatcactggactccatctcttcgagcatgtgtcatgaacgtatttgcaggtgtgagtgtaatgtgcatacatgatggtgtagacgtatgcgtattctgacagggaaaaaaactacaaaggtagtatacacaacctctctcctaaaatgtacgatgtcgttaacttttcgcatactatttaaccattcgtcttattaaaaaaactacatcaatattatttatttatttgttgtgaccatcaaataaattataatcttaacctatatttttatatatctatactaatttttttaataacacgaatggtcgaacgttatgtgaaaagtcaacgtcgtcgtacattctgaaatggagatagtactcgttagctaacttagcagttagcacaacataattatcagcttgtgaaagcttctccaccatctccatgtccccccttatatatactcctcgatgatcgccatggccttccacctccaacctcactcactcactcaagccaagctagcaatcgatcgatcgagctcaatgcctccatccatggcgacggcgagggtggcgtcaccgtccacggacaggaagcgcaaggccagcagcgaggacgacatagacgccgccgccgccgccgccgctctcacctcgccgctggcgccggcgagggggaggaagcggttcgtcggcgtgcggcagcggccgtcggggaggtgggtggcggagatcaaggacaccatccagaagatccgcgtgtggctcggcaccttcgacaccgccgaggaggccgcccgcgcctacgacgaggccgcctgcctcctccgcggcgccaacacccgcaccaacttttggccccgcccctcgccgccgcccgccgccgtcgcgccaccggagacgacgacgacgccggcgctgccgtccaaggtcaccaacttgctactgctccgcctcaaggctcgcaaccagcaggtcgtcgacgccggcgccgcggcgccgcaagaagccgctctgttgcagctgcagcagcagacgccggcgtcgtgccaggaggtgttcgtccgtagccacggcgaggagtacggcttccacgtcgacgacttcctcagcgacgcgtgcagcaacgagcagtactccggcgacagctcgctgggattggacgacgacgacggcgaggtggaagacgaggaggaggaggagctcgacttccagttcatggacgtcgcgcccggggcgtcgtcggcggcggcggaggcggggctaggcggcgagggcgcgctgtgctcgccgttcgagatggtcgccgcggagctcggcggcgcggtggacgtggccgcgcacgacgcgatgaggcagatggactacgagaggaagatctccgcgtcgctctacgcgctcaccggcgtctccgagtgcctccggatccgcgccgccgccggcgccaccgccgctgcgcgggaccacctcaccggcctgagagaggcttgccggaagaagcagaaattcgccgccgccgcggcggcgccgccacagcagcaagaaccatctcctcctccacagcagcctgagacgccggcgagctcaggcggcggcatgtcggagacggcgagcggcggcggcggcgacggcgacgtgctgatgtggagctcactggacttggctccgatttgccacatggcatagttattattagtagtaaacaccatacttaattagggctgtggaatttcttggtgatgacatgcatgcatggctgatggctcagacgagagctctggaaattattagctttgcttagctttgccccaattgttttgttcaacagcaaaaaataaagtttagttatcctctctgatcatctcatataaaccacaaattatagataatgaagtgtttgatgtgtttgttcatgattttcagatgagcactgtccctgtatacattgcagtttctcctctttcccttgatgttattttttttttcttttgtgatttgtattcagttgaattggtcatcaggtgtcaaatataatactactcccttcgtttttttaatatacgacgctattgacatttggcacgacgtttgactatttatcttattattttataaaaaaatataaatatcatttgttttgttgtgacttattttattatcaaagaaactagccttagcttatattttatatatttacactaaatttttaaataagacatacataaacgttatgcgaaaaatcaacggcgtcatataaaaaacgaggtagtactagacatgaactgtgatattctttgtattcatgacagtggatgatccactgataaaatggagccaaggaactccttaattagtccacttgactacatgagaagagctgaccaatatctgctgatattttttatcagtttaaattccaagtatagcacaggccttcatttgaaaagaaaaaaaagaaggcatataaaaaacatgaggcataacaaactgaaacattgacaggacaactaagcaaatccaaacggtagataaagccaaacaaagtcatcaatctatcatttttgtggtttgtagtctgtactgtacatgatgcacctctatgtaagtaatacagagaaaaggaaactcaagcaaaactcgcactttaaacggatgccgcatgcaagacccagtaattggccagttagcttcatagtcaccatatcatgtgaaacttgttagtgtttcagacagttaagaggagactccttagcttgtcaagctcatgttgctgacaaaattgggcgaactgcatcggtgaaatcttcatggaacctatgctcagaaaatctttgagcgcgttttcgtgctgctgttgccatctcatgcctctctgcctccggcatccgcaagaccttgacaattgcctcggcatattcttccttctcggaggctagaaatcctgtctgttggccatcctcatctagcacaatgtccatcattggtcctgccgatttatgggctgcagaaagcatggaacattatggctttgtttacaaatcaatggaatgacttatgacccaggcattttggttggtggcatcagaaaattcaacttctacttatgtatttcagtggcgtttgcttcatgccttaagaaattcatcctgcccttggtattgaacccctctgaccccccccccccccaacgcgcgcacacacacccaaagcacaaaaaagctaataataacaacaataatatgaaatacggaatgcagtcatatttggacttattcaaaccattgttatgtgcgtaccagacgaactagaggcacttatcctgtataccattagcagtcttggaaaatggtattaatccaaattttaccaagtcaataggcccagataggccattcttgacgaaaataaagtgctatgaactgaaaagatggatagggcaatctggaagttacttaccaattggaatagcaccagcagccatgtattcaacaacacttatcccaaaatgctcatctgtcattgaatggagcccagcaacagcaccacctagaagctgtaccaagtccctgatatatccatatgaatatcctgtaagtttactgaaagaacctgcatggtgagaatttcttagtgctaggttgaccacactacctgtaagagatatccttgtggaactccacaagctcatctatgtgtagttcagtggatctgtctttaagcttttgcaatctttccagatcctctttattccgacagcttccaacaaattgaagctttggcttaggaaattctggacttagctttttaagagcaattgcaaatgcctcaagctgaagtccatgggcctgggagaaataaatgggtacacataatttttctggaatgagtgaacagtaagctcttgcgctaagaatttgatccagttatagtaagttggcataccttttctggccgaaactgtgcaactgatataagaataggaggtgtagttgatctttccagtggaagcatctgttttatgcaacaagtgtttctgatgagtaccaatttaatcatcttcatttgattaaaaaaataatgcagtagtaatttatatcaatgccttgcttggttagtgtgtccacatggctatgagatagagctaattaggattgacaaccaacagtttagaaatatagatgtctagaatttggatatacctgcagggcagaagtatcacatggagggtataccctcctagtacgctctggtatcctccaaatattttcaatatgggatcttgtccacgatgaatttaccatcacaagatgtgcgcatgaaccgaccagaccatataaccaactgaatatgctatagtagaggattttgcatcgggacaaccatatgctgcatccaaaagaatactctgttattctttgcagctgagaccattgtatacaatattaatagatcatatgtaaggcacagagaaaagagaacatatggcatatgaaaagcacttttaggttgccatgatcaagttgggttgaccaatgattaggtacaaagaaagaagtttacataaatatataatctgttaatgcatgatcatgttcatcttgatatatctaataagagaggactgaacaagtcatatgttaaaaacataaatgatagatgaagaatgagaaaaagggatgactatgacctatatgattctgatccctaagaaacaagaatgcacccatgaattaaacatatcgattctccaataagaagaattagagttactctgtgaagtgcccaccttccagcaatacgagagtcgttattgtacatagaactgcgttgcttaacacgttcaaccatgtcagaactgattgtcggataatgagtgtagcagatgaccttacagccaaatagccgagccagtggatatgtaaaagcatagccgctcgtatcaaaatagaactgcggggtgaatttgttaagagcttcccatgcaagataaactgagccaagactttgcccaatcatcgtgaagtggggatacgtgcttgcttcaatccactttctcctattcaagtgaacaacctgaaaatgaagcccagacattttttatgctagtgcgccataatgtatctgattatgctaagagaaaacaccagataatgctttattttatctataaaagatagtactcaactttgatctccaaatatagatcagacaactcctttaaaattaaaattcgtcatcatttttgctcccttttactgtgtttttagcctataaaccaccaaggattctgactaggaagacaatcgtattctcctattaccagtgttagccttcagctacccgtccgaattgtataaaatcaacgaaatcttgtaataatggcattatttctttcatatatgggaacagagcatctctgagactacgtttctgagatcatcaagcaattccaccaaccagtgactagtgagatcccaccgaatttcaccctaacttaaatgaactatatcagaccaaatatttacaagaacaacttaataaacttctcagaatatccatcatttgagttaaaaaaaactaatttgcagaaagacgagcagctaggactgagatccagttttcaggaaggaaggggcacatctttctgaaggcccgatcgatcgggggacacaggaaggaaggaattgaaaccgaacctgcggcgggcggaggaggcggaccccgaagcggtcgagcgcgcgggcggcgaggccgtcgggggaggcgtcggcgtcgccggtgaagacggcgcaggggaggcccgggcggagctcctgcgcggcgcgcaccgcgcaccagagcacccgctccccgccgccgccgtcgttggtgtacgggtggaagaaccccgcggcgggcgcggggtgggggtggcggcggatgcggcggaaggcggcggcgaggagcgcggcgaggagggcggcgaggccggcgaggaaagccatggatggattttgcgacgcagatggtggggtttgggttttttgggtttttgggtaagtgggttgatgggttcggcccattgggccgagttatgggcctaggcgactgtagcatggggtgccttctgttgggaaaaagtacaccaaatgtccctcaacttgttatcgggatacgaaaacgtcctcgaaccgcaaaccacgggtcccttaactatacaaaaccggtcacaataggtccctcggcggttttgatcccggttttgtcctacatggctgctgagtcagcgtgggatccacgtgtgccctacatgtcatcgtgccatgtcagcctaccctctctttccccctcttctcatctctctcatctctctcttctctcagggcagcgaggaaaggagcggaggccatgccggtgtcgcacggcctctcgcggccatcctctcacaccgccagcgccgccggggaaggagctgagcgcggccgtcggggacggagcagggcgcggctgacgggagtggagcagtgcacggccggcggggtggagcttggcgcgtgcggcagccgccggggaaggaggtgggcggcggcagcggcggcggggaagggtaggcgcgggaggccgtcgccgcggttctcgccctctcccctcccccacgtctcggggtcgaagaggcccgagaggtgggagaaagaggaggacgtcggcatcggcgggggcaacgtcgttggagaaggggagggcgtcgccgcgcgggcgagctcgagggcgtcgatggcgatgtcgtggccgtggttgagcttgacggcgtg

SEQ ID NO: 7719 - DNA, 20913 bp, Oryza sativa
  unsure (1)..(20913): unsure at all n locations
tgacgatagagattatactgcatgatcatagtgccctgtataaaatccatctcaatgatgaagatagcagttgataggacaccgacagtttttgttgcttactgaactgtcttatctcccctgaacttttttttccctatccaaagtgatcaacttgtcaatcaaacactccatttgctgaatgccagaaaagggccagtggaatcagcaaccaaatttttgcaagaatgatgaacttctgtataacacaagcatgcatgctccgagttcataggttgagacatgctttatgtcaatcataacccttgaggacagattgtttctctatgaatatattagctcacatgtgccaactcgattactaaactccgcttgaatcagctgtgaaataccaaagtcctccattcgaatcatccatctcataatttgtagagtatatatactggccatttaactccaagtatgctatcatcaagttctgaagctgcaaagttttgcctaacggcccaggcgcccagcaaacaaacctaagattgcatcttcgatagatttacaggctttgagccttatgagcttcttattagatagagctatgggctttgagcccaaaagagcttctgagaactcacgagctagctaagtttgtaactgctaattgacatgttcttgtcaaaaacgtttttaagtggccatgtttagtaacaggactaatctagaatgcatactaatatacttgtaaatattattcagtatgtgagttttttcaaggcagtcatcagtatgtaagtttattttttcttgggatgtatgataaagtggttatgaagaactttagaacataaagggagtaaaagaaagttgtgcagactcgtacgaaaaaaagacagatttttcaaagaaccttttctctgaagcatactttgtcggtcttcatctccatgctcagttacttgagcaacttgctaacctcgtcagcatgcagagatccagagtttagataagccaagaaatctgcacaagaaaaatggtatcacaatctgctttcatctgcatgagaaaagggccaagagagctccccagtttggtgacaacacctgtaataagcactgtaactgctactgaaaattactgtccaacgtttttcagatccttgagaatcccaacaactgcaccttcgaggaggagaggtcagtgtcacacgaaaaggcaggcggctaatatggacataagattgagttaggggtgattgtggaggcaggcctgatcgagtccaaaattttattgcactcttgtcaaccattctctgtactttgtcagcactaagcatgcatgtcgccaaaagatgtaaactttttctcctttctagacaatacaaaagaaagtatcatttaggatcctataggtgctattgtggccaaacatgatccaaagatcaagcccctttttatatgactatctgcaatcagctgtcatcagtgcagtgcaatgtctgatgagtcaccaatccagtaatatgaaatggcagacaacagtgattatcacagggaaaaatcccagagaagaaattttatttaccttttggacaaggggatatgtatgactaatcctcctcatttactaactgttgtgaaaaaggtttgctcatttatcacatgggatggataccagtacatgtctaatcagtttgggagaactaatgcagttgccctccctctgaagaaaggtatatctgaacaaataggatttttcccactttcacattcagattactgaactctcaactgtgagccaatgaatgcaggagctggatttgagctcatcttacaacaagatttacattattgagggctagttggtacctgaagtgacatcagcatagcacttgtaacagggcaaacaattgatgtgttcctgtttaggccagagaaaagaagtgatcagaagcaaagacaaagacctccccctagtaatgatcaaatatgaacagaaagaggtttgcacaaaaacaaattaaagaactagataccaatgggtccctgagaaattgcatagatctgcatatcttgatgaaagcgacacatgttgggtactgccccctgcagatatggttaactatgtggaaggaagctaggtgcctctccttttctatcttgatcaagttgactagtatcaaatgtaagctctatccatcaccaataaaaagcatccatcctccccaatgctaacatcatcatcatcacacttgcacaaaacaaaggaaagctaagatggcaagaactcagcttccatctcccagcaaaaggctacctaaaaagtacagggcggtcctcctccagtacgcttatgacagcaagtctcccactaaagcaaaaaagaaaaaaaaaattgatgcctaacaagttaacagcagatggccacaatatatctgcagtatataactccattattggctcttgaaaggataacacgacgcataaaacaattctattcgcctcaccactccactttagttgttagttctcacttgtcacttctcagatcggattgttataatatcaatagaagtaacaagaaggatgcatgtcttcttctttccatcactatctttgaaaataatagtactccaaaaagaacagtgatgtaattaactaattactattactgctggtgcctatatgtgctgcttattgtgaattctgacctaaccatcatgctttttgtgcaagttaactaatttcagaaaaggtgaactatggtctacggtacatggtaaaaaaaaaaactgaatattttatatagctactattacagtagcatctatccccaggatgttcaacaggagcacatacaaagaaagtattgtaggattgcttcttatggcctaacctaaccatcattctagagccagaagctgtgggcttgcctgattagactagaccaaaaatcctaacaagattcatgactttgttaatgggaaatcgctttcatcaaaccccctgacgaatagtcaaacggcgcctgtatgaggcataccagccaatggaagaaagcttgtcatggaaatttcatgccttgtatcatgattcttgttttcttttaggaaaaagagcaggggtacacacatcaactagtgagatgtgtacaggaaaagatgacagaagcatatgcattgtgccttgcccctgggatatgtacaaccagggtagcatagcaccactacaatgtatgcaagggccaggcaagaaaggaaggagagataagcaactaaaagagagatccactaactccagacaaaactcttttacctcctgattcctcacaaagaccctccacaagcctcaattattacctcccgaaaaaaaaaattcccctctgccttctcctacctcgtcatcctttataaaagccatctgaaaactgaaagaagatgcaccatacatgagttgcaaacctgagagccagaaagcttgaaccacttacatggtaggagatggagcaggcagacgagtcgtcggtgaacaaagagagctcagagcagcagcagcttaccagcgagcaagatgatgacggcgcgacatggctgagcctcactcttgccacacagggatcaccagaagaagcaacagccgaagcagaagaaacagaagcagcaaactgctcggagtctgaggctcccaagccttcttctgcaccacacaaggtgttctcatgtaacttctgcatgaggaagttcttcagctcgcaggctctgggcggccatcagaacgctcacaagcgagagcggagcgccgcaaaacgctcctaccatgcgcagaggatgatgatggggctgcctcttgaggcacatgctgcctttgtgcactccctgagagtaaaccagagctcagtgattcagaaggcaagccagcaagcacagatcaggacagcaccaaggtttcatgaaggcagcatcagctggccaccgattgcttatgaggaggtgccgaattcgacatggccagggagcttcagattgagatcacagccttcagaccaaccatcagaacagagtaagatagacttaaatctcaggctttgataggttgatgtacaactctgaccagtacataagtccctcctcaagcttgtccttctgaataaatgagtttgaagtaatcaataggttcagctcaccatcagatcaaaatcatatggtggtactgaacttcgaaggtattgttgttcatttggaattcttggcagaattattgaaaaaaaaattcagagacaagttactgcactaattttatagctagaaacttattagcatgatcatagttgattcaactgtgaagaaagacatgcattccgcagcaattcttacacgaagaatatatcccgtctttatcagtaattcagttatattgcaagtgttctcaatttttatttcccaacatgtagctgaagttccaaaaaaaaaaacattcagaacagtggcgatcttgtccaattcctacaggaaatgaactgactaattttaaattccagcaaaatcctatgaaattccaacgcaccaaaagctaagaggaaggtaatttaaggttggaaaggacagtacagttcctcttttttttatggaaatggtagtgaaggtgaaagattatcaattttcactcatatgaaacacattgctaagaaaagttttggaaaagaaaaggtagtgcagcttatgtagaaaaacttcatgatggaaagggtggggcgaaaggagaaaactttatgtacctttcaagtttcaagttgcacatatttataagtagaaaattagaaatggcatctgaactactctaggctactgtattgcacgtaacacaaatgtaggcatcacttataagacagaaacaaaagtaggaggtcatttctgctgcattagttgccctgaaagaaaatcaagtttgtgaatacaccacagtaccacaccaagtccctcaacacagtagtcttcataagccaaccgcatcaaatatttctgatgattcattagcaaaggcgcatgcatctatatgttagattgaacaaaatatgttgatacaaaattgtcacggtaaatagcacaagaggtgtcaacttgtcgagcataactgttcaagtcaccagtgttattcaagtccatttgtgattctacccttaaatagggaaaagaaggtactgagactgtaaccgacaatttcataaaaaaagattaacaaagggaatggaccagcatatcaaacattacaagtttttctcccaacaaaccaagacaccatgttgtaagttataatacagaactacaattttacaaaaacaggagaatgcctgttagcctgctagcgattcagtggctcctaaatagactctgaaatctccccctaaggctcaggctttaaaaccattcagcatctaaatgcttagagcactctaacttagctgagaagctgccctgcaactgtaattcttcctttatctccgggagctcgagacaagctcagactgttaacatcgcaaagttgcagaccaaaaacagctactctgttaaatcttggaggtatgacgcagggatatcaacagggggaagcaatgttgagacacacttgaactgttccaaataattgcagaattagaccaacgctacaattatgacaataatctgattaagactacatgatgcaggacgtgcacaaaccttgtgttgcttgtacttgtcgcgaattgcagttaagtttgaacatttttttctgagctgcaagtcatgaatggccaagatgcaatccttcagttcagacaccttgtatcctgtcaacttctgcatcttcttgctctagaaccacatgcagtacagtttttagccttcaggtatagatccacagcagcactttatacaggggaatagtttttagttcttacccaaggattggtgtacggatcaatgttcagtttagcaacaaacaccactgaggcagcaaccaccgatggcaagaaccggagacagccgtagtcaagtagactaagctcagcaagataactccccatgaactccaataacaagctggagcgctgcaacgagtatacaagaatccgtcagatacaccaatttatgcacccacagaagcaaaagagcaagaattaaatgactaatatgatgaatcacacggattgatgcttacctttttgtcttcctggcaagatctcgtgaaccgcctgaaatttaagtggaacaaaggggaaatgcacaaaatgagtcattcagccacgaattcagattgggagcaagcatttgcagaggattatgatcatttgggggggtcagtatgcccacctgaggaatgtcttgatggtaggattgcccatctcgaactcgagaagcttgagtatgtcgctctccatcttgacaacctcctgcctagtgtacgtattatcagtgatgtagcagaaatcctccacatgaggagggctaatctcctcgtacttcctgcaaccaccaccaccaccatccaacaaccaaactcaatcccccaatctctgatgcaatgtgaggagactagaggaagaaaatggcggcggcggcggcttacgcagcgatgagcatggcgccgacgccgaggagctgcagcctgttgcgcctgagcgggtgggcggagaggtagcggtcgaggtaggagacggcgaggtagagcgtgtcggcgacgagcttgtactcgtcggcgacctccaccagccagtccacgaggatggcccgcatgttcgccgtcacgtccacctgcaccgcctcgatgtagtccgccgccgactgcctccgcgcctccacctgcgcccacccaccatcgtcgtcagatcccaaaccaaaccaaacctaatccattcgaatgcagatcgaagcgcgtacctccatggatcggaggtaggtgtagatgtcggaggcgtactgcgggtcccaaccggaggagggcgacgccgtcgacgtcgacgcggatgacacgggggagccgccgccgccgccgctgggcgccgccgcctccgcggcgggctcgggctgcttggacgacggcttgatgacgacggggtggtgcggctggcggggggcgacgacgacggcgttggagagggtcgggaggtcgctgagcgcgacgcgcttcctcttcgccggcggcgcgccaccgtcggcgacgcccgcggcggccgaacgcttggcctgcgccccagccgccgcagacgagcgggtgagccgcgccgcggaggccggggtggagttctccttgtcagccatctcctcctcctccggcgtgcggcggcgggtggggctagggttttgggattcggagctcgaggaggaggaggaggttaagtagattgggggaatgggagagaagagcgcgaaatggagaattcgaaaggaggggagacgcgcctacgagatgaatcgaatccgatctcacgaggagggggacgagggtttcgtggaatcgtgtttcgcttttttttggggttttggattttggatttttgggggaatctggggatcgcgggcgggatctggggctcgatgaggtagggtttaaaactcaaattacccatgactcggcgccaaaacctttttttacagagctagtagtaaatgattttgcaggttattactgtagtactgtactactgtattaggcattgggaattccatggaatttaactatttgtcacttttaagattttacttatccaaatgactctcttaggtccacgtttaataattttctacttgagagtggtaatttcttaaatatttatcacttttactccctccgtcctaaaatataagtattaagtattttggaactttgacatactccgtcctaaaatataagtacttttagacttcgatacatatacggcggtcgtaggtagaaggagaggggagtggctcacaggtggggcccacgttacttttcacgcggacacatcacgtagacaaaagtggcaaatagttaaaaaattacctcttttcagtggcaaatttttaagcacaaatgaggagcatttggataagtgacgaacctaaaagtgacaaatagttaaattccccaggaattccaacccacacagcccagaagaatccaacattttttttctgaggtagacgaactcaacttttacaaaggaaaaaaaaagagattcttttacaaaaggaaatagaatggaaaaattaagagatctttttacacaaggaaatataagagttttacatacatactactagtataatgttatatatacaggatgcaacaccaacgttgctacaaccaaaataccagtacatcggtgaggaaatactgtatactaactccaggatttgtacacatagcacaacacaaactaacaagaaggtgaaaagcacatttaaccatgatgaaatggttaatcctatatggaaatctgacgctactgagcaacccaacctggttcgagctactgcagggaccatgacctgacctctaccttggccatccatgggtttgctcctcttctccctctcctatgtatccccatactaatgttgcagcatccaaattggatcgattcgcatgatgcttgagagtttcctgtttccgtctttgtcatgcagaagtagttcgttcagctgacagaagctttgcagagcatttgctgttgctaccagactaggggagatcatgaatgtgcatcactggagactgccaggaggtgcatcagctcaagccggcactcctgacctcggatgtaatggcccagcatcatgcacctgaacagccatcgcggaatcacaaggtcagaacgttgtcaagtatcggtaggcagcacaggtaaggaactgctattattaccagaataatagacgggcaagacggtcgcgaggaatagatatcaggggctgaaatgggagggacacgtcctccacgagctcagtgaattcatcgtcctcctccatcccaaaatttacagctccacccgccatgttctctgaggtcggagagcgattcgtatgcattttgggggagagagttgctagcagaccatgtaccacggagtaaacagcttcttccacaccagggcaggaagactccgagagttcaacaacctgttcaaaatggttattagctcaaattgaaacaaaaaggtgccccaggaaactgggaaacttcatcttgctttgattgctatttgctgtttttgttcacatggcatccaacaagaggaaatatattagttgcggaactcaaaaggccagaaacagaacaaccttctcaggtgacagcgatctcaagtaatacagcagctcgtttttctcttctccagcaaattgctgcatttgttgggaagaatttttcttcttaagttcatgtagctcctgcaaggttaaaaataatataagaatacaatcaaattctgaattggtagttttcaagtgaaagcttaaacctgcaaagatgttaaagaataccaatgggattaacctacagttcaaagggaaggtgaagttgacctctaatattacactagccaagcttgcactaagcagagattcttgatacagaaaaaagtgtgaaattaacgagccatgaaattttcactgtgcataataggtatgacaagattggcagatatatgcagggcagtcaatatacatatggccatcactaccaatcatctatgatcatccaatcaggtaagactgtaagagatggttattaccttttccatggaatccaagcgagattgcataccgagaatgagtttttttgcttcaatacttaagctacctagtccatccatatttccacataatttttcatctgccatttctgattcgattgtcaagcctacatcttctggtaagctgagaaacatagaaggccttccaacactgtgaatttcttcacagctatctcttttcttgcattcagtttcttcttcagaaaactccagcgttctttcaagggagagtctgtactgagcattgaataaagtatacctggaacaaaggcaaagtgacattagaaattaattttccttggcacatgcaaatcaccccatcaagtgtttatgctaaatgccaatgagaaaaataaaataaaaaaatatgtaaatggtctggcctttcttctaagttaagtgaaagcattctatttcaccataccaacaattatgggtgaaaaggaatttgatgccatcaaaaaggttaatatttatttcttcttacttttttgtgaggaagaaggttagcaattcaatctgaaattttgaggaatcaagtttaatttgaatgaacaccaagctgataccaagcaacttatatctgtcatctccttcgtgaaattatgaaaaggaatgcaccctttaagagcaattaacaggggtggaagaatagctagttccaaagaaaaatgggatgtgactatgtgagtgctgaagcaatagtggtagattgtatgggtaacaatttccaggtagaccagacaagggtgtacacttggactatatgctcgaggaaaaccaaaactactagacactgtacactaaaatctcattggcagaaatgctgtaggaaaaggtttggagttcacaattcacaccctcaagacatgctttgacataccacatacatgaacgaaagtgctgcgattgtcctgacgaactcagcatagggaaatagcatttgtatttcatgcatatagatgatagacaagagctatgctacagctggccaccaatagctggccacgctacataattatttatcttaatgcattgacctaaaactacacgctaagtcatttgctactttcctgtgcacatttcaaaaggtgatcatgcttaaatctgacttcttttgaccaactagaatcaacaataatcaatacagtggatgaacatgaaagctaagtttcgggcagaaaagcataccctgtcattattgaagatgccaacagcttgaagaaaggattccaaagggactctatgaccacatggaactgatcggatggaagaaggcccaacatgcctgaaacagtcctcttcattgcatccacagtttcagaaggaacatctttttggattatgcttagatccaaaggttctatgtcttttatcaagttccaaagggcagatctctacaagcaaacacaggagcatcacgataatgaaaagtgacaatacagaaattcaaataggaccaaaagatgctaatgctctcatctagataagtttgacagtagggggatgacaagcatatattctttgttggtgaaagctaaataacatcctcacacttgtgaggagagacattctaacttttgttgttgctcaagcatgctgaattacttctccatcactgccatccaactatgagaggctaaataatgtgtatgcatactcaaaaaagttaaccatattagcactcggatgcacttttaggaagctttatactgctcaagggttaagacaaactgtgtgccaagattagtacccagcatgacaaactatccaatgagaaagataaagttgcagctttgcgcatcgacgctagtatcgtttacttttgtgttgccgactttaggaacatttacatctctaaatgaacagatctatatacggttcaaatccttccaatcccccatcacttcgctccaatccaaatcccacaccaactaacgcaaatcatacataccacctactgctgctcaatcgagtatttgcaaaaggctgaaagctatcgtttcatactttcgcctcgattcttctgtttcgtataacatggaggaggaacatggagtttaaccccctcggctgtgctcgctcgctcacctcctcgtaggcgccgccgcggaggggcctcccgcgcgcgtgaagctcgtcgggcgaagacgacgacgccgccgccgccgccaccccgaccccggcaagcccccttcgccagacgccacgacccgccaccgccacggacgagggaggatgacgagccccgaggaggaggagcttcctccccaccgcggacgacgacgaggaggccccccgcgtcggcgcgagtatgccggaggatatcggcatgtggtgacgcgcccgccgtcgcgttcgccggcggcgaggggggcgggaggctttctccttcctttcccccctcgcgggggtgggtatgtgggttggtggtgggcgcctcgctggcaggggtgaggaggcgatgcgcgtgactgcgcttagctggacccacgctgtctctgtctctctcacttccatgtgggccccacggcgcgtgggtgcacgtgtgacgtcgtacgcccgcccgttgatattttggcaaagatttgtttgggttcgttttacggcaatattgtttcgtttattctttgaatttgtttggagagcttaagattctgagaaacagctgattgaaagccagcttctgataatttaaaaaagctgggtttatcagcttttgacttccagttcattttttggattctaataactacatctttttataatctggaccaaaagttgaactatatgaggagcttatgattatgtaagaaactgctgcagctagaagctccccaaacagacccatatttacaaacgaaaataatttgtgaataaaactttttttatatatgtatctttagaaatctaaaagcaaagattgaaaaataaacttcgataaaaaaactttaaaatcaactctaaatttaatattgaaattttaaattttagctgataagtatgaattgaattctgaaaaaaaaatacgactagaaggtggcggcgtttaagtgtacctggacttgttcagctgcacgtaatcttggctgcgatctccccataagaaaaaggaaatatcatcacaaactcgttttggtccaaagaaggaaaatatatatattaatttattagtgtaccggttcagcacgttttagctttgtggtattttagttgaatttccagtgttaaatttggtcaaattttgctgagtaatcatggattatagaacatggttttcaaggtttgtcgtgcctaagttagaatggtcagtggctacctttgtccataaatcctttctctgctaaaggaaaattatactcaaacttttcaatccatgcacttagtttaagaatcgagtgatgcttgcttcggcctttttctgctacgtgaccgataaaaagacgcacggtataataaataggtaattttcctataatgtagtgatagagtattttattcttgctgcaaagctggatggttttacactcttgatgtatcttttttaaatgcggtaacctttaagattggtcgaatatcgtgagatacagtaaaaaaatatttatatatacgtaatcaagaccgacatagatatataaatcatatatctataattttcatgcaaagctcaattatattctaaaatggcatgtgtctgttgtttttcttttgttaattgagcaccgtccaagtgtccatcaagtatcatctctttggtcattttgattgtacagtattgtttttggccttttggcaggcacaggatgctcactgtgctcctccggttcacctcaaccgtccatccccaattccagaggtacaatcaacgtgaacagggataagatggatgcttggttgttcaaacattggacaagggaatcattaggttatctccaacaaagaaaccttgtccagtgtccatggtgtggtgatgtcgatggatttacatgatacaccatgctttttttattcagatacttactactctgtaaaaaaaatgaatttctatctacgagcctaaacacacatgtgcgtccaagttcatatgtaggattggtcttttttagatggaaggggtagtttatgttggaactttggtcataattcggcatattttaatccaaaataacaaaataataaatatgatatttacaatgggatttgatccagtgatagtggtgaatgtaatcaacatgagcatgcttaatgtagaataagcatcaacaatcacataataacacaatgttgacattgcgatgaacattaacagtaaaacttctaattgaaataatgtaagaaggttataccccaagaatggtcctccgctggagtttgaggcagtattgcctccgttggtgttgacgggagcctccttctccttgtatccagtgttgccgttgtctccagtgttcgacatattggtgaagatgaagtagatgttgacgaacagtgagtagtcgcgcgttgcgctccccaaaaacctgatagcccgcccgtccgtgcaaacgtcgcagcagcgcgtagtttcggaggcctactctcccaacgcgtgtgcacacactcgtcgggatgggattaccgtagcagcaacagcgttggaaaatggatgaaagtgtgtctcactattctcgcgggagatcaaatccattctcattttataagaggaatggaagatgaagagtaagagtcatggaatagaaagaggaatagagcaactaattgtcatcaactagccatgaaccatcctccactacacaaccatcaaccaacaatcaattaagagtaattgatgtaagttaccaatggaataggaagaggaatagagcaactaattgtcatcaactagccatgaaccatcctccactacacaaccatcaaccatccatcaattaggactaattgatataagttaccaattccctaatcaaatggattaattctcaaaactcttcatcccattgatatcccataaaagaatgaatacacatgaattcctagcataatgagccttggaatttatttgaattaattgatttaaatggatcaattacccaattaaatctatcagtttatactccctccatcccaaaaagaaccaacctagaggggaccgatgtatatggatatagagggtgtccacatatattgtcctaggaggagattattttcggaacggagggagtaagttgtttacttgttcttatcaatcaatcttaagctggctgatttctggccagctgattgactcttctactctcctttatttgcacgacacgtggcaaaattgtggaaagagcagtgagagactgagagtaagcacaagcacagagaaaaaacaaaaactatcaagagatgagaccaccagagaagtagggaaagaaaggctgatggatctctctggactgatcgattgatggccgaaacaaaatgagagacttttttggattagagttatgtccgtagttggtctttagaaaaccggctggcgaatgggccatcaagcccatgattgaaagaaaactaaaatatttctattacaagtaaagtgcgatgctctttacaaatactcctttttttcttaattgaagtacagctatatgcattacaaattaaatcataactcaattcagcttgagtaaaaataactaaactaaatccacaatgaattatttatacaagttcttcatgttaaattaaaataataaacaaattactccctccgtttctatatataaggaattttggttggatgtgacacatccgtataacgaatctagatagatatttgcttaatactatcttttacctattcctcaaagataaaggtcttattaatgagtttttaatttggatataagaatcttatttttaactttacgttcaataattaataggagtcatacggattacaaaataccacacgcaccaaatggcacatttgtttttagaattttgaaactacaaccagtcagtttttatcgcgtatggttatccctttagtttattatttaagtgatctagcttaaatttataagagacttgaaccgaacttatataagtgatgtagcttatataagtttattatttaagtgatatatatactagcttatttaagtgatatggcttagcttatggcccgttcttctatagttactagctatgatcacaaaattatcaccagcacacactttccaagtttctagacaatatgatttctctgagaactattttttatcaaatatgaatcatttttttgaaatttctaatgtttaatccatcgatccgttcgttccagagaataatctccataattaaccttaatttcatgtgtcattcatcacattttcaaacggaccctaaaccaccgtgtaagactgtcatgttggggcgagggggacaattttagatattcattaattaagactaaatatcatgtaacgacaaattgaattgtaaatgcgtatatgtccatgagatatcctagtacgaatcttaatctttgtggctttattccaagctccccctctcccatctaattaatatgatcttttgccatatgttttatcaaaagcgatggataactaatataaaagggcaatagatatcattccatacttttttcttttacaaagcatccacaaaagctccagcacaagtggtgaaactctatgttagtccaactccatccaatacaattttttttccatacatcccattttcttgcttagcagtacatcagtagtcattttcattattatcgccatcgatttcgctaccactccgtacaactttgccttaaatcgttgacttgtccgtcaaaataactcagaaagtcagaattaacaaaaagaaaattcatcaaaccatgtaaatccaccatgtttgagttatcattttctccggaccattaacgtgaattgtatttgattaccacgataaaaataacattttaaaaaaatcatcttcacaaatagcttggaatgagcggtttagtcaatgcaatagaaaaaaggttattttagaaatcatatatttagaagcatggagcaaataaccagtggcaagaatgcagggaaaaaattctaaaaagaacatggtcataaagctgaaaattaaggaccgagaaaacaatctacatatgcattgtttttttaattcttgttagcttattgttaacgataaaatttggtaagtccggagtaatcatcgacttagagtcagtatcggtttcagagtcctaaaatcggccgatggaagttatcaagtcgccaatagtcggatttctgctatattcggttaaggaaattaatctactaaaggaaggttatccataagcgaccgagtttaacgaggatgcgacatgacagtttatctattagttaggaatagtttgttagtttccttttatctttagaaaagtgtgtttagtgtccgataaggactttatgttttcctgttatctttagtaaagtttctttttttttgtcccacaaggtctagtatctacccatgggtataaatatatacacccggggtcattgtaatttactccctccgtccctaaatgtttgacgccgttgacttttttaaacatgtttgatcgttcgtcttattcaaaaaaataagtaattattaattcttttcctatcatttgattcattgttaaatataattnttatgtatatatatttcgcaaaagtttttgaataagacgaacggtcaaacatatttaaaaaagtcaacggcgtcaaacatttagggacggagggagtatctctcaatcaatactactctcagcgcatcgccaccttcttttctgatgttttacttattaaccggcggaatttggcacctgacgcggggctgcatcggttcagttcgatctctggcgaaggggtaagtcctacgttccgtcggccctagtatatctatcagctacattggtgttgttcaaggctgcatcgcttcgatatcttagatcgctctggtttggttgatatatttgcctacatgatatctcaattctatctctaattgcattgtgtttagagacgcatcggtttagttgggactgtctcggttaagtctgatcttctgtcttagccaatatatctctacaatcacaattctattataaatagatttattatatccatcacattagacggatctatcggctcatcgagtactatattatcatatataatctcgtgctgcatcggttaggtccgacctactagattgttgttgataatataaatcttactaagctgataggttcatgctagtgttttatcggggtgctagccgataagttatctggacattgcatcagcttacaaagattacaaacaagttggatttagccgattgcaacaaaggtttcactgtttatctaaatcgattggattttatgacatcgaacttttagccgatgtatgctttaaccatcggatcagtacttatcctatcatattaatattattattattagtcgattggtttttattggattatattattgttatattttattaccagccgattgtcattatatcattatctacattggacatataaccgattgctcaaaaccctatcggcatcggctgaaatcggcatcggctaatatcggctatcggttggaattactccatcggcttgtcaggtgattggctgttttatctgttgtttacctatcttatcagttgcatgatcaaactgactggtacgcccgtatctcatcaacctttggacctgcattggagctaagcagatctcctagaccagtgtgtgttttttgcatcaacacttatcagacgtaactctgaatttaaattttactagagatgattttaaggttttcctatggtagtttgtttatatattcgctttaatattaagaacgcatgtataaaagttttatagcatggtacaattttccatggttttcagctgaggagcatgtttggggagcttttgatttgagaagcaggtggttgctagccaacttctaaaaatctataaaagttgggttttctatcttatagtttattttctagattctacagctacattttcttaagacgtaaaacatagaaaaaaactagattatttagagaagcttatgattctagaaaaaactagaattcttagaagtttcctgaatatcggaggagtactacccctatgaaacggacaaggagtcgaataggaaaccaactcctctaagggcctgtttggtagagctccaactcctaaatttaactccaggagctgagtatagagtggagttatggagctgtctaaacccaactccacctctctagttcattttgtgagggtgctctacccagttccgctctcattttaagtggaactgaaaccgtttggctatgcttcagctccacgagaggtagagcactagagttggagttgtgctaaacatgccctaacttagggtcccgtttggtagggctccaaacttcaactcccaactctaaagtccaactccaataggagctagctcctataggagctgaaggtgggcatgaaagtggtttactagattggtcagttccacgccaccatatcctgtatcgctatttcgtcaaacacctagttggtgttctgtggtcttgccgacgttgtcatcgctcagctaaggctagtcgctgccgaaccgctagccctagctggtcaagggaggatgaattgtggggaagagagatagaacgagaggagaaggggtagttcaatgacatatcgcgtaaacacatgaaaaaaaaataaaggatagtaggtcttttagggtggagtggagcgggaaaaacccagctcaaccctcgtagtatgattttgtggagcaactctgctacctccgctcaaaaattgaaacacatctctaactatagggaagttggagttgagagctaaaaatgtgtcaaacgggcacttagttttctcttattttgagtggcttgatgtgtactctagatacgttgagtggtacccaccatcccatataaaaggccgtaaaagagacgagagactgtttgcacgtcacactcacaaaagcctatccccacgaatacgggtggacagaaaaagatcgaaccgaaaagactgagaccgagacgagaaattcggtcatcaattcggtactaggcagtgaaagaccgaattttgttcggtcaattcggttagtctctttggttaaccgaatataccgaattaacagaaaatgcctaaatgtaacctacagtccactaagttcaataggattaaactataactttcacatccctacttcttctaggcatgcaatctaataagagtctttactcatacttgcttacggattttcttttttgtgatttttgtgttgaaaatttccattatttctttgcacatatgaaaataatgctgaatttcggtcagaccgagaccaagaccgaaaagatcgagaccgaatttgtcggttctaacattttttgcgttgaaattctgttttcacttttcaaagaccaaagatcgagatcgaaaatttcggtcagaccgaatgcccacccctacccaagaagatgaggcgggcgagtgtgcggtgctgtggagtggaggtggtgttgcctagtggagtcgtgcagaaggagaatagatggggattgggatttggggagggttgactagggttagaagatatatatatacttgttcattgggcttcaattctatgggtcaaatgacggataaattttagaattggtccctaactccaatgaatacatgtcaccatggaagatgggaatgggtcccgatggtgatgagttttgaatcattaaatttcccataaatgatagatatcaaccatccccatccctaaatatgaattcaccgtggggaatcagtgattgggtcccgttgccgtctctgtacggcagtagtacaagtgagaggaggtttttccggttgagtggtggtacccaccatcccttataaaaggcccgtaaaagagacaagagactgtttgcgcgtcacactcatcacacaaacacaagccccatccccgggaagacgaggcggtgtgtggcacgtcacgtgccccaccccgct

SEQ ID NO: 7720 - DNA, 37500 bp, Oryza sativa
ggcggacgcagtcgagcaacgtgggcgggggcgtggcgggagagccagcgcgcgatggcggtgtcggcggcctccatccggcgggccagctgggcggtgcggtacacgttccaccgcggcgccgacgcggcgcgccgcgccagctccagcgcctccctcagctgcgccgccagctccgccagctcgccggcgctccgcccgtgcccccaccctcctcccccctgcgccgcctgcggctgcaccagcggcagcagcggctccacgttccggcgcagccgctccgccgtcgacctgcagaagaacgtccccctcaccgcccgcagcagctccttcaccgcctcccccgccagctcctcgaacagcctctccatgcctccacttcttcaaaatcaatccaacacaattctttccctgcctcttcttcttcttggatcttgggatgatgaaatcaattgcaatcgaacagaattctttctattctctgcctcgtcttcttggatcttggatgatgaaatcaattgcaattgaacagaattcttcctcttctttgcctgtctcgtcttcttgaatcttggatgatgagatcaactgaatctctttgaaattgtttgtatccctctccctcgtgttcttgggggtggcttggctcagccgggtaagtggtgggtggtggccatcgccatggaattgaggaggaggagttggagaagagtggaaaagaagaataaatataggaggagatgagagagggttggaggggtcaaccgccgcggctacgggtcactgacactgccagttaccgtgtggggcccactgctcagtcagtctaccactagtattagtacactgcacattgaattactactactgtattagtgggacaaacactgttcaaggtttaagtagaggagctgatagctgacctaaagactatgatctgagagcatctttgatcttggctttgagtcaaggagcaaagcaatgggtgttaggggtattagcagtatgcattagaatggttcaacatgtaacttatgggcatggtgatgatgattttgatagattatggatatagagaaaaaaatatcagttcataacgatgaactaaatattataaaaagcgaacaaataacttttaaaaaacgtattttagaagtgcggcccaaataatccataccaactctattaatctcttagaacacgccattacagtttaatagctctaccaaacgacatatttacaaatgaaaaataattcgtgaataaaacttttacatacgtgttcttaacaatcaaaaaacaaaggctgaaaaataaactacaatgaaaaaaaacctcaaaatcaactctaaatttaagattgaaaattcaaattttggctaataaatataagcataagcaaaaagatgaagccctaaatctatttatgcataacgtataacagggcatcagtatgtatttgttagcgattagcgaagtcatttattcaccattggcatgtgaggtttcgctcagggtgatgctaggaggataaccggaagagtatcttgcacccaacaattgaaggtggacaaatggtattctaaaaaaaatggtattcttttctccgagggaacaggaatagagctcttgcaatgcactataaaataaaagaattgattcagtttataaaggaaaccggacccaaaaaccttacaacgacacggttaattttagataggagttggattccttctagagaatttgtagtaggtcagatgaatgcagacttataggttagcacgggtgcagtggtggaagtagtacgtgagtactagatatatatgcttagggtgaaggaggagatgcgtcaaaggcaccacaatggtggagaaaaaaatggattcccaataataatacaaggaacctagctaggcaatgaggacgtcgccttcgatggcattccaccacacatcgcttgcagaatttcacgtacgagcatgttaacataactaagtgttgaattggtggtgccgttacggtgactttgtctatggtggtattttatgtgtgtgtggttgggtggggtaatgatgatcatgattggcactatagtctactcccttcgtctcaaaataaaccaatctcgtatatgatgtaacacattctagtatgatgaatccggatatctttgtgttgtatccagattcatcgtactagtatgtgccacatcccgtatgaggttgatttattttgggacggagaaagtacatcctagaaggggagccgaaaccacatccgttgagttgaaattaagatgcatgttactgaagatagtttgtcacgcaccttgcttggaagatgatgtgcatcctcgtccgtatgatccgaatgcaaaaaattgtatctatatatgcatgcacatgtacgtctgtatgtgcgcaatatacattaccttacaaacaaaaaagaagaggaaaaacaagatgatccctagcacatatggctatccatcaagccatattgttgaagaaagtcattgcctacgcctccttgcctttgattttctttttccctgcgtccacctctgttgactctgtttgctatactgctagaaagaagagaagatcaggatatctatacatcataaatagcagggcatgacaatagcatcatggggactttcatgagcagtacttgagcaattaaatgagcatcaacaaacttctctatgggctatgaccaagcaatccaatccaccaaaggacactgccctcttgtattattgttttgtgacatgcccaaaggaggagtccatgtccttttgtttcccaatctaatcataatctctctgttcttggtctagatcaatggtggtacgaaggaattaaaaggttgttgaatttgcgagagattatcgcaacatttttgagatctcccgattcttgttacttgttttttataaaatggattaaaaaatctatgctctacatccaactggatgtatacaggcttgtccttgttagttattattaattagaacttttgaggttaaacgtctcctttggtaacatcaatttatgatgaacaataaccattgaaattaaaagacaacatatatgtagatcgaatggagggatcttgaaagaaagagaaattcaaggaccctctcggattcatcatgtactgttgccaacgacaacaaccagatccaaaaccggccctgatatggctattacgaaccgacactgataaggtaaagcacggtcactcctatacatgggtggatctcaaaagaaaggaacgcggtttgaggaccttccaggattcatcatataccattccaaattcagtatagccttgatcatcagtcatcacagtaggtcagcatggttgctctgcctgaagccgaacatgccaatgaagccgaacatgacaagtgatgatggtgacgaaactgagaagaagtcggctaaatggcctgatatccggccataactgtagcataacctacaaagcatttacaagccttcaatatgggtgtgtttagttcacgctaaaattgaaagtttggttgaaattgaaacaatgtaatgaaaaagttaaaagtttgtgtgtgggaaaattttaatgtgatggaaaagttggactaaactcggccacactgtctgaactcctctcactctgcaagcacgtgtgatgttccaccggccagtatatttctaaaagtgaacattattgtagggttttatattttatcctccaaggtgtgaatagaacaagctttaattttatatgaagaaagagtgtctaagaatatggactctgctgaagtacttttttttaattcacgaaacccacaattttcctcaaagtggttatataatatatgatgtgacataatataatatatagcaagtgaaagtcttttctgaattgattctggccataaaatttcgaccatcgcctatgaaaaatttataatatttgtgtttcatcgtggcatacagtaacaaatttacactcatatcactattatgttaggaacaactaaattagaattcatccaacgtattccaaatagtaaattctcccattgcaaatagatgtagccatccagtatcttcaggacaatcacaacagtgttttttactacgaaaaaaactgaccaatgccatggagatgccaaagcactgaaagcagtagaattattggatagatatatagatgctaatgagcacatgctaaatatgtgagttgttgtcaccttgcaattagaatatgccatccagctgcaacatccaatccaaccgtccctttctcccaaatggttttttcccattaaaattatcagcttaattataattccttaagttttgattcccttcaatgaacctggtcaaagttttggaccatggaccagcaggccatggaccttgactataaactccatctactaccacacaagaataaattgaagaagggacaaatttttttttgattgctgaaaattgtggccatttcacatacatccgagctagatgtgaatttatttgtaaaaccacatgtgtgacagatgaatacatgaatctaatttcagacctttcatcattttcttttcagcttatcaatcgcaacaaaaatttaaattttaaaacttaattttagagttaatttttatgtttttttatcatactttaattttcaacattagcttttaagtcactaagaacacatatgtaaaagttttatccataaattatttgtaagtcactagtaatctttacggcttataatcaactacaggtgaaaccatatgacttgccacaaggcgtatcaccatactttcgagacttaatttgtggtatagtaccaaactttccacctagtgttattttgttagatcatttttggtttttcatctacatggtagcttgttttcgactgaagtctgaaataaggcgaatcatgatcgcaatcgaagcggaaatcgaattcaaacgagggggggggggggggaggtcaaaaaggaggaattgttgctttgcagcaatcaaaaccattacaagatggatggatgtgatcacagtttgctgccttttgccgtgtgtgtatgcagatgtggctttacagtgccaatttgtgtcctggcacgaggcagcagaggctacacggcagtgaacaaaaaaacgattccttctgctgcatttaccagggaatatgacgcagcagcagctgcagatggcaattgcaattctgattctctatcttaagtgaacccatcgcttttcttagccgaatgattgtctttttaattaataaggcctcgtgtgacacaggagataaaaagagctcttcaggtcgtgttcatagtacccatcgtcttcgtcgtcggttagggcctatttggttgcatgcatgatcttaatacgaaggacgagtgtttgaaatttctaaaatcttggactcctccggcacgcaactaattcgtctgaaattatgtttttttgaatttagtcaaagtttgtttaaagttactaaaaagttgtttgaaatttccgagatctcgtaaatatgtaaaacgaaatttcaaaccctcgacggtggaatattttctgatgcaagatgacaggaaaagtgtgccacaattgttggctccatttatcaagcgacatcgaaatcacagtaccatcaatagatttattgggagaaattaccttacttgaaagttacagctttatataaggtggagtatagtggggaatattgcagggttgaatgtaattggtgaggtgatgaatataaaaaatggatgtggagattatggatacctcatatctatatgacagttatactttagtcggatatatggtaccaaatatagatagaatatttttatggggactcgggttagtttttaacttgtatgtcaaggaaatacccgggatcctagtcggttacgattgtattttatctataatcccatattccgttaggatatggactgtattttgtaaagcggattccttcccctatataaggagggtccgtgtgcctcttggggggcggttcttttttctagtttatacaatcaataacacactcggcggaatcatccctggacaggagtagggtattacttcttgaataagaaggcctgaacctgtataaaattccttgtctccaaacccatccactttcctaacttgatagctacccccttttattattgccgaaatcttgtttcgacagttggcgcgccaggtaggggcagcgtcaagtttttgccgactaagtgcgatgggttccgtttctgtcaccaacgacttcgccttccctcccgggcaggcgttccggttcggcagcctcaacttcatcaccaaaaacttcggcaagatctctctccttgactcggattcaaaccagtcggggagagaccaggtccccatgccgttcggtattccgaactcggccaaagcctacgccaagatcatctctcccgagtcggcttcaaaccactcggacgagatccaatctatttttccacgaccagatcaagacgacgggtcctatccctcaatcctgatgaaacttcctgatgatttggccgctgtcttcacagtcaagacatctcccactcgaagatctaggcgagctccggctttagccccgatccgatctagatccagggaggttggcgttatactccaacctcttgggacagtctcgacggaagagttggatggctacctcagctcccccggcgtcagttctcgaccaaccgagatcctcgactacgacgacttcggctaccactacgaccacggtgacctcgacaacttcgacgacagctatgaggataactacacgcccctcttcttcggcgtattcatggctgacaacgaaacggaggaacagcgccaagcctgaggagcggacaaagatcgcgcacggcaagaagctgaacgtcgccgactggaggaagagcgacagcgacaagagcgagaacgactacagcgtgagcaacaagatcacgaacggattgcaaaggaggctgaagatcgacgacaacatgccttggaatctgggcggcgagcgagagagctcattgggcaacaagacgtcgatgggacagcggtttttcgcaccccccagcagaacgcggttgcagcgatcactctcctcgacaccctcctcaaggaagacgcactcaaccaagctgatcatgtagtcaacatcttgaaccagacgaagaccatgatcgctgcctcggttccagccaactccgcaagcacccgcaccctgactggtagccgagtccctcatcttcgatctcaagactatcaccagccaagcctcagcattgccggcgtcgaatctagtcgcaggagcaggggacatgatgaacggtccgttcgctcgcctcccgagcgatatagggagcgccgagttgaacgaccacactccccacatcgaaggcgccccatcgatcttcgcgataccatcaatcagcgctgtgcagcaagaggccatcattcaccagatcgctacgacgacgacgtggacggagttgctgccttcacaagcgacctgtgtcgagtggattggccagccggctttaagccgactggaatcgagaaatatgacggcaccaccaaccctgagtcttggctcaccgtctatggtctcgcaatccgcgcagcaggaggagacagcaaagccatggcgaactatctacttgtggccttagcggattctgcccggtcatggcttcacgggctaccccgcggcacgatcggatcatgggcagagctacgcgatcacttcatcgccaacttccaaggcacttttgaacggcccggtacacactttgatctctacaacatcgttcagaagtctggagaatctcttcgagattacattcgacgcttctctgagcaacgcaacaagatctccgacatcaccgacgacgtcatcatcgctgcctttactaaaggcattcgccacgaggacctagtcggcaagttcggacgcaaacctcccaagacggtcacacagatgtttgaaaaagccaatgagtatgccaaagccgaagatgctatcacggcgtccaagcagtcgggcaccacttggaagccaaagaaggatacgccgaccgcaggagggagtggaagtaacaaccacaaggatcgcaagcgtaagcccgaagaacttgtggcgaccacctctccatcttcccgacaacgttcccgcgtcaacaccttcgacaagataatgaactcccaatgtccgcatcatcccaactccaaccacgtggccaaagattgcttcgtctacaaacagttcgcggagcaatacgttaagaacgcacgtaaaccctcagacggagatcaaggcacatcaaagaagaaagatgatgaagacgatgccccgcctggttttcaagatcatcgcaaagaacttaatcacatcttcggcggacccctagcttatgagtctaagagaaaacagaagctaacagaacgggagatcaatgcggttcagcctaatacgccccaatatcttcggtggtcagagatagcaattaagttcgaccgctcagatcatcccgaccgagtggtccggtaccccctggtactagacccagtggttcgcaatgtcaagctccgacggacttttatcgacggtggcaatgcactcaacatccttttcgctaagaccctggacgatatgcagattcctcgcacggaattaaagccgagtaatgcacccttccacggtgttatcccaggattgtcagctacaccactcggccagatcactcttccagttaccttcggcactcgggagaattttcgcacagaaaatgtttgtttcgaagttgctgatttcgagacagcatatcatgctatacttggacgaccggctttagctaaatttatggccgtcccacactacacctacatgacgatgaagatgcctggtcctcgaggagtcatatcactacggagcgacatcaagcaggccctcacatgtgacaaagaaagttgcgagatggcccaaacccacgagactactcttgcccgcgaagagatccggctgactgcgaccacggcaagcgagggagaagtgcctgcaaccaagctgacgaagaccgaagaaagtgatgccaagacaaaaaagattcccttagatccctctgatcttgataagactgctgtaataggcgctgagttagattgtaaataggaaagcgcgctcatcacctttcttcagaataataaagatatttttgcgtggaaaccatccgatatgcatggtatccccagagaggtgattgagcactctttacatgttaaggaagacgccaaacccatcaagcaacgactccgccgttttgcacaggataggaaggatgcgatcaaggaggaattaaccaagctgttagcagcaggcttcattaaggaagtccttcatcctgactggctagctaacccagtcttggttcggaaaaagacagggcaatggcgcatgtgtgtcgattataccgacctcaacaaatcttgtcccaaagacccttttgggttacctcgcattgaccaggtggttgattcaacggccggctgcgagttactcagcttcttggactgttactcgggatatcatcagatccgactaaaagaatccgactgcttgaagacctcgtttattacaccctttggggcctactgctacatcaccatgccctttggattgaagaatgcaggagcgacctatcaacgcatgattcaaagatgcttttcaactcagatcggtcgcaatgttgaagcttatgttgatgatgtagtcgtcaagaccaagcagaaggatgacctgattgcggatttagaagaaacttttacaagcattcatgctttcaagatgaaactaaacccggaaaagtgcatcttcggagtaccgtcagggagattgctcggatttatggtttctcaaagaggcatacaggccaacccggagaaaatcaacgccatcctcaacatgaaaccgccaagctcccgaaaagacgtccaaaagctgactggttgcatggcggcgctcagccggttcgtctcacgactcggtgagcaggggatgcccttcttcaagttgctgaagaagactaacaatttccagtggggacccgaagcacagaaagcctttgaagacttcaagaaacttctcaccactccaccagttttggcctcgccacatccgcaagagccgctactgttatatgtgtcggcgacctcccaggttgtgagtacggtcctggttgtcgagcgtgaagaggaaggccatattcaaaaagtccaacgtccaatttatttcgttagcgaggttttagcccactccaagacaagatatcctcaggttcaaaagttactatatggtgtcttaattaccgtcaggaaattatctcactactttcaaagtcacccggtcacggtagtcacatcgtttccactcagggatatactttataaccgcgaagcaaacggatggatcgcgaaatgggctttagaattgatgtcttcggacatatcgttcaagccacgaacttcgatcaagtcacaagctttagctgatttccttgccgagtggaccgagtgccaagaagacatgccagaggaaaagatggaatattggactatgcattttgatgggtcgaagaggcttacaggcactggagctggggttgttttaatctccccgactggagaaagattgggctacgtattgtggatacctttttctgcgtcccatgacgtggcggaatacgaggcactactccatggattaaggattgcaatctctttaggcattcgccgattaatcgtccttggagactctcagttggttgttaatcaagtcatgaaagagtggtcatgtctagatgataatatgaccgcttatcgacaagaggtacgcaagttggaaaataaattcgatggactcgagctcacccatgttctccgacataacaatgaggcagccgacagactggccaattttggttcaaaacgggaagcagctccttcagatgtgttcgtcgaacatctttacgaaccgaccgtacccagaaaagagacagtcaaagccatggatattcaaggcgtaagcatgatcgaagctgactggagagaaccatttacaaaatttctgagcaaacaagaactccctcaagacaaaaatgaagccgagcggatttccaggcgcaacagactttacattattcatgagactgagctgtacaagaaaagtccatcaggaatactgcagcgctgtgtgtctttggaagaagggagacagttgttgaaggatatacattctggtatttgtggtaatcatgctgctgcacggactattgtcggcaaagcttaccggcaaggttttttctggcctacagctgtgtccgatgcggacaagattgtgcggacatgcgaaggttgtcaattttttgccaggcaaactcatttgccagcccaagagttgcaaaccatcccgttgtcctggccgtttgcggtctgggggcttgacatggtcggcccgtttaaaagggcagtcggcggttacacgcatctctttgtggctatcgacaaattctccaagtggattgaggctaaaccggtcatcacaatcacagcagataaagctagagattttttcatcaacattgtgcatcggtttggggtacctaatcggatcatcactgataatggcactcaattcactggcggagcatttaaagacttttgtgaagacttcggcattaaaatttgttacgcctccgtggcacaccctatgagtaacggacaagtcgagcgcgctaacggcatgatactttaagggatcaaagcacgagtttttgaccgactacgtccctatgctggcaagtgggtagatcagctgccgtccgtactttggtatttacgcactactcctagtcgggctaccggccagtcgccgttctttttggtttatggcgcagaagcaatgttgccgagtgaagtggaatttgaatcactacgatttcggaacttcaacgaggagggctatgaagagggccgagtagacaacatcaatcgactagaagaagcccgagaagcagctttaattcagtcgactcgatatttgcaagggttgcgccgttatcataatcggaatgttcgatcgcgagcctttttagtcggcgacctggttctgaggaaaattcaaacaacacaggatcggcataaattatctcccttatgggaaggaccgttcataattgctgaagtcactcggccaggttcttatcgactcaagcgcgaagacgatactctcatcaacaattcttggaatattgaacaccttcgtcgattttacgcttaggcatttcgtttggatctttcctctttgactgctaacttcaagtttttccttgaagttttcagtcagggggctactataataataatggagtgtgatttttatcaattcaatttgcttacttgatttatcattgccctgtttggtctttcaacttagctaatgaggactgaaggtttttaatagcttttgcgggttttaggctcaataaggcttcacaaaggcttttaagaaatcagaagctaagtatggaacaccaagcatagcataaattcatcagtattgtacaaattgagcctccaccgtcattgatcatcaaaatcattgttatatcaatcagtatcagttttttcatcgttggacttatcaaacccagtcggctgaaggtcgacatcttggaatctctcaactacatcagcagcaatcttgtcagcggctttctgcgcattactgatgaggtcaagcgcagcttcttcgctcgtcctgtctgcaaagccatcaatggcatccatatcaacccttggataaagggatttggttatcaccaacgccagacttgctcccatacttccagcttctttgatgttcttgaaataagtatctggagcgactcttagcttgtcgaagatttcggtagcatcaagtgtactcgaaccggcgttattgaagaacatggcctggatgagtggagtagcggcattagcgactttatccctggctccttcaagcttgttgatcttgtcaactaagacatcaaactgtgcttgagatttgatcttgcggtctgcatcaacagattcacattaatgaatcagcatatagaagataatggctttcgaagtattgattattggtaccttcaacctcctttaaagccgaatccctctgtcttgccagctcagccttgtcattttccagagtttggatctgcttctctagttgagatatcttggcagcttgcactacattaacttcggttaatcaagattacagagataacagcgcaaatcagttgggcagagtttgcgcgaaccttttgatgagccactcagttcgaaattggactcctagagctcagcaatacgatccctcagatcgtgttcattcttcttggcaagttctctggcctcgtgcagttgactcctggtggcttcgagggttccaagatgaggactattctctctagggtcgcggttttcgcctcgttcctaagatgaatcagcgctcgagccagatggcaaacaagatggctgaggtcaggcgtcaaggaacttacatttacaatgcgagtcgcttggttgagtgcctttttcagtaggcagacctcttcgtcttctttttgccggtttattacaattccttgaggttgcaagttgtcatcccaccacttgaccagaatgggagggcacgaatcttcggttgctcgtatacgggggatttcttcttcatcaccaatcattggtcctaatgtattcactgacaaaggttagacaattgatcagagttattcaggtcaacatggtttcagacaaagtgtttacccgtattgatttctggacgaggatgagtggattcggatgcctttaaaggagatccagatctctggttattgctggcgttttgtccgcgagggctgtctgcttgggtttcgacttctggttatctcttggcttggccctgcgtccgactggtttccagtcgggggctcctgattaaatccggcttcggcttcggccgactggttccagtccggggttgatcaccggattctacattatcggttgccggctgattgtcctcggatgatccccagcagttggcccggtttctttggaagaacttgtgtccgtgttagtcgggtcagagtctttcccagacggatctatattagatggtttcctgcaaatttgattatcagtattattgccgcaatgggtgtgcatcaatgcaagagagatcgttatatgagttgcacctagaagacttcctgatctttggcacagggcgactggatgtttctcttccttggagtagcctgttttggtagtttcttggttgtctctcggtctccaggcctcctggtggtatcatcggcttcgtcatcacttagaaccagctttctctttcaagaatctgactggccgactggatcagaagcacttggttgagtttcagaccgaattcttggtcctccgctcccttgcccagtttgatggcggggagatcggcgttgagcgattgggggatccaacttcatcaaagcaaactcctgggtgtaatatccttcattgttaactgattcaacaagaaaacaagatcatattttgagaaaggttgaagtgtatgaatacgtaccggtggaggaggattgaatgcattgaacggtacgactggcagcaagtgtgagtagctgacaacgatggcgtttgagaagatcttatacatcctttccttcatgaccttgaagtcaagagaatctggatcttcacggtttgggtcatgcttgccgtcaaattcaaaggctgtgcgagatctttctttgattggagctaaccgacacttgataaagtgccgggtgatttgttctccttaaaggccctgctctttcagctttatcatcctctccatcagttctactgcttgtgcagcttcatctcccgttggcagtgagttccaagtatcccgataaactggaggaagacaggagtactcgggaagaacaggctcggggttttgaacataaaaccagtttgcgtgccagcctttatttgaggtcttgaagggcatggagaagtatttttggcttagtgttcccctgagttggaaaccagcacccccaacgacgcatggtttgctcttatttggctggggcttgaggaagaagatgcggcggaacaaggcgaaatgaggcctaatgcccagaaaagcttcgcatgcatgaataaaattggcaatatgcactatgaagtttggattcagatgatgcaagctaatcccgtagaagttcagaatgccccggaaaaatcttgaggttggaagagaaaatccgccatagaagaaatgagcaaatactacgatttcgtgtgtatcgggggtcgggaatgcctcaccaaatgccggtcgccacccaatgatctcttttgctggaagaacaccgtgcgccaccatttccttcagattgtcttccgtcacattggagggcgcccactgactctcgaagctttctctttcttccgccatgaatgtgaactggatggtctgatttagttcgagatatggctagaaagggatggggaatcggagcgatggatgcggggagaaattttgtaaagtttttgagagtggattggagcggattgatgaaccctagtttgcccggcgcagttttacactgtagcaggaaatggggaaaatggcgagagtctcggcggggaagacaaagagacgtttttcactttggtattattagggtatcgggagtactaatgggcctgggcctgtacagtacttcagcccaatactataatcagcgtggcctgttgtgatccctaaggacttaggcactttttgctttggcaatttgtgttcacaatggtgtggcccaatgctgttaaaatcctttttaacgcgatttaataattctttgaaattattatgatgcacataaaaaggtgcccgacagaaaggtgttatatccttttttgtaagctttattaggttgcaaaagctgtttgggttgatttgagatgactggtttattaatagtcattcttttagcatgttatatgcttattttggttatggtaagggtcacagcctaagctattagactcattaattaccatgattttctatcatgtttggtgggtcattttatgagatttttacccggattcctatcaaacatgtctatttctggacctttgagtgtttatcactcggcccttcttgtattttttgtccttggtgtgttcaagttgagaagcaggtggctgggtatcttactaagtaccatgcgtgcttcgctataaaaccacttggttcttgactatatgtttagtttttcaactaatcacatagtcgggggctacacctaattaggtgcatctactcgatgcaccatgttttattttcgcccttcacagtttttgatttttagtactcggcaagctagagcaagttgaattgaagcactcggactattgttttttgtttcgagaaggttatttcgtcaactgcgaaggtctcgggggctactgtggagattatggataccccatatctgtatgacagttatactttagtcggatatatggtaccaaatatagatagaatatctttatggggactcgggttagtttttaacttgtatgtcaaggaaatacccgggatcctagtcggttacgattgtattttatctataatcccatattccgttaggatatggactatattttgtaaagcggattccttcccctatataaggagggtccgtgtgcctcttgggggccggttcttttttccagtttatacaatcaataacacactcggcggaatcatccccggacaggagtagggtattacttcttgaataagaaggcctgaacctgtataaaattccttgtctccaaacccatccactttcctagcttgatagctaccctttttattattgccgaaatcttgtttcgacaatggaggatgaatggctttgtgtgaggggcaactttgtgtggtggttgcagcaagagggtgtcaccttcaggatccatgtcaatttcccctaacttgaaggttattttgtcttttaagtcgatcacttgatgcttcactctaaccactgacatcgtcctcaacatttcaactgattttagaggacatatataagttatcctcatgtccaattcagggcgattaaatcaagctaatcagtcactaggagcttagtactgaaacagtcttcatactttgaaagatcaaggaactcttttgcccttttttttttattaatttagaggtggtgtctctttgtgttctttagctcaaaatgcagaaagttaaaatgtcatatatgttaccactctagtcgagggagctattagaagttgcagcttctcatagaattttcatctctcctaaacggcctagattctaacctgtattatgagaatctatagttgtaaaatctagaaaataaactagaagttactatgagaagtggaagctgaaataaattgttcaccagtaaaatctatagtagtagaagctgaaaatttgttcaccagttgagaaactcaaccttttcaggttttcatggcttaaatatgttcttcaaagtccaaacaagtttgtgaatggacaattttctgtgcagtgtgccaaccattgttggttatgatgcagtagcctgaaggctatgaccagaatggtctttctgacgtcacaagtgaactgtgttgaaaccggagtgacaagcacatgcttttgcattaccatgagcaagaatttcaaagataactgaaaatgtgccctccactaagtgtgttcttcagagtcctctccttcctgcaagtctgaaccttgaaagatgataagctttgacccctaaataaaagatagaaaaaaactcgtgctggatctagttgcagttgaaccgtacatgctcattactcacatgcatgatgcatctccagcaatctctctgacagctgttgtctatagtactaaaaaaacccaaacatagggacaattatggttcattgtatctgattctgatctcacttctgctgaagacacacatattttagtatatctctctctttatttttgcatggtaagaagcgatatatcctactctctctagtttttaatatatgacattattaactcttaccataaatttatgaccatttatcttattaaaaattatgtaattaacatttattttgttgtgatctgttttgatactttaagaaagatttatattgttgcatatttctataactttttacctgaaatttatataatcttttaacaagacaaatgtttaaaagttaataatgttatgtatatattaagaagcggagggaacagcacacaagattactactatgaaaggggaaaaaaaacggtgaggatgtcatgcagccaatcagataagaagctcctgcaatcatgtggtcttgagaagaggcctaatctgtgaagcaacatctagaagctcacgtggtgaatttatatactattctttgaatgagtgaaaaagaagaggaggctcatcaccaaaagggtggccactagcaaccaatagtttcttggcagcgacatcaaaccacaacaactttcgctagcttttaggtcagcaattgcggttggcatccagcgaaaatatccggatgcaattcagggctatcttgctagcatatgtaccactgttttgtgtgcacaagctagtttgtaagagaagccttcctttcagacacctctttaattacaggcagtccaatatgctagtcacaaaggagtaagaatgaattttcgcgatggtcactgataagtgggtctgtggacgaattcgatgttttgcttggtccacttatctcaagatagtgagtatggaaaaatcgatgttactgttgcgcttaagatagtgagtatacatggaattttttgcgaagaagataattgaaatacttcaaacctccgggaatttgccccctccagagaattttacgctggcgtggccaccggcgtgtgccgacgcgtcagcgaggcgctggatggcgggtggtttttgcgagttctcgggcgtccgcgtcgtcgctggcgattttgcaaaaacgcccttcatttacctaataatttgtaataggtccctaggccttagttttaacgttgtgctttcttacttagaggacctctgaagaaaacaatattctataggaagaagcgaaaaatcaaaaaattggactgcgctctgaaaactagaaggttaggggtgtttttgcaaaacaaaaacaaccctaacccccttccccaaaccctagtactcttcaaaaggaatgaacttttggtgtccaatttacaatggttaattatgttgctgtctctcctcaccaaaaaaaaaaaaaaattatgttgctgtcatgctcatttgggcaaatcaggaagaccagtaaattgtttcttgcactcatgatgctgatggccatgcacatatagcactctcttgatctccaataatggctgaagatgtgagaaaggtcgccgtttgcatgatattctatattaatctcaaatgcgatagatcatcatgattaggaatatattcagataacatacaaaattaggcagcagaattgtcatcatatctctcttaatcaagtgacaccttatcagatctaggacctaattagggctctgaacctctgaaaattgcagaaatctctggatcaaaacctgtcgaaattaacaaggatgtaccacatgcacatgaaatgtgcatgtgtgcaaacagtcgcatgtacagtgttccgttttccttggtcaatttttgtacaccaaactttcaagttagtagttgaaaaacttatggtgctttagaaaataagggaaataaggttctatacatatatacttggagaagagaattagtatcgagttaacatgacaaacttataattacacaatttcaaagtgcagccctgaatgatttgagagaaatctgaatgaagataaccatagatgacttagcttctgattgactatccgagggacagtatttgaactacatggctaggacgaggagtcggactccaactcgagcaatcgcgcctgaaagcttgggcaacgacaaacctttaaacatgagaattcctgatgcttcacaaacctacaattgtaaattaagacattagatcgatcggacaccatgatcggttcatttcactagcttagcttgatcagcttgcatatctctattcctcaatcttcacttgctctttttatgagacaaactaccgcaggggatcacgattttgcgtaagatgtactgtttttttttaaaataataaaaatgatttccatctttggtctctgccaataggtatacaactataaataagatgtactcctttggtttcgtggaattattcagcacctaatatttgaagctcggttgtgagactaccattgcttggatgtgcgtacatgtcagcattcaatcttagcccgtaaatgtttagtcagctacttagttaaagttaaagttaatggatttcttttactttactccaagattaattggatcatccattttatgtagatccaatggttgatattcttattggtgttaaagtaatcgtacatcttgggaagtaattttgagtacccattgtttaaaaaaaatgctaggacaagagaattagtactctatccgtcccaaaataagtgcagttttgcactatttatgtccagcatttaaccgttcggcttatttgaaatttttttatgattaatatttttgttgttattggatgataaaacatgaatagtaatttatgtgtgactaattttttaaatttttcaaataagacggacaaacgtttaaacgttggatacggatatccacgactgcacttattttgggacggaggtaatattgagttaacataacatacttattacacagtttcagagtacatgactgaatgattggagataaaatcaaatatgtgaacttccaataattaaccctacttgtataaatcagccgttgtacagaacttttactaggaagtttttttttcttccaatttaccgcatagatacttctctcaggagtgtaggataaacacttgtatttctttcttaactgtaagttgctgcgtaatgaaacgaaaagctcagttacctctactctccctgctctgcttgtaccagaaatgagttctgattgaccatccgagggacagtaactgatccacataagagtcagactcaaatgaggggtttgctcctaaaacattgggtaattacgtaccaatgttttttaagcatgaaatttcctgatgcctcctgaacatataccattcttgcagagacgctaagctagatcaatcgggcaccacgaacggttcattgcagtagctgcagtttgcatctctatttctgaatcttcacctgctctttttatgggccaaattaactgcctgccataggagatcacgatattgcgtaagatatactgatttggtaatttcgtgcaattattcagcacctgcagatatttgaagaccatagttcgtaaatgtttagtcatctgctcacttcagtttaaagttatactagtaaacagtgggcaggtctggatcgttggatggtgatccaacagtctaaaatccaattcattttattcttaacaaaacagttacattgctccacagacaggcctactcaaatttaccattccactttgaaccagggattgaaatttcgccccccaccggtaagcacatatctcacatgcatataacattatcattttgaaaaactaagacgaattgcaaccaattaataccacaatgtttctatctattatagtgtatgctaggttcacagtaacccaacaactccagatgcctcctaggcctatcctagccaacaagtaactctcattccatgaaatccacgtgaatttgaacaaccattttaaatgagtccttttttcccttctcagcactcctaactcaaagatattgcatgactagtttagcgattttcttatagatgatgcaagagtgtttcctcgtttttttttctaaaactccaacaagatacaaatgtttcctcgttttccgttaacacacttttcaaactgctaaacaatgtgtttttagtataaaaactttctacatagaagttgctaaaaaatagaataaatctctttttcaagtttttaataattaaaattcgattaattatgtggtaatgacttatgtcttttgcgtgtgcacttaatcttcatccatattggagaatcgaacgagacctgtgtgatacctttggtctctgcatcaaggatgcatagaacagtctgttcacacaagtggacagagtgcccacaagatatacccctccatataaagaatccattaggcaatttggtgacaattaatactgcacttcctctctatagctagtagttgtagttgttgactttatttgcagtcttgcttaaagtaattgttcatctctgcaagtaattaattttgggtaataataactcttgtatatgatgtctacactagtatgttccttgcttgcactcatggtcttgatgacttcatgcaccctccatttgtgaaacgaatggaacattgccatcaactagcttgtgtacaaaagtcaggtcaagaactcactcatctcagggctctaagatgttggaaaaatatctggatatgaatacacacattattaatgttgaactttattattctttggtattttcatttgtgccaattttatccacaagtataactaaatggcatgcctatcccaagttccaaaacctacacattcaagaagtcgtcacaacgattagagaagaaataaatgtcgtatattttaagattgcctgaatgaaggtagcatatttgtgttgcctctctccaagttttgcacaaggtagatatatcattaggggtataacaaatgggtatactatccgagtcaatccgaagtacataactagaaagaaagacaaaggtaggaacttgcatataatggcatctaccatggggcatctctttccaaattcctaagggcatcaccaatgtatatttaccaactacgccctccattccaaatcgatctacatatatttttttaaggttattcctaaataatctatatatttgtgttcatttattaagtctattcgttatttatgcattggagtaaatggatattgattcatgcatccatgcacacaagtatttataccacacatgcaatatcttgatttgctattggctaggaagtagtggggatgatgcatgaattgagtttgttgctagagtaaatatagtatgagagagttattagcttttcttggtcttgttgtacctatgaaatatgtagatcaatttagaatggagggagtatgtcggagatatgggcccgggggtatacgaagtgaggggaatctaccttcccatcctgccacgtatccctatagcctggtcctgtccccgcattccgcgaaccgcaggagcggccggggagtcggggcctcggggtgccacatcatgcccctcgggcccttgcacttcttcgcctcgaggccctcgcccagccgccgtttggcggggggagcaagcgaggagggggcccaggctgaacttcctttaatgcgtgcagcgccccaactgccccctatcgcatttaatgcagtggggcaaacgtgcggcgtgctaaactgacgcacaatggtcaagaatgaccggtctgtgaccggcctgacgccggtcacgtctgactggacggacaaccgtgctcccacgtcgcatctgcttccggcggagtggaggtaggtatgacccgtcccatcggggggtcattcggacggcggccaccacaagtcttcacctattaatgagggaatgacagggctgttccccatgtcaggcgagggacgacgctgggccccgctcaaggacaagctgtggtttagcttccaggcgaaggcacgggtggagttccagtcaagatagggtgggtccccacccgaaagaagagtaggtagaggcggtgcatgtggtatccccttgaggtataaaaggaggaccttgcccaccgagaaagtggatgactctcagaaaatctgagcttgtggaggagggaagtaagaatgttctcccgagtttaggaactgttgtaactctcagtctaaatcccacacacaggagtagggtattacgcttcatagcggcccgaacctgtataatttggttgtgtgcgagctagctaggagccttggggatggatacgcgatttctagaggcgagcttcttcccccggccgaactcatgaagggaggggggtctcacgatcttctgctagagaggatcactcctcgacagctggtgcgccaggtagggggaagtcgtgcgctttaacgagaagtcgtttccttccgtcccaagtttcccttgaccctcgatgatcatggtcgaggtcctggaggaggaggcggtggtgttcacccccacttcgtctgggagtgaggatgctagcgagagccacggccctcgtcaccaccgccgcaactctccaactcctccccgccacgacccctcgcggagggaggaccccaaccgttcgggtggtttggccctctccccgcccccgggtggagggaggccacgacgcatcggggcatggcgccgcctcacttacggtgacggcggctcgccccgaggcacgcttcaggcggcgggtgcccttctgcggcatccccccgtgaactcggagccggagacccctgtccagcgctggttggacgacgtggccaaattggtcaccactgcccagcggcagttggccgcgggcggccgacccgccgtcaccggtacgtcgcgtacccccattaccctctcctcgtcagcgaggaggagggcccgtcgatcagccacggcctcgaggcggtccacggctccaacatcgtcgggggcctcgggaagccggaggtgtcccgatagtctctacggggagcaggatgctcgaatcaatatcgagcgacgccgggacgagcgccgagctacccgcatgggggaaggcgcctcctcatctggagtgccgcgttcctcctcacgagacagccctccccccacgctcacccctggagggactggttgtagggccttcgtggcgagtcttcggaatgtccggttgcccccgaagtttcgccccaacctcacggagaagtatgatggcagcatgaatccctccgagttcctccagatctaaaccacgatcatcgtggcagcagggggcgatgactgggtcatggcgaattatttccccatggccctcaagggtcaggcgtgcggctggctgatgacccagccccccgactccatccactcttgggaggacctgtaccagcagttcgtcacaaactttcagggcacatatccccgcccaagagaagaggcggacctgcacgctgtgcggcggaaggacgatgagtccctccgctcgtacatacagcgcttctgccaggtccgcaacactattccatgcattccggcccatgcggtcgtttatgcgtttcggaatggcgtgcggcataaccgcatgctggagaagatcgcctccaaggagaccaagatcaccgccgagctcttcgagctggcggacaaggtggctcggaaggaggaggtgtgggcctggaactcccccggcaccggcgcggcggctgcggctacccccgagtctgttcccctctctaagcggcgagataggaggggcaaaaggaaaccggcccgctccgatgacgagggccatgtccttgcggctgatgggcccacacgggccccgcgcaagggaaaggccaccggcgacaagccgagctccactgctccatccggcgagggccgatcggcagacaagtggtgctcggtgcacaacacttatcggcacaatctcgccgactgccgctcggtcaagaatttggccgagcggttccagaaagccgatgaggagaagcggcagggtcgacgagagggcaaagcccccgcgaccccaaccgaagacctgcgaggggaggccaagaagaaggctcccgccgatgatggcgataacagcgaggatctggagttccagatacctcagggaaccgtcgccacaatcgaccggggggaggagggggcttgcgttcacacctcccgccgaggcttcaaggctatgaggcgagagcttctggccgccgtcccgacccacgaagcggctcggaaggcacgctggtcggaggtgaagctcacctttgaccaagagcgaccatccaacagtgctcgctcgaggtggaaagttggccctcgtggtctccctgaccattcacaacattaggatgaagcgcgtcctggttgacgggggggccagcctgagcatcatctccccagccgccttcgatgcgttcaaggccccggggatgaagctccagccgcgctgccggtcatcggcgtgactccgggacacacatggcccctcggccacgttgagctctcggtaaccttcggcgactccaccaacttccgtaccgagcggatcgacttcgatgtggcggaccttaatctgccctacaacgcggtcctgggcagacctgcgttggtgaagttcatggccgccacccactacgcctacctccagataaagatgctgggccctagtggtcccatcaccgtctttggcaatgtcaaagtcgccctcacctgcgcggagcagcgcgccgacaacctggcagtggccacggagccacaggccccggaggcctccgcatcccgcgcctccaagaagcgcctcacctcggctgacgaggtgcccgtcaaggagatcccccttggcgacgatccgtccaagaccgccaaaattggcgggaccctggacgccaaataggaaagcgcgctcgtcttcttcctgcgggcaaactccgacgtctttgcatggaagccgtcggacatgcccggggtccctagggaggtgatcgagcaccgcctcaccgtgcggccggatgcgcgatccgtccggcaaaaagtgcagcgtcaagccccggagcagcaggccttcatccgagaggaagtggcgcggctcctggaggctgacttcatccgcgaggttatccatccagagtggttggcgaacccggtggtcgtcccgaaggccaacggcaagctccggatgtgcatcgactatacggatctcaacaaggcatgccctaaagatccctgccctttaccacgcatagatcagatagtcgactccactgtggggtgcgaccttttgtgttttctagatgcctactctgggtatcaccagatctgcatggctagggaagatgaggaaaaactgcctttattactcctgtgggcaccttttgttatacaactatgccttttgggttaaagaatgcaggccctagttttcagcgtatgactcgtattactttgagtaatcagatagggcgcaatatagaggcgtatgtcgatgacctggtggtaaagacgcgccactaggacacgttgttgcaggatttggccgagactttcgacagtcttagatccacacgcgtgaaactgaacgccgacaagtgtgttcggtgtgccggcgggcaaactccttggttttctagtctcctcccgaggcatagaagctaatcccaagaaaatacacgcgatagagaggatgcgcccccccagcaagcttagggatgtgcagtgcgtcagtggatgcatggccgccctaagtcggtttatatcgaggctgggagagagggcgctgcccctattcaagctcctcaagcgctccaggccatttgtgtggacggaggaagctgagcaagctctcaatcagctgaaagcttacctcatctcctccccccatcttggttgccccggggccggagaaaccgttgctgctctacttagttgcgatcccccatgcggtgagtgccgtcctagtagtcgagcgcgaagagagcggaccggaggcccccttgactcacgatggcccttcgtcccccgaagacccggtgcccgaagcccccaacccccaggaggaccccgaggcccccgtgggaggaggggaggctttggcgagtgttcccgaggcctatggtcctgacatgactcgagacccccccggggcccctaggcaagggcgccccagatcatctgcccctggcagcacggaccggctccaccgaaaggtgcagcggcccatctactttgtcagtgaggcactccgagaggcgaagacccgatatccacaggcccagaagatgctttatgcaatcttaatggcctcaaggaaattgcaccactacttctaagcacatcgggtttccatagtgacatcctaccatctcagccaaatcttgcacaaccaagagggtaccggtcgggtcgtaaagtgggccatcgagcttgctgagttcgacctgcacttcgaaccacggcacgcgatcaaaagctaggtcctagctgacttcatcgcggagtggaccccagtggatgaccctgttccgtccaacgttccctccctccccggagatggagaggacccaaacaccgacattcgtggtgggcactgggttatgcatttcgacggctccctcaaccttcaaggtgcaggtgccggagtcacgttgacttcgccaagcggggacgtcctcaaatacgtcgttcggctcgacttccgagccacgaacaacatggcggaatacgaaggactcctcgcggggttgagggcggcggccggaatgggcatccgccgtctcctggtcctaggcgattcccagctggtcgtgaatcaagtatccaaagagtaccagtgcaccgatccacaaatggacgcatatgtccgcgaagtgcggcgcatggaacgccacttcgacggactcgagctccggcacgtgccccgacgcgacaacacagtcgctgatgagttgtcgcgtgttgcgtcggcacgagccccactccccctgggaccttcgtggaaagactcgcacagccgtcggcgcgaccgaaccccacgagggaccccgacaccacgccctccgccccgacccttggcgacctgcgggcctcggggcccgagggggtcgaccacgacccccctcgtcaggttgtttggatgactgacatccgggcgtatctcgacaaaaatactcttcctgaggatcgcgcagaagttgagaagctcgcgcgcatctccaagcggtacgtgcttgtagaagggaccctctaccggcgtgccgccaacgggatactcttgaagtgtgtttctcgggagtaaggcatcgagctcatagctgacacccatcagggtgagtgcggggtccattcggcctcacgcactttagtcggtaaagccttccgacaaggtttttactggccgactgcgttgcaagatgcccaagaatgggtccggcggtgcaaggcgtgccagtttcatgccaagcaagcccaccagccggcccaagccttgcaggtcatcccactcccttggcctttcacggtctgggggctagacatccttggaccattcaaagcggctcgaggcgggtatcagcacctatacgtcgctatcgacaagttcaccaagtggcccgaagcttacccggtcgtcaagatcgacaagcattccgccctcaagttcatcaggggcatcacgtcctgattcggagtgcccaaccgtatcattacagataacggcacccagttcaccagtgagctgttcggcgactattgcgacgacatgggcatcaaattgtgctttgcctcgcccgcccaccccaagagcaacggccaagtcgagcgagccaacgccgaaatcctcaaaggcctcaagaccaagacgtacaacgtcctgaagaaacacggggattcgtggctcgaggagttgcccgccgtgttgtgggcaaatcggactactccaagtcgtgccacgggggaaacgccctttttcctggtgtatggcgccaaggcggtcctaccttcggagctttccttgggatcgcctcgcgtcgcgctgtacgatgaggccaagcaggatgatcttcgccgcgacgacctcgactattttgaagagcggagaaggcgcgcggccctacgtgcggcgcgctaccaacaaagcctgcggcgctaccatcagcgccacgtccgggaccggtcactgaaagttggcgacgtcgtcctatgccgcgtgcagtcgcgtctggggctaagcaagctctcgccaatgtgggaagggccatacaaagtgatcggcgttctccggctaggctctgttcgactaaccacagaggacggcacggagttgcctaacccctggaatatcgaacacctccatcgcttctatccatagcgtcgcgattttttgctttccaggagcttgggccaacccccgcacaacccctcggcttgtgcggggttggacgggggctactgctgtgaattactttgtatctttttccctttccaggcaataaattttttccacctaaagtggaggccgttacgccccctttttctcactctttcctctggcttgtcctggttcaaaggacagttcgcgcttactccaaaccctaagtggcattgggcgacctgaaaagcgccgaaagggagcctaaatgagggccgcgtcctaggttgcgccgaaccccaggggctcggaagggcctacacacggccgtcctcgacccccggtcgtcgtagcctcggtctggccagtcccgctgggcggctccctcggggcgacggtcttgcccctcagtacttaggtaccacgaaccgagcgcgcatttatcttttcacaagaacgagcccgagggggggggggggtgggggcgggggcggatggggtaaaaacggcatttcgatcacagggaggttaattatatacttttgctcttgttttttcttctttccgtgccgcaggcattcaatggagaaagtaaaggggtagaaagtgcgaaggggaagctttatttacagacaagacggcacgatggcctaaagacaagaagtgtccgctgcaggcacacaacaaaaggaaattaaaagtggggataatcacggagtgcccgggcccccgaggccggcgctgctaaccacgtcgtcccagtcctcgccgtcgatgtcatcaccaccgtctccgttcctgctctcctcgtccgaggcaagcccgaaggtgaaccgaggggccgacccctcgaagttagagacgatcgcgtcggccgcctcccggacttgctcccgagcctttgcctcggtccccggggggaaatcctcgagtgcgcgccatgggacgaagtcagggtcgcgggcttggtggcttgcgaggaccagttccaccgcggcccgcgccaaggaagccgacgacgatttcacggtctcgccgacctcctcctccagcctctctagatccgccgccagcccgtccagccagagcgcgagtgctggttgtgtgggcgggagcttgctatcccagcgcacggagatgccgactcggcgccccgcgtgctccagtcgatcgacggcatcggagagctgcccgggtccgatctcgttggtaaggcggaggccgcgatctccccagccttgtcttgcaccaggcgctctaggtcggcaagagtgctctgagccgcggtaagctggctcaccaactctgcgtcaccaggctgcccacccgccaccaggtccttctcctgggcctccagctcagaagcccttgccgccatcgccgcgcactcggcacgagcactctccagatgccgagcctcgcgcccggcaacggcctcctcgcgtttcgcgagttgctcgcccagccggcgcaaggccacctcacggcggttcacctcggcttcgcgctcggcacgcctcttcccggagccgtagctcctccgcgcgacgggcctccgaagctttcgcggcgagggtggtccggtcacgctcggctgtggcctcctcacgaaggccaagggaggcctccgtctccgccgccgttctctcgtgggcggccaaggtggactcccgctgatctagcaggcacgctcgctcctccagcgcctgagcccgcctctctagctcatgggctcgctgtgcctgttcctggctgcgctcgtcctgctcgcgctggctccggtcaaggacctcaattcaccgacgaatcgtggcctcaaactcctgcgcggagcgggcatgctcatctaaggccatgcgttcagcctcgagcgctgccgtccgagcccgcagcgaggcatcggcctccaatacccgctgctcttgggcggcagctgcatcaaggactacgcgggcgtccttaaccctcttcgccaggtcctcggcatgggcctcgtactataggcggatgtcgcccaacgcttcatccaggacgcttgaggcaatcagtgctgcctgccgctcttcctccgtctcccgcatgacgatgtccagcgtctcctcgcgcgcctggatttcagccagttgggcttggcacattttgcgtcccaccttcaccatgtcgtccacggcgcggcgcccctcgtcaacccgcgcgcggtccgcagcgagctgtgcccactctgcctccagggctgctcgctcttccgccagggcttgaacttgggcattgagcccctcccggacggtggaatcggcggcggcgagcacctgcaggagtggctccatacttgccggagtcggagaagaaaaagttgcggtccacccccgggacgacggagtgctgctggatcccccgcgagattgggggctgctctcagcccaccttctgcgcggccagccccgagggcgccccaagtgcaagggggagtggctgttcctctcgccccccgcttcgggccctcgggtagattcggcctcgggctcgggctcgggcccgcccctagtttcggcctcggcctcgggcttagggccgcctccagccttggcttccgggccgcgacctccctcggcccccgctcccgggtggcgctccgcatggatccgagcctcgaagtcgcccccgggagaaacgctgccgccgcgagcgatagcattcggactttgtcccctacaaagggtcgaaccccgagatcccatgggaagtaatctcgctacagaagaaccctgatcgcgttaacaaagaaaaaaagaggaaggaacaagagaccaagatgagtaaaaagcaccgaagcgggtgccggcagtcatacctgcggggagggcggttgaaagtccacttcgggggctcaatgaagctcccccgacacggctccgtttgacctatcttccggagccgcttcttcttccatccagcctcgggcgcggcagggtgcttgtggcccgccggcggtcggtccgccacgcgctcggcgcccccttcgcgcgggggagagggcggtcgagatttggacatcttccgcttcccttttgggtcgctggccgagtcgatcccgggtccacggctcgggccgggtgccctggagctgccacccccgccggagccgctggtccgactcccgcctacggtcgcgccaccgctacccacgccgacagcgccgtcaccggcgccgccccggcgggaccgacccctgccggcgccgacggccgacatcacagccatgatactctcccggtcgcggtcgctgcagaggggaaggatcccgtctggaatcagtgtttgctcggcggtgtccagacccagcacccgtcgaatcaccgtcttcgtgtcctcctcgccccatcccagcgctcgcccacatgcgtgcgcatgggatcgttgggtccagagtactcccacgcgccatgggatcgatcttggagaggcgcgatgcggtggcggaagtaatcgctaaagaccatagcccctgtgaggcccaggcttcgcaggcccctaaggtgatcccgcactgcgtcgtacttctcgcccagctctgaaaccgccagccatgcggcggatcgttcgggagggccgccggggagccgaagtcgccggtggtccggcagcgcggtgtagaaccagtccttcttccagtcctcccatttcttgcggagatgactctcgatgtattgccccgctgtgcctggccggggctagaagtaacatccccccaccaccacaccttgtagcagctgcgggacgaagaaagactagaacagccgcatcgttggccgcaccccgatgaacatctcgcacaaatgagcgaagatggccagcgtcatcacgacgttgggtgcgagttgcaaggcatggatttcgtagaaatccaaaacctcatggaagaatccggagaatggcgggatcaaccctgccatagcaaaggacatgaggtgcacggatctctccgggtaccgcggccgcggccgcgactcccctgccctcacggcggcgtcttccggcatgatcttgcgggggagactaaggtgtctatccgtcataatacgcgatgccggaagcactgcgtcgctggcatcttgagccatcatgaccggcggagaaacgacgaggggcttgatgagcggagtagcgtggagtggcgagaatgttagggcttagggagcgagtgtgcagttggcgaaaggaaggaggcaaagtccccgcctccgtatccttttatccctgcctcgccctcgctcgcctccttgtttcacgccctctcggttgcccccacgattctcgcgcctgcagtcgcctcgtcatttcctacgaccactcatcatgttgcccactgaatccgcgccccgcatttagtgcgcctgtcagcggcacactcggcgtagggcgtgcgatggtcacgggcgtaatctgggcaaaccgtcactagtaccgccgcatgcgtggcaggcgagggagtcgaggtgtggtccaactaaccccctgattttcacgccttaagcatcctcatcatcagcgcggtctgtggtggtcaaaccgctgttgttgttgatacgccaacctggccatgcggcggcatccgcttagattccctgccaggcccacaaccccagcttgggaagtcgtgaggcaccacgtcagaccgacctcaggaggccaatgtccgatgtggtgccgagggctactgtcggagatatgggcccgggggtatgcgaagtgaggggaatctaccttcccatcctaccacgtgtccctacagcctggtcctgtccttgcattccgcgaaccgcaggagcggccggggggtcggggcctcggggtgccacgtcatgcccctcgggcccttgcactgcttcgccctgaggccctcgcccagccgccatttggcggggggagcaagcgaggagggggcccaggctgaacttcctttaatgcgcgcagcgccccaactgccccctgtcgcatttaatgcagtggggcagatgtgcggcgtgctaaactgacgcgcgatggtcaagaatgaccggtctgtgaccggcctgacaccggtcacgtctgactggatggacaaccgtgctcccacgtcgcatctgcttccggcggagtggaggtaggtatgacccgtcccatcggggggtcattcggacggcggccaccacaagtcttcacctattaatgagggaatgacagggctgtcccccgtgtcaggcgagggacggtgctgggccccgctcaaggacaagctgtggtttagcttccaggcgaaagcacgggtcgagttccagtcaagatagggtgggtccccacccgaaagaagagtaggtagaggcggtgcatgtgttattcccttgaggtataaaaggaggaccttgcccaccgagaaagtggacgactctcagaaaatctgagcttgtggaggagggaagtaagaatgttcttccgagtttaggaacccttgtaactctcagtctaaatcctacacacaggagtagggtattacgcttcatagcggcccgaacatgtataatttggttgtgtgcaagctagctaggagtcttggggatggatacgcgatttctagaggcgagcttctttccccggccaaactcacgaaaggagggtctcacgatctcccgctagagaggatcactcctcgacagagtagtaaataaggtgggacctagtaaaagtaggtatttgttgttaaaagttccacaatgtataactagtaataaggtgggcccaagccaatagcatgaagggagagtgatgaggatcaatacatgccaaaagaataaatgtttttttactccttactactaggttgtagtgctcttgcttggtagtagctatttactggttccacaatgcttactacctggtatgaagattaaaatattgcctattacttggtttgggagcacattgtggatgccttaagagatgacatattcctatgagagctccagattcctgccaagcctaccatatacaacagtcgcagaagcatctccatgatctaactgttcgtctattacatattactttctagtactagctatcagctatgtactagtgtatatatatatatatatatatatatatatatatatatatatatatatatatatatatatatatatatatatataaatatagagaccaagagagtaagagagatcgacaataggattgggccatagaaagctgggatcaaatctagcagcaatactgagcatcccttcaagaaggtgtatacatgaaaatatggcacctcgttgggccaatgccaaagctctaattttgcccaaagaccaatgacttgacaaacttactaggaacatgcagaaaactgattgtgcatcagagttatcaggcatgaggtcgtttctttaattccttggaatgatcaagcaaaattcgttgtcctgttttctgttcatgaagtgtacttgagtaagtgaaacaaaatcggttgttgttttataaactttggctttcaggaacgtaatacataaatatatgttgtctatgcagttaagaaaatccggaaattcaggatgatgatgcattaatccattgagaaaattcttagcagttacttgatactacctccgtcccagtatataagtaatttttgagttggatacggttattaagaaagtaggtaaaattaaatagggagagattgtaattggttgagaagtaaaggtatgtggaaaaaatgaatgatggagggttgtgattgggttgggaatggaatgttggtagaaaagttgttgtattttgagataaattctgagtgctaaaagttgttatattttaggacggagggagtacaagttaaacactgcaattctttaaatataatctatctgtattacacatcaagctcatgtattttcagttcatgacattattatgggcattgggcta

SEQ ID NO: 7721 - DNA, 21170 bp, Oryza sativa
  unsure (1)..(21170): unsure at all n locations
gttgtttgggacctttctttaagactcttcatgccaattaagaaaaaggagataagctatggacttaagcatcccacacttgattagtaatgactgatgagtcagctggtgccctgtcacaatcttgtgagaatcttgagaagaaggtgccttgcctgcctgcccatggcaacacaccttcacacaaaaaggagaatatctgatgaatatggttggcatctccatgctcttatagcccaaccaaaaggaagggattaggatttgatctcacatcacccttaattaacaattcatcaagggttaagacatgataacataagatactaatatgttgcataatgcaatgtaaacacacatacacacacagagagagaaagctagaggagaaagaagacaagttgtgcaagtctttggagtaatctctgggggatctcacagagattcttctgcccttgaaattatgttggtcttcattggttatttttctactactcttctctctttctgttgatgtttttcatgtgaaggtttgcagccaagtcaaagtgtggctcttggaaccctggcaggggcaactggccaaccaatcctggtccatatttttcataccagcttacttacaattgctacttggactttgaatgcttcactttggaccctagtcattgtcattaattgaatagtgcttgtactcctacttaattagatctaataaagctgtcaattttttgatgctgtaagtttatatttcagagctaccattgtactaccattgctaatattattagtgcaggcagaagcatttttatggcccacaaaataacaatagttaagtgtttgcgtgttaatttatatatggagtacctttacggtgatctctactagtactattctactactaattttatcattagtaaaagtgatcttcacggttgatttacaagttctactaccaatagaaaaaatattctactaccgatatatgatccattagcttggaaaatatgagcggtctatgttaattccactaccgttaagaaccattacagaacacatctaacttataataatagtcttatcaccaaggactgtaaaaagtcactagtacaagggaaattctctttacaaatgcaagtgcacaagagccttttggatgattttttttttacctactcaaccttatgactaccagtaagatgggcaggctttagggggacagccaaagtcatcacatccggtttgaggcgcacttggaacttaccagatcagcacaccaaaaaacagcagcacaaactaaaagttgaagccatctagattggtagtggcatgtgtatgaaacccacaattgacccggagatacgataaggatctcgataggcgcagggcatcgtcctgcggtgataacctagtacaattgatcatgcattctccctttcctccagtgtgtgtatatatatatcgctgacaaattgagaatatataattaatttccttcgttcttaaggagccctaaacttctagaggattataagtagtggccatcatcgttgttgtcgtcatcgtcgtctatctctccacgatatatacaacatccttatagaatgggtgctttggtccccaagtgaatggaggaatctctctcatgcaattttatctccttatcaccagtactagctagctagctacaccatcaccaacaaacagcatcaattcaggcagaatgaggaggaggaggcagcaagtgatgttttcactatgcaagtgcgcaatccacgctatctatctactagagctagctccctttctatgtaaaggcatggctcatgtaaaaggtggcagcgtgcagtgttggtgatggcccatgcatcaacaatggcctccaccaccaccattaccacttatccactcaattcatcaagagggaccatgtcaccatatatggagatggaacgagaaggggatgaggagactcgtatcgtctgccgttcaatataagttgatcgtatgtggttggaaatcaacaagtataattccggcgttgatggaaaattgcttgggggccttctcttcttttgtcaaactaggatatcaacgtaatttcgactgtgtaacacaatagtgtgaaaattattattttttgtttatgttcgtatatgcatggttcaattttcaattcaattggatgttcatgttttaatttacacctctctatcaccttgtacatttggaatttcacataaaatagttctaagtctagtaagtatatactagaaagttttccttcattcaaaataggcttataagctaaaatatgcatacaagacatttagacccccaagattttatccttgttgcatcagtggttatttctcacggcttttataccacataaaagttgcgatgtaacccatgaattccgaagtggaagaattcatggtccaaaccgtccacccttgccaaaccaaaggtatagcacctaaccttaatttgaaggtaaacaacaaatttcaatttccaccttttcatggttcatttagatgcatgtagcaacttttgttaaggttgaggtaaaattactctgatgctcctatatataagttcattactagttcgaaaaagatcacacccaaaaatgcaacaatataacataaatgtagggaatcatgatagtagtgcatggttcgattggaaaagtaccactccaaaaatgcctatatttgcggataaattttaaacgctaaaaatgtttatatttgtgcatggggaagtatatgacttccaacattattatttgcggatcaatattttattacaaattatctacaatttccataggaacttccattccaaaattatctacaaaattaattaacttccattccaagttcagaaatgtatataattatattgtttggaatccattgcaacccccataattacattaattaggatatggattctctacagtggtctcattcatgccaaggggggatgcatatatgcttggatcaaagctggatgctgctttcctccagatgcatgcggtgatcgatatcatatggtacgaaaaagagagagatggggagagtttagtacaggggcagcaaagaatccaatggagaagagatcgagaagagagaatcccatcgatcaatcgatccaaatattcgtacgatttgcattgcatgcgatggcaattattcacggtgtcgatcccgtccttgcgtccaaaggcacatgtaggccccctagctcccagccagaatctccacagatccacacacccaatcatgccgtgtgaaaaacgcttatgagtttttttataacaaaaatcactttgctttttttttcctataggtgacctttgaatttggtctgcccggcctctagtgagaccaaaagtcctacaaagaagagagagagagagagatctttttcaaaatcttggtcaaattcaatcggaatacgaagaaattttatgtcaaaagtaatagtatagatgaccttcccaccaaacacatgggagcgcatgcaagtcatggaatgtgatgtttgttaaggttgagtttgaaacagcttctcaatttggctactttcttattttttttcatgaatatatattttatgagttatatttgatagttcagtggcaaagagtatgtgtggttttaactccgtgttcttgtgttcaatccctaacatactcatattatttttcttaaaatttttttgatggatgtctctccctccaaatttcattttcttttataagtatgttttctgaactgctaaacgatacattttctgccaaaactttttagacaaaaagttcttttaaaaattaaataaatttattttttagtttgtaacaattaattaatactcacttaattatgtgctaatggctcttctcattttgtgtgcagccatcccgtggcatcaaatgcaatcaagtgtattggtagttggtggctgtatcacaaagatatataagaaaggaaaaaaatgcatatgtgtttgatttatgaaaaaaataaaggtgagatgaattttttggggggaaattcattttggctctgaatttggatatagtggttagggactagtggtggatactgttcaatgttctatccctcttttcattgacagcgagtgcttttgacaaaatggtgcacaaatgggaggatgccaaatcatggaatcccagctttatatatgcttgtggagtttcaactttcaacatctggaaggcacctccttggtacaaaagggggaggtcaaaaagaatagcttatttcagactaattgcatgatcagatgttctcattctgatctgtcaataaatgcggttaattgaagcttcaacaaactggagcttaagtatgtgctcttaattaattttaaatcatctcatcccatcttctagtgagattaaaaaaattgtttttccctgtagtattcaattgaaaatttgagtagttagcaaacgaagccttaatgttttggtattgaaagtaaaactattgcgcaattctaacttttacgaattcaattttagattatatttccatgaatgaagaacttcttacttcaagaaagaaaaaaaatactccctccttcccacaatataagggattttgattttttttcttgcaacgtttgaccactcgtcttattcaaattttttttacaaatataaaaaacgaaaagttgtgcttaaaatattgtggataataaagtaagtcacaaataaaataaacaataatttcaaaaaaaattgaataagangagtggtcaaacgttgcaagcaaaaactcaaaatcccttatattatgggacggagcttatattataggacggagggagtatatctttagtacaatcagtatactcccttcgctttttactagacatatttttaagagattactagacatattctgatttcagaaatatgtatatcctctatttaaagaaactaacttctgattacaatctaaacatagattttttaaaaaaaactaagtgagtagaaaatatttgggttcgttagatggtgtttggagtaaatcttttgtgcacacaaaacatagcgacatattaaaatatgattaattaagtattacctaattttttttaaaatagattaatatgatttttttaaaaatatatttttattgaaaattattttttataaaaataagcaagataagttaggaaagaaggggaagaacacagcctatagaatctttgaggcggttcacttcaccctaaccaaaagaatctttgcagcttgggaacggtgacgttgcctttgtctccttgatgagaatctctctctctctctctactttggcgtgtcatctcagcaatggcggcagcaaaatcccatggagatctcatctcacctctgtctttctctctctctcatggcccactctctctcatggcccactcatacatggaatccttagccccttgccaaattgctgttgccaataataaattccaaacctctctcccaaatgagggaatctcaattgtcactatgcccaaaccacctgccacgtggaggacagccattggctgggaggatgaacaatctttggagtagtggttctactgcacagagacttgcatcatggctgtgatgatgaaaatgatcataactttaatttggtgaaagtaaaaaaaaacacatgtctttttccatggtgaaaaagataccagaaatcaatttcgtaatacctagtactctctccgtctcagaatataataatttagaatcagatgtgacttatcttagtgctatgactttagacagatcccctttccagattcatagtactagaatatgtcgcatccaattctagattgttatagtggatagggataagtggagtacaaagctatctattgtcctaaaatataaacactttttactgagataaaggatagttgtgatagtaagagatgagaaaatgtgtggagaagttatatgcatgaaagattgttgtgattggttgagatgaaggagaaatcagataaaatctcaacatagaactagctatattttcgcactgagcgagtaactaattaattactcttatatatgggctttgtgcactatactatgtgtaacttctgtgtcaaggcacaaatccttttcagatttgacaagggtcagatgcttgaattattgcattagctacagtacttgttggaaaaaatagaaaagtgaacctctcactttcacgggatcaatgccatcgagatagatatccctaattaatctattgcatgcactccttccatttcacatgtaagactttctagcatttcctatatttatatagatgttaatgaatctagacatatatatgcatctatattcattagcatctatatgaatatgagcaatgctaaaaagtcttacattgtaaaacagaggaagtactaatctaacatttaccaatagcagatagagagagaaaacagtaccatggcaattctctggtcccccaacctccctaaaaaaattagtactaaaatgactttcaagatgcatgaaagagtgaaaaaaaaatgaaatagtgatatatagactgatagctattactaacatatagaagaactcgatctgaattaggatgtcttttgttttcacatttatttgatgtcaatttgcatttatatgatgtcgttgacatgctcttcctaccgataagcaccgaaggcgtgctgcatgaggtagaaacaaaagtccaacacacttttttggtcatgagtgtcatggaaacctcatgaaatctatctcctaggtcacattaattttatagttggtacattgggtactttgactaaggatgctatttatgaatggtaataataatgtgattctcaatagacctacccctcctcaaaataaaaaaaaaagacaaaccgtgcgtccgggttcgtagctaggattttttttgacagaatagtaagtctcataaaaaaataagtaaaacggagacataatttgagtaaggaggtgtgttggctagctcattaatataatgcggggtagaaaggttagagaatgttactccttgtgttttagcatctatcggttggcaagtgatggtaacagcaataaatttattgccagaaaaccacaaagcaacatatcaatttctttgttaaagaaaaccaggtttgaccattagctaaagacagaatttccataaaactaaacttctatttcatgagggaaatctttcaaagaaaatgatgataagtagctttagcttcgagatggcaccgacgaatcgtcaagcatgtatgttcaaagcttgttggtgccgcatcgaaccggctcaaaaaaaacatgaagaagaagcaaaataattaagtttagaaattttgtggaaaggaatgtattgtgggatctaaacacatagaccatttttatcgaaaaaaaaacaatgccatcaattcttcttcgaagaaaaggaagaagaaggacgagaaaagagtaataaagaacacacgaatatatccgtgtgtatcccttgatgaaacctacccctcaccaactcttcccccctgatctcaagcatctagcatcaacaagaagagaatagcacaaaacctccttgctaacgacaacataggaaaggaggaagaatcaactttccagcaatggatcctcttgtcttgctgtccccctcccttggtttcttattaattcacatcgcatccaaacacacacagattctccatcttttcttttttttttctttgcaaggacaattattcttattcgaaaagcaaattaaagaaactcggttcggtttcagttggaacacaacagacgccgtcgcgataaggcagaaaaagaaaagaggaagtgccatttacaatagattctgcaaggtacgcagggacgtgcgaggacgatttctctacttataaaaaacccaatgaaattaggtttggttctagttggaacacaacagatgctgagacagaaaaaggaatgaaaagaaaaagagatagtaagagctgtagaatattggtgctccaccagcaagtgcaagtgcagggacctgaatgaaaaacctgaaaaggacccatatgaaattgaggggaaatgtgagggggtggtgtgtaaaagagagggtggtgtggaggaagaaagattcgtggggaggcggtatcctgactgtgtttggtgatggttgggtgttacgcgacgaaacgcctctgatcccccatccatattccacgggcggcatcttttctccgactctcacctcccctcccctctcaatttaccatcctacccctctcccctctccccttcatttcatcactagtaaaataatactactattcatgctatgtactattattttttttttctaaacaagctataatttttttaaaaacaggctattcatgctataatggggttgttcggttgagctagctatgctgtggtagccagcccaatacaactataccggttgtagtaaccaattgcagcagcagcgtgtgttcaaacttgcagtcgaatggctagggttgcgtagcatagtctagatcgctgcaacgacagagtatcgaacaaccctaatactactacttcgtaggatttttcattgttccaatctaaactgaattttcttgtgaagttctagcaaaattcttgtttggcatggctccacgtctggatcaactcttggaatctcgaaaaaaaagaacttatacattaaattaacatgcattaatcctcttattttaattttaaatatgaactaaatatttcgtattattgaaattaatcaaccatcacctacaactcatgaatttccggagctaaagatgtctcgttatcaaatattccatccgtcttttttgatattttaattttgaaccaaccaacatcaaatattaaaggatggtggcagtaaaaaaaaaacttggagatttttacgtctagaaaccatcgttacacataaatttaggcaggaaagttttttttcccaactcagagcattttagttgcaaaaggtttatgcaaaataaagcagaaaaaaaactactaccagtatcttttacatgcacagatcagaaggaaccagtggttgtacagataatagcagaagctagtggtatcttccacggccgattctatactgttccacgtcaaattaccattctaccctccattctgcctgaaccggaacccccaaccttcctccggtataaacgcggcgagagcgcgacgccgcaaaccatttccaccgccaccgtctcctcccgaattccggcgaggtgttgtggacgatggggtcgtcgtcggcgtcggcggcgcagcacgaggaggcggcggcggcggcggccttcgtcctcggcggcgtcgacatgcggatgctggcggcgaggacggcgacgggcgcgctggcgagggcgggcggcggcgaggcggcggcggcggcggcggcggcggcgaggttcgaggattgcatccggagcctcgaggccgagaaggccaagatggaggtgttccgccgcgagctccccatcagcgtccacctcatcgccgacggtgagctctacctccaccctctacctgctcgatcactcgatctgcctatagatttcatggatgattattcgctgagatcttcttgggcgtccagtgatcgagtggctcaaggacgaggtggagaagcagcggctgctacggcggcggcaggtggaggctccggcggcggcgccgccaccggagatgttcgcgccgccggcgacggcgaagaggaagtcggcggcgtcggcggcggcggagggggtgaaggcggaggcggacgcgaacgacaagcggagctggatgagctcggcgcagctgtggagctgcgggagccacacaagcaccagcaccagcaatggcggcagcgtcaagaagcagcagcacaaggtatttttgtttggttaagttttgtagtttttttttttataaaacaaatcaagtttatactagtttgaagggaagatatgggaaaaacatgaatattttgtttggttaagttttgtcaagtttgtcctagtttgaagggagattgttttggaagggaagagaaggagtaatgctactcctactagattttttttgaagaaacttaatttgcaaatttatgcgatactactactactagtctagtgctactaaaaaaaatggagaaaattgtaatattgggactgcaaacacgtgggcttcgctgttttgacactccgagtggatgacaaatgggtccatctgtgtgtatgaaatgtgggtccagtgtcattatagcaaagtttaatgtttgccgtgttataattgcaaatccccaaaaaaaaaaaataggaatctttacaattcaggtgttcaatgaaaaattctctctctttttttggtttctactagaaagaggagaaactttttccccatatcaccatgtagaatagaaatggaaaaatacagaataaaacaaaaaaaaaacaaagattcattttgttcgatttcttgtaatttgtcaattttttctatgttattccaccaagaaaatattaacacatgttgagcatgcatagctttgttgtcaatctcatgcatatttgtctgtattttcgctaacttttttctcaaaagagtatattttttcctaactagttctgtcaatttcaaatcatgatcaggtgtccaatgcgttcatgccactggccaccttgccggcgtttgcaaaatcactggagaaagccgacgccgccgtgccagacctgtccctctcctcccgggtggcgatggccgacgccccggcatgtccggcggcgccgagcgccaccagcagcgccgtcacggatgtcgctgtagcgcagcggcagcaggcggtgcaacggaaggccagacggtgctggtctccggagctccaccgccggttcgtcgccgcgctccagcgcctcggtggcccacaaggtgaggatcatctcattctcatcaacctaaattgtgcaaattgccacattttattttagattcgatttttttttccaatgataattttagatgattgtattttctttctgaactgtttagatgattgagtgataatttgtggtcacattgttgattgctcctagtaaaattgtttgattaattttttgattggtgcgctgaaacttgcttaatgtttttttattgttgatgcagctgcaactcccaagcagattagggagctgatgaaggttgatggcctcactaatgatgaagtcaaaagccacctgcaggtttgttcagtctcaactccttacttttacaacctaaaaaatattgccatatgtcggtggcaacaatttggtacgcctcttttataaaaagttcacgaacctcaaagcaaattgtgcagaagtaccggctgcacacgcggcgggcatccgacggcggtgatggtggcggtgaccatcagacggttggcggccgtctatggccgctgccaccggagcaatacaccacctcgcagcacagcacatcgcagtctggctcgccgcagggccccctccagctcaccgtgtcgtcgagccacgccgtgtcagtgaccgccggcgatagctgcgacggcggtgaggaggaagaggaggacgggaagtcggggagctatagctgggagatgcagaatggggcaagggcatcatcatcatcttgagcaccattaattaattgtctccaggtgctgcacagcagcagtgaccgaagaacttaggcctatttctgtacagtggttgagagctttttttgggctttttttttggaggatgagattaagtacgggagttacccatgtgagtaatttgagttgttgttgtagagggtttgagaatatgagaggtgttaattacatcacattgtataatctttgggctaaattgtgatgtcgagattaattattcttatgtgaggagaatattgctagattattgtccacctttgatgcctcctgttgtgcaaatttatttatttttttgaatatgcaaggaacacatctttttattaaggggaataaagtttatttacaacgataattttatacattataagccataatggcttatcaaaaataaaaagtattttacgaagaaaacttttatatatgtgaacaaattatgggaaaacacgctaaaaactgtaaaatgattccaaaattgagttttaaaattcaaatttgactacaagttataagtgaaaggcatgttgatttgtttgtaaaatttcatcaggcacactactggctgtgataataaaaaaaatgtaactgaaaaattaacaactgaggtaaaaaaatgaaagtgagatcattcgattagttgcttgcatcttgcagtggatcttgattggagatgttctcttgtgccaatgaatctggatcaggatcaggatcatttaaccctttttttggtaagtgcattggtgagcatcaagagagtggttcactctaacctactcatattaatgcttaatcaatcaagtggttggtactgcgtgcaagatggtataattatgaacttcggatcttgacttttgccgtgcatttcgtactggtttcatcctttggcgggaattggtagaggaagctacctctagggttcattgttcatctcttcactgtacgaatttactagtttttttctttaaaaaaataaaaactgtacgagttgaatcaggaacagtttataaatttgtgtccggtttattgggtttgaattgaattgggctgaaaaaaatgcaggtccatttatttcctgggccgaaatgggccatcccttttctgattgagccgaataaattgggctaaaaaatccagcccaatccacagtggtagtgaggggaaaacctccacgatttctcgcgccgccgccgccgccgccgccgtttggctgagcacctcgccgccggcgctattccccaccggggaaacctcgccggcgtgtctgtggagatttctgctgcgagggaagcttcttcgtcgactccgccggtgcggttgcggttcaggagctcgccgagcggcggcggcggcgatgagggaggcggtgacggtgcaggtcggcggcttcgccaactacgtcggctcccacttctggaacttccaggtgagtcgccctctctctctctctctctcgtctccggcaagacccccagcttgttgctccacctggtgcaagaacctgacgcttcttggggtcttcttcttcttcttcttcttcttcttcttcttcttcttctccaggatgagttgctcgggctcgccgacgaccccgacgccgatccggtcttcaagaacgccgcgctggacatggacgtcctctaccgctccggcgagacgcaccaggtaaagccgccgctcatcgctggcatgacaaaatgcgtcgtttcttttctttctgtatttgtttctcttttttttttggcgttgttgttcatcttttactgactactagtatacactgcttgatttcactagggtgttgctacctactgccctcgtctggtgtctgttgattctcgaggtaatttgatgctgaatttggtccgaatattattgtagtgcgtaaaaccccatgtttagcattcaacttataagcataaacgaaaattttgaatcttagaacttaatttcagggttgattatggggttttttttttcatcatggtttattttccagcattttgttttaaatcagtaagaacacgtatttaaatttttttacccataaatgattttctaatcgctaccagtccatttcacttataataagtatataagcgaaacgatgaggaaataagaactaagaactgttattttgttattggtagtgtatatactgcatgttcacggtggtatcatttgcagggtctcttggctctttgagttcatccggtaatctcggtcagtctagtactgctgcagatcaactcaatgttgctacatggcaagtggcgctctaacttctttagaatatgttttcatgtttggttttgcttattgtgcccaccatgaataattgaccactgtgatttggcatgtacgacctgcgcagaaggcggctgttgtttcagtttagttttggattgcttgtgcgaatgggttacagatgtgctaggatcgtttaaataagcttgcatatctataactgggggtaattctgacaaatggtgaaatcatgtctgcatcgtcaaagcaagcagatagcaaatacagcagctttactatagcactgttatattgatacagttctaggaaatttctgcagcctgagcaaacaatgagctgttcttaggctgataataagagagtaataaactggtaataatgattcatatgctcatccagctgctgtggaagtgatgcattgcatctgcctattattctcgtagagttgcattcatcttttgccttactgttgcttgttttgcactgctatgtgcaaatcattcaatgtattagtaactatatatatatatgttgaataatgtgtcgggctcataggttaccatgatgaattttccttgtttatgtaggtctggaaatgtaacaagatcagtctcaaaacctcatgggcggaacttgtttctgcaaagcttagttgaagaagggcagaatccaagcactagcaatggtggcagcaactcccagaaaagtgttgaatataaggacctgattgaatgcctagagaatggcatcaacttttggacagattattcaaaagttcactatcatcctcagagtttgtatgagttatatggatcatggacagactttgacaagttcgataactatggcagcgcacaagaggttgtttcagactggtcgcaaatagaggaaatgaatgagaggctaaggttctttgttgaagaatgtgaccatattcaggtcctacccttttttccccagtaaattatcagcaaactctacttacagttttgcaacaagctaacgttcacttatgcaatcatttttgccatcatgcatattatttagaccattattttaagcttaattgattcataatttaccacagggcatccagtttattgtggatgattcaggaggtttttccagtgtagctgcacagtttttggagaacattgctgatgattacacaaatacacttgtattgctttactgtgtgagggatccaatgacccttggaccatccaggaggaatcaaagggagtccattatgagagctcttcatgatgctgtttcattttcaaaactttcgtccttttgcaacctgatggtacccataggaccgccttcattaagtagaagtatactatcctttgcctgaactccacatttttagtttatcttttgttattgttattctgtgattttataggacttctttctggttgcctagttttgcctttgattgcttcaagtatactgatattgtgccttaagatactgcacttgattgcgtttctattaaatatcaactccttttgttcaagctgtatattcacatttgatttccatacaatattactttcatgaattcccttaaaaaaatactttcatgaatatacagaaagcttattctgaatgagattttctcacaaatttcctttcactctgtttcatcaggttgcatgtcaccgtacctttatatacaagatgagaaaccattccatgctagtgctgtttgtgctgcagcaatacattcaatcactgttccatttagattgcaacgaacgggaccgagttcagacttagcacattcatctggtaatcttgacattggcgaacttgtgcacattttatctgatcaaggtcggcagaacatggttactgctctggatgtagcgatgcctgccccttctttgacaggtatacaacataacatatgccctactgttataccaacattggatggaaatttaatcttgcttgctaattgcacactttaatttgcagatagagatgctatggggaacatagagatgaagctgcactctttgacccctgaaatcagcgatgaggacgaagatccttattcagttgaatcgctagtggttcatggagctcttgatagaggtctgcacatcttatcttttgccttaggatctgattaactcctattatttgtcatgccaacagaacttatttttctattgttgttaatacttacaatattgaacatttaacaacattataggcatggtggctaaattttggttatacatgtagaagtacaaagaattaacaattgaaatttgtttgcacaggcgggcaaaggacttccatatcacaagtgaaggactcggtatgttcagtctacgaagccagagagacaaagccaaaattttcccatctctcagcatctctttgccccctccctgtcccccttccgttcccgtcaatcttcagaggcaacattggccggcacggggagatccttagtgaccatacagaagaatcccagccaaagggctcacttgacatcgaatcgataccaatggcggcacggttacgatcaagcagcgccgtcctgcctttcatagagaggcgatcggggagcctccagaagcacggtgtcgcgagaggcgccatcgggtctctggtcctccatgactggggcttcgggagggaggaggtggaggacatgggggagcacctagcgaagttgctccgcccgtttcaccctgaaatggatcttacttcggattccgactagatcatcttcgaaaaatcttacttcgagaatcaagcatgatccatctgttgcaatttatgtggattgtagtaatactaaatctttttttttcagagggttttcagatactgaaaattcatgctcatgtggctggctgttgtgagatcaagaatgagagatctgaatctatggccctgtttagatccggagggctattaaatagccctctggaatcttactatttaagagtattaaacgtagattactgacaaaacccattccataacccctaggttattttgcgagacgaatctaacgaggtatattaatccatgatttgctacagtgatgctacagtaatcagccgctaattatagattaatatacatcattaaattcgtctcgtaaaatagcctaggggttatggaatcggttttgtcgataatctacgtttaataatcttaaatagcaagattctgaagggctatttaatagaccagaggttctaaacaaggcgtatggcatggtagaccttttttgtgttctactcatgtgcatttgagcacgggtgtaggctgtgtatgccacatgctgctgccgtgacattctgcggtgtttcaggccatgtacagatcaaccgggccctggcttctgtcaagtcaagcagttccattttcgttgtgatgtgaggtcacactccgtcggtctgtgacagtttcacatgaaactggagtactcaatttctgttaaaaataactaaaattcccgcatttcaaatataaaagccgataggctgtatatatcgggttttagccacattaggaacatggaaaattttcgccattcctatggagttattctataaatttcagcctcttttggaatgttggatttttgaggaatttcgcataaattgagttgtttcctgtaaaaatcctacggagggtttttggaacaaaagaattttataggacttttgatcgattgtactcctaaggaaaatcctttaaaaaacaaagatgatttcgggaagattttcaacatgatatcgaatcttttggaaaaattgattaacgtctacctatcttttcttattcatgtatttttcttgctccattcaaacaatcatttctgtagtttttacatgtttttctatccataagatttgagtatcagtgtcttaaaatttctgccattttctaaacagtgacaaaaaggcctcctatcattttcctggaccgaaacatttctttcatctcttaacccaatacctttcatgcctctccatcaagcatctgtacaaatcttgttgactaaccaagtccattagcacggtcaccaagaacaacactaaaattaaactgtcattcaagtatacaatacggttaataaataattcagagctgtcaatcaacgaaagtttggcatttttcgcatcaatgattggtggcgagcatcacatggccggcccgaccggtcatgtgtccgaaaacgcgtgaacatgtttataatttaaaagtgtatttgtaaattgtaatcgcaaaaacaaagacacgatgattttttataattattagtaaaaaaaaaaggagagactgactgacacacacacgaccaaagacatggattgattgattttttttagtgcaaagcgatccggatcttgaggtgatgcgctctttcttaattgtcgttccatgcgtgttcaggctcccatattttttttaaaaaaagataataaaaataattccaaaagtttgatttttcggcgtgtttttttggatgtatgcattttcttttttgcgatgaagtttcctatccttttcctttgtgaaaaaagttatgtgttttttttccaaaaggaaaaggaatagaatctctaggttctttttgcctttttcataattggtggatggtatcaagggaaaaagtaaccttttttttatgtgcctgttctaacaggttttatttttgaaagcgactttgtgttgaccgatgaaaattagacacacaacaccaagatttttcttaaactttagccctcttaactataaaattcatgaccaggagtccaggaccacttgaccgctaactcttttttttggtgcaaatctgataacctgtcttagcttaatctagaccggtctcggaaatccaaatatgtctgttgatcgcttccatttttactcaaccagccgctgcccgttggtgtattacgatattctaaagagccgtaatatttttcacaaacgttgaatgttaaaaattcgaaaattatgtacatcctccgcttaaagatgactatgaatagttgaacccacagaaggaggaaagaaagaaaaatctcgagtttgtgaggaaaatgtccaggcagtacttatcaatgaagaaactaaaatctcgagtttcgtccttaacgacgtcgttgacttttcacataacattatactaaaagaacatataatttttttattataaattatcttatcaataaagaaactaacttatattttttaacagggattatctgtaatactgctggtgcagtagcatacaagaccacataaatttaggcagtacatatcaaacagaatcattatctaaaaaaaacatatcaaacaaaatggaaacacacttgccagatttgagcaaattattcttcaccaactactgacatgaagacatcatattttgcatagcttacaaaacaatgttcaggattccaaatttttagcatggcttggttgaactgaccgtttcagcagaacagcaccaataataaggtaaacgcataccgaacatactgatgttccaacttttctagcttaatccagtgacttgcctggctgtaaatgtaatgggctactaagcttatggagacattgttttaacatctgcatcttctccaagacatgagcaaaatttgacaaacagattacaccatagttatctcattcagattttagaacaaactacgtaaatttagcctgtacatatcaaattcacagtatgtttggatgggcctgaatccacggtctacttgcgggaataagttcacccgaggtccctcaacttaacagcgagattttttgaggtcccttaatcacaaaaccagaaatttccacccctaaactatacaaaactgttctcaaggtccctaggcagtatatatgggtgatttcgctgatgtggaatcctagtcagcaaaaaaaaaataaaaaaaatatacgtgaggcccacatgtcagctgcacattccttcccttctcttttcttctccttctcctcttttctttcttctcctcttcttcttcaatgacggatcaaggtcagcggccggtgggcggagcagcggcgggcgagcgcgccggggtggcgaggagaacgacggagaaggcgagtgaggcgggcggcgaccttgctcccgttcgcgtgcgtggagttcctccgaccttgctcccgtccggcggtgcgtccagggcgcgcccggcgctgtggagttcctcctgtccatccactggtggagaaagggtttgtagtcccagttggtaaccctctgtagtcccggtttttcaaccaggattacgaatccgggactaaatatgtctatctttagtcccggttcgtaacaccaaccgggactaaagtttttttttcttttttttcttttctcatgttcaatctctccaaatcattataaaaataacaaataacaaatcacaccacaaatcacaaataactttctcatgttcaatctctccaaatcattataaaaataacaaataacaaatcacaccacaaatcacaaataacatatagcacgaatcacagatacacgaatcatagatagttcacatatcacatatctcctaatatcattcacaaatcacagatcgcatcacaaatcacagatcgaacaaatcacacagatcgcacaaatcacagtcatccacatcacattaagaagggaaaaagaaaaaaaaagcaaaaaattccatgccgggcggcccgaggcgctgcctgccgccgtcggggcggtcctccgcaactgccgcggggtggcccttcacgactccgctgccagccgccgcggggcggccctccgcgcctccgccgccggccgccagccgccagcgcctccaccacctgcctccgcgccggccggcgcttgccaccgccggccctccgcgccggccgccgcccgctgccgccaggaagacaggggagagaggaaggggaggaggagaaggagtggaggggaagaaaagctaaggataagactgaggaggagggtcagacaatggacacgcgaagagataaacatcgcgcacggcttggggtgatttttagtcccggttgttataaacaaccgggactaaagatggatctttagtcccggttgtttataccaaccgggactaaaaa

SEQ ID NO: 7722 - DNA, 17346 bp, Oryza sativa
cctgctactgcatcagtagtattgtaaaggatatgcatcatatatttatatatatatatacactaagctttaattaaaataaaataatcaaacgttacgtgaaaatttaacgatatcatggatgaggacagaatagtatttttcataataacacaagtggtctcaaagactggtgcagtagagagaagagaatagtgtggtcagtagagaggaggaaaagcctcttgtcgtctctttgacccaacgaccccgccattgctcacctccacctccacctcacctcctcctcctcctcatcccctcgccggagcggccacgccgccgggagggagggagctcgccgcagccgcagccgcagccgcaaccagccagctactgcgtgctgcaacctgggattttcttttttcttttttttcttgtggatttgatctgaagtggaggtgggaggaggaggatggagagctacctggaggagaatttcggcggggtgaaggcgaagaactcgtcggaggaggcgctccggcggtggcgcaagctctgcggcgtcgtcaagaaccccaagcgccgcttccgcttcaccgccaacctcgacaagcgcggcgaggcccaggccatcaagcacgccaaccacgtactccctcctcctcctcctcctcctcctcttccactcccgctcgctcgctcgctctgggatctgggacctcgccgccgaggttgctagggtttttcttatccatcctgcagagcgatctggagttgggggcagttggtgtgtgtgtgtgtgtgtgtgatgtgatctcatctccaccaactactagtgtttgtagctgcacactgtgtgcgtaggaggaggatcttgagcttagcaagtagtagcaaattagtagcaattttgtggatatggatgcggctgttgcagcgagaaattgcggagtctgatagtgatggctgttgctgagctataggaggggatccttgttgcttcatcgctttcgacatgtattgcggtggtgttgattttagtatactcgctatggtttgggaattaggaaacccggttcgcaagatcggagcatctgcatgtaggcgcttttcttgtgaacattgtgtagcaagcccgtcgatcagagcctactatcctttccttaattgactccagagtgcagctatgtagtagcttcgcactcacgaatggattttcgagaagttatagttggaaggttttcggtgctcacgctgctgcattcctagagcgtgctaagcttatttttcgcacttaattctaagaggttactgaatttcgtactgtggatggttttaacaggagaaactgcgggttgcggtgctggtatcgaaagctgcactacagtttatacagggtaatcatgtaatgattggatgctgtttcataatgtagaacgtgccttgttttggtattttcttatatttctgaccatttttagtacctaataaacatgccatcaaaaatacaaatactcaggtctttcacttcgaagtgagtatgttgttcctgaagaagtcaaggctgcagggtttcagatttgcgctgatgaactgggctctattgttgagggtcatgatagtaaaaagttgatcacccacggtggagttactggaatagcagacaagcttgcgacatcaccagcggatgggttaagtacagctgaggaaagcattaagcgcaggcaagatgtatatggactaaacaaattcacagaaagcgaggtccggagtttttgggtgtttgtatgggaagcacttcaagatacaactcttataattcttgctgtctgtgcctttgtatcgttggttgttggcattgccatggaaggatggccaaaaggtgctcatgatggtctgggaattgttgcaagtatcctcttggtcgtgtttgttaccgcaacaagtgactatcggcaatccttacagttcaaggacttggacaaggagaaaaagaaaatacaagtgcaagtcacaaggaatggttttagacaaaggctatcaatatatgatcttcttcctggagatgttgtccatttagcaattggtgatcaggttcctgctgatgggctattcatttctgggttttctctactgattaatgagtccagtctcactggcgagagtgaacctgttgttgtaaatgaagataatccttttcttttgtcggggaccaaagttcaagatggttcctgcaagatgctgattacaacagttggcatgcgaacccaatggggaaaactaatggctactctcagtgaaggtggcgatgatgaaaccccactacaggtcaagcttaatggtgttgcaactattataggcaagattggtctatttttcgcagtcataactttcattgtcctttctcaagggttaatcagcaagaagtaccatgaggggctgcttttaagctggtcaggagacgatgcactggaaatgttagagcattttgctattgcagttaccattgttgttgttgctgttcctgaggggttacccttagcagttactttgagtctggcattcgcaatgaagaaaatgatgaatgacaaggcattggttcgtcacttagccgcatgtgaaacaatgggctcagctacgaccatctgcagtgacaagacaggaacactgacgaccaatcatatgactgttgtcaaggcctgcatttgtggaaacataaaggaagttaacaatcctaagaatgcatctgatttgtgttctgagcttccagaaactgttgtcaaaacccttctggagtctatttttaacaatactggtggtgaggttgtgattgaccaagatgggaaatatcagattctaggtaccccaacagagacagctttgttggaatttgcattgtcacttggtggaaattttaaggcaaagcgtgatgaaactaagattgtgaaaatggaaccctttaattcaacaaaaaagaggatgtgtgttgttcttaagcttcctggaggaggatgccgtgcacattgtaaaggtgcttcagaaatagtgttggctgcctgcgataagtttatggacgagacaggtgctgttgtcccccttgataaaacaactgctgacaagcttaatgggattattgaaagctttgctaatgaagctcttaggacattgtgccttggttatcgggaaatggaagaaggcttttctgttgaagaacaaataccactgcaagggtatacatgcattgggattgtaggtattaaagatcctgttcgcccaggcgtgagggagtctgttgcaacctgccgatctgctggaattatggtgagaatggtcactggtgacaacataaatacagcaaaagcgatcgctcgtgaatgtggcatacttactgaagatggcctggctattgagggaccggagttcagagagaaaagtcttgatgaactactcaagttgattccgaaaattcaggtttgctatgcatatattaccttattgacttaagtttttaccatctatatacaaacataattcttggtgattctgtgtattgaaggtaatggcccgatcatcaccacttgacaagcatacacttgtaaagcatttgcgcacaacattcaatgaagttgttgctgtaactggtgatggcacaaatgatgcgcctgcgcttcatgaagcagatattggacttgcaatgggcattgctgggactgaggttagattatttaaccatttgaagagatgaaaacttcgagttctattctctctggtcacaactgtgtgtcatttttggatgttgacatggcgtagcaaatgcaactttgaccactaatttccattgcgataatgataaaactcagtagaattaatattatgtaagcatttttttattcatattttttttgtaaatccaacataaacattcggagatgttagaaacatatggttagaaaacatcatttgtttttgactggatggactaaatggtattaatcaactagcagatatttcatgatttataattttttattcaagtcatgcatttagtcaatttatccagcaccatacacccatacaaaacctaaatattggtaatctgaaatatccttatttatgtcatccagtaactaatgcttgcttattcaggtggcgaaagagagtgccgatgtcataattctggacgacaacttctccacaattgttactgttgccaaatggggacgctctgtttacgtcaacattcaaaagtttgtgcagtttcagctgactgttaacgttgtggctttacttgtcaacttctcttcagcttgctttacaggtatacttcatatcattgatgattctgttaactccagaatttggatatcctctcctgaccttttatattatgcaatcgcaggaaatgcacctctgacagctgttcaacttctttgggtgaacatgatcatggacacccttggcgcccttgcattagctaccgagccacctaacgatgacttaatgaagagagagccagtgggcagaacagggaaatttatcacaaatgttatgtggaggaacattctggggcagtctttctaccaattcattgttatgtggtatctccagacgcaagggaaaagcatgtttggccttgatggccctgatgctgaagttgtgctaaatacaattattttcaactcgtttgtcttctgccaggtatgtgtaccataccaaatatgtttctttttttcttcggctaggagtacgggtgttgtcaaagttgccctatgcatgcagaggcctcatcactaattcaattagttcatagtccatcacctgcacacttaattaatcaacatttttttaaaagaagtgtcctgcttttctccagttagcatccacattgttttagatgccgatatgttagggccaatgcttataaaaagggcaattcactatgacggaattcagtcagtagattaacagatgtctagccagatgtgtggctaacaaattgatggccacaccttaggcagggtatggcaaaaaaaccgagtcatgacatgtgggaccataagtgtggcaaacaaaataaacaataggctcataaagtgtgacaaagtttggcaaagtgaggtagtgaaccaaacacccctagtcccagaataacatcaatcctctcttctctgtactagcagttcaagatccatttctcttgcaatacatctgtcataatttgttgaaataaggagggtagtccaacagaagatgataattgtttcactgccaacctgataaactaacctggtatatgctatttcaggtgttcaatgagataagctccagggagatggagaagatcaacgtgctgaggggcatactgaagaactacgtcttcttgggtgttctcaccagcacggtagtcttccagttcatcatggtgcaattcctcggcgagtttgcgaacacgataccactcaccaggctgcagtggattgccagtgttctccttggcctcattgggatgcccatctctgccattatcaagcttcttcccgtcggctcgtcgtgatgaagatgagatgatatctgcagtgacagtatccatactgaccaaattccatattgtttggaggagctgaactctccatgcagtcttttggaaatgcatgtggggcaagcagtgggaataggcaatagctgcactttgacaagtttttttgtagaatatgaatgtgtcatatttcgcatcatattgtaagaagcattttgttttggcacttttgctggttcagttgtgtagcaggatttcaaggttggtgtttgtattggaattcggtgacgagaaaattatgtggattaatgaacagaagcataaaaatatctccttttatcccctttccccttgcacttgattttgttatgttcattgagtagtggttagtgatacaccgcattgcactttgctatagcgtccatttttcctccttttttttcacctatgaaattattatatcctgaattccaataggatactctttctccagccatttaagattttaagaattttttattgatgaaatgaaacacaattcttgtacgttttgagaaaaaaatgtcttggtttatctattaaaaaaacaccatggtacatcttactaagaacaataagtctttactaaaaaaaacactaaaagaaaataagtctttatattataaacaatttactcttattctgatcggtttgacccgtttatttttttaccacttattataagctgggaaaagaatatacacaaggaacctaattaacaagctactccctccgtcccataatacgtcccataatataagagattttgagtttttgcttgcaacgtttgaccacttgtcttattcaaaaacttttaaaattattatttattttatttgtgacttactttattatctacagtactttaagcacaactttttattttttatatttgtaaaaaaaaattgaataagacgagtggtcaaacattgcaagcaaaaactcaaaatcccttatattgtgggacggagggagtagaaaagagagggggggggggattttcctttttttatcagtccatatattatcttctgggtggattgggccgtgaattttccctaccccggcccatcgaattatgcaagtagaggaataagttcaccggaggtccctcaacttaaccgcgagattttttgagatcccttaaccacaaaaccagaaatcacaacccataaactatacaaaaccgttcactcaaggtccctaggcagtatatatgggtggtttcgctgacgcggcatcctagtcagcaaaaacaattaaaaaaagtacgtggggctcacatatcagccgcactcttcttcagtgagggaggccggcgcgagcatagagcggcagcggtcggtgggtggcgggtggagcggcaggtggtttcgccggcgccatctcttgctggctcccaagatgtgccgcgacctggagccccgcgcgagtggcggcggtgctcgagcaggccaccgcgggtgacctgctgaccatcgcgctcgacggcgccggtgagcgcgtccagaacgtcgacaacgtgcgccgcatcatctccgggcggcgtgaacggccggagccggaagccggaagccgagactacatgacttctatagcaaagcaaacaaactttggccacatcgtacgcgcacgcagcacgcgatccacttaatttggcagccactagctagccgcatgcacgaagctagtaactgctatgcgacacatgcatgtattgactagctctaactaatcagctaactaagctatgcattgcatgcacaccactaacagttttgtactggttaggcggtgctgaggcgctgagcgcgctctactacgaccagctcaagctccagcagcggcaatggcggaggagacgagggcagcgggtgggaatggcgtgatgaggtcgtcgtcggcggaagcaggcgaagaaggaggcgtcgctcggtcgctggccacgagaggtagctcggcggccgcagcacgcacgccaaggtttccaagaaatcttcaccgccgctgccctctaagaccctattgaagctctcctcgaagagcttaagtgaatgcaggatgctcagagccgcctcctccagcgagctcaccttcgccgaatcctgcacgccgcacgtcatattttcctagaaagaacgaaccagcggtgtggacgtcgtcttgtccacggtggtggcgtgctgctccttgacgatcactggtggagaaaccatctttgatcggtcggctcaattccacaatagtcccggttccaataaaaaccgggactaaaaaatatttttagtcccggtttaaaagctgaggggtatttttttgatctttagtcccaaccgggactaaagatcatttttactcctggttgaagaggttgtcaggtcgtatcaggctccaattatttttagtcccggttggtataaacaaccgggactaaagatccatctttagtcccggttgtttagaacaaccgggactaaaaatcaccccaagccgtgcgcgatgtttatctcttcgcgtgtccattgtctgaccctcctcctcagtcttatccttagcttttcttcccctccactccttctcctcctccccttcctctctcccctgtcttcctggcggcagcgggcggcggccggcgcggagggccggcggtggcaagcgccggccggcgcggaggcaggtggtggaggcgctggcggctggcggccggcggcggaggcgcggagggccgccccgcggcggctggcagcggagtcgtgaagggccaccccgcggcagttgcggaggaccgccccgacggcggcaggcagcgcctcgggccgcccggcatggaattttttgctttttttttctttttcccttcttaatgtgatgtggatgactgtgatttgtgcgatctgtgtgatttgttcgatctgtgatttgtgatgcgatctgtgatttgtgaatgatattaggagatatgtgatatgtgaactatctatgattcgtgtatctgtgattcgtgctatatgttatttgtgatttgtggtgtgatttgttatttgttatttttataatgatttggagagattgaacatgagaaagttatttgtgatttgtggtgtgatttgttatttgttatttttataatgatttggagagattgaacatgagaaaagaaaaaaaagaaaaaaaaactttagtcccggttggtgttacgaaccgggactaaagatagacatatttagtcccggattcgtaatcctggttgaaaaaccgggactacagagggttaccaactgggactacaaaccctttctccaccagtggatggacaggaggaactccacagcgccgggcgcgccctggacgcaccgccggacgggagcaaggtcggaggaactccacgcacgcgaacgggagcaaggtcgccgcccgcctcactcgccttctccgtcgttctcctcgccaccccggcgcgctcgcccgccgctgctccgcccaccggccgctgaccttgatccgtcattgaagaagaagaggagaagaaagaaaagaggagaaggagaagaaaagagaagggaaggaatgtgcagctgacatgtgggcctcacgtatattttttttattttttttttgctgactaggattccacatcagcgaaatcacccatatatactgcctagggaccttgagaacagttttgtatagtttaggggtggaaatttctggttttgtgattaagggacctcaaaaaatctcgctgttaagttgagggacctcgggtgaacttattcccgcaagtagaccgtggattcaggcccatccaaacatactgtgaatttgatatgtacaggctaaatttacgtagtttgttctaaaatctgaatgagataactatggtgtaatctgtttgtcaaattttgctcatgtcttggagaagatgcagatgttaaaacaatgtctccataagccttagtagcccattacatttacagccaggcaagtcactggattaagctagaaaagttggaacatcagtatgttcggtatgcgtttaccttattattggtgctgttctgctgaaacggtcagttcaaccaagccatgctaaaaatttggaatcctgaacattgttttgtaagctatgcaaaatatgatgtcttcatgtcagtagttggtgaagaataatttgctcaaatctggcaagtgtgtttccattttgtttgatatgttttttttagataatgattctgtttgatatgtactgcctaaatttatgtggtcttgtagtataagatctgaatgaggcaactatggtgtgatctgtttggcaaatttagaaataagatgctagaacaatgtctccataagccctacctcccaattaacctattcacttgagtttctactctatctttgagatgtactaatatctaataattccacccaatatcattaggtgaaccagaaaaaaagtgagccaattgggtttatcaattcaaagccgtcaagtcattgcaccaagaagattgatctttaaaccaaaacaaaaaaaaaaaaggttcaaacagggggttcatcagagagcagccgccgccttcgtgctcatgctcgaggagaggaggaagaacaggttgacgacgacctgaacgccgtctcggaggacgtgcggggtgggagcagcaacaatggcggcggccgatcaggtcggaacagagctcgatctttccacggcgaccattgagcgactccggtgtccaaattatgaggctgcgacgaaatataagtgggcattccaggccagatcagcagaaacacctagcttcctaggcttgtcaaaggttggggaaaattgagatgaacttatcatatcttactataaagttatcccccactaactccttaaacttaacgtgcaaagatgccgcataatcattcattaattaacaagataccacatcatcatccactaacaatcatcacatctaaacatcatgcaaacatgctatatctttatagttttataatttaagagcttttcaaatacaaacatgttaaattatcatccaacataatttcatcccactaatctatactttctataaagttataacccactaactctaaagcttaacatacaaccatgccacatcatcacccactaacaatatcatgcaagcatgcaagagcatctacaatctatttaattctacaaattatcatgcaagcatattcaatcaccacctctcacatcatttccacaatagttttacaaatctctctatcatttttataatatttaatatatacttatcaacatgttctacattaaagtgcgaatttcatttgtttcatgataaatattgataagccctaagattttattttttttctttttactcctagctgaattgtaacgaaaaataatattgaaaattacttagtaattcacgcagcaaagcgcggggaatcccctagtttaaaagagaactatatgcacttgctgctcacacaggcaaaaagagctatgtttccaatataacagtttattacagttggtaggtactccagtaaccaagtactgatgctgcactgctttggcatccttggcaagacttttgatttatctctggctgtcaaattaggtcagaaccaccctgtcctagtcagaagagaatcagccaggggccataggcatcatcaagtatatgatcatgaccatgccgcttgtcactgatagtctgggttcaacagaagtaagcaatcctagtctagattggaatatttgaataagaaatacgtttggaattttagatcagtacaaaccccttgtgtgtcaggatccgggggcatgcgaatatcataaaaaaaaaagaaaacaccagaacaaactttctcaaaaagggagctaacaacttgttcataagagcttgaaatgtggcatggcgttagtcaatccaaagggcatgactatatactcaaaatgacccatgtgagtgctaaaagctgtcttctaaatatcatctgggtgcatgcgaatctggtggtaccctgacctgatatcaatcttagaaaaatatttatcaccatgcaattcatctaagagatcctcaatggcagggatatgatatttgtttttaatagtctgagaattcagttgtctgtaatcgatgcaaaggcgccaagacccatcctttttcttggcaaggatggctggggaagagaaaggactgacactgggtcatatagtttgagaatccagcaactgttttattagatcctccagggcattctttttatgatggggcagtcgatagggcctcacatttactggctttgcattgggaactagtggtataggatgatcacaatccctgctaggaggcaagtgtagtggttcagcaaaaacatcatggtaattatcaacaattggcaagagacttggtggggtaggagtagcttgtaagcagaacactgcaattgctgaacaatcagaatagctcctgctgccccctgagacaacagtttgtccagttgatgagcttggaccataaaattgcctttaggtactgtggctttaaatgatagtgtaagtggtatagaaccattgagggacagagtcaatgttatggtatgaagatccaggccgtgtttagttacaaaatttttcttcaaacttccaacttttccatcacataaaaactttcctacacatacaaactttcaactttttcgtcacatcgttccaatttcaatcaaatttccaattttggtgtgaactaaacacagccccaatgtaattgggctatgttcataaatgggttaattggatccagaaaaaatttgaaaatataccatttattttttttctcttagaaatattcgggttgtaatttaatttgcacaaatataccgttgatattacgatcacgcacaatgaaaacgcgagatcgctcggtgtcacgcggcaagttcgcaagagtgagcggtcttgcaggctcaaccagcgagagcgagcggtctcatagactcaagtagcgataccgatccttgccgctaatcactgattaattagtgattaattatcttaattagcaattaatcaattattaattgatcactaattattattaattaatcgttaatcattcaattttcaaaacgctctcgcacactcaccatgcgagactgctcggtctcgcatcctcttcatgcgagaccgcccgtgtcgtcagcccacgtcagtttcacgcaatggtttagcgataccggtggtatatttgtgccaagaagtttatatcaagactatttatgagaaaaaaatatgaacagtatattttcaaatttaagtcattggatccatgtcattataattttatcattttttgaaaaataccattactattcatctatttggaatcgtgccattgtaattatatagttagtcagtatatgccactacttacccgttcaaaacatattgtaaattttttggaccaaattaccctttttcatccttcatttctgaaagttcaagtgccattgatttggtttgatgattaataacaaatccaattatgtgagactaatgtttttataagcatttctttgcctagtctcatgtggatatgaaagtggagtgttggtggacctaaatcacaaggatgaaatgcatggagatcaagctatatgtatcactctttctcttcatgtacatattgatatgatcgtatataatatttccacgtgattggcatatgcatgtgtgactaatgttttgtttgagtattatctcttatttagtctatttacattgagaacgtggagatgatgaaggtatttttttagtatctatatttgagaaatgccttctattcttgtataggataagctctcaatgtttaatatcttgttatgcatatacttgcttcacacaaatattttgtatgcatacatttagggggagcaaatcctatactttagttatgcatgtaatcgatccaagttattcaccttcatttaattgggatctttacatttgaacatatatttgagtatatgacacttgtggtgttgattaatactcatcatttattcatatccttttatacatgcgatcggttggtcaacatgtggaggttgacaaccggatcattgggactaataattttattgagttgaatgaaagaaataggtcccaaggattacaaaggtgttgatgctcaagtgatatcattacacctaataataccaagaatgacaaagtgaagatattgaagatgtgtgatacgaagtggctattatagcaagatggtgaagggcaagcgatgctcggtcgcgatggaccatgcggcggtgaagggcaagcaagggggcttggcgccgaagaaccaaatccggtggtgaagggcaagtgacggctttgtcatgatggaccgtgagagaccatttgaagctacaagtaaccgcatcaatcatttgaagaatatatggtgaaacggtatcggcattggcgtccctcaagacaatgaaagaaagatgaaaaaaaggcattcctaatggtataattatcttcttatttacatttgagtttaggaatgccgtactattaagagggatgctacgtcgagatgtttgtgtatgtctcggtgctcaaagtgacctatcatagtgctaccttgagagaaacccaacctttaacctattctttgagtggttttagaccttgtttttggttgagtttggtagtcctctgagtgagctttccatagagtccaagttcataaaaaacggactcccgagcgaaaagttatagtcgttttactctgtgcttttcggaaagtccgaaaaattaccggaaactccgaaaatttctccgaaaattttcggacattccgaaaatggctgtgaatctgagatttgcttcagtaagttttcaaacttgtccgaaaatgcttttcggaaactccgaaaattacagtcttggcctccaacggttagtttttgaggggctcgggtatataaactcctccacccctcctttgaggggctgctgctcttggggagtattagacacatccaaagcccaatagccatccctatttccctacctttgtggtgcctctttgtgaggaggatttgagaagggaagagagtttgattgagagagtgaggagttgagagctagtgagcttcactccatcctttgtggtgactctttgtgagagggatttgagaaggggaaagagttggattgagtgattgagaagttcagagctagtgagcttcactccatactttgagcactcgagttcatagcaagcaaatcttcgattgtgtttgttactcttggggactaaggtctcctagacggctaggcgtcgccggtgagcacctaaggttgtggtgtgccacggaaagtttgtgaaagcttcgatttcacctctgcacggaaagaaatcaagagtgaaaccaaggagtgcatttgtgcaacctcgtgaggaaagggttgaaataggcccggcccttgtggctcctcaacggagacgtaggatccgtggaaccgaacttcgggaaacaaatcacgcgtctcctctcttggtttgcccatttgtgcattctctcatattgtgtttgagcttgtttttacccgatcgacttgcatgcttaattgatttagttggtgaccttatatcttgtttagataccttatttgtcaccttttgattcatatacattttctttatttgagctacaagttcatagctagtgttttatttcattatccgccgaacttttcggttgagaccggaacttccaatctcatatcggaagttactatttgaaccgaaagttctcatcattctaatatgctatgaagttgtgataatttttaggaacgcctattcaccccccctctaggcgacattaaggtcctttcaatttccatctttctactgttcatcttctccaccgaagctggatctgatggtcggtgccataaagctaaagctcgaagcaggtggcgccagtggtggcagtgggaggatgaagcaggaacagaccaggggtggggtgcagcagaaaggatgcgacaaaccatcttgtcttgtgcaatgcaaccgcccaaatcctgaaatgatatccatggctggtgccactagctagctagccagaaagtttccctccagattcttttgattgctgatccgtcgtctctgtctatcctatcatcctctcaagctccaatatcgatcaaccgtagaaaccccacgagttcaagggggatcttgcgcacaaaagacatttatcaagccctaattggacttttgtgtggaagatccgggccctgccaaaggtgcagttctttgcttggcttctgtcaaaggaaagactcccaacgaaaggtaatcttctcaaaaagatactccctccgtattttaatgtatgacaccgttgactcttcgaacaacgtttgaccattcgtcttattcaaattttttgtttaaatataaaaatatttatgttatacttaaagaatatttgataataaatcaagccacaataaaataaatgataattacataaattttttgaataagacgaatggtcaaacgttgattaaaaagttaactgcgtcatatattaaaatatggagggagtattgtgcaatcggcatcttgtgatctctgtcacctgactgaagaaacggctatgcttcctttgccccttcgctgttgatttctggctgaagattggaattgtcccaaacatcagtgataccagggaacttcactctctacaaccaagcggtagtctgccagataaacacttcagcaccttcttcctgctctgcctatggggactatggaatcatcgccatgatgttgttttcagaggggaatccccttcacttaatcgtttagcttctaagtgcatagaggatgccactctctgggctgaaagactgaattgtaccgacaggatagtagtggagtcctggaaacaaattctctcttctcctctccgttcaaatgtatcatgactttatgtattcgatcttcctttaaatgaaaattcaggtggggaagctctcccccccggtgaccagtctaaaaaaaccgtagaaacctcatgactagttgctgcgcctgcactgcatcacctcctcccgctgggagaacatcaccccatctgcatctctgtgcgccatcccacagattgctcgacgtgttgctcttcacccccatcccggttcctgttgcctcttccactgccaccacatactcagatctagctccaatggtggggaaatttaactatttgccacttttaggttaggcacttatccaaatgcccctcttaggtttgcacttaataatttgccactggagagaggtgatttcttaactatttgccacttttgcctacgtggcatgccatcgtggtgtgcacgcgtggaaaacaatatggaccccacccgtcagcccctttcctctcttcttatctacctccggcccgagcaggtgccgcgccaacgcgccgtggtgaggaatccaacgacgatgggcgggagcggcgcaatgaggctgctgcacgcgaggacgtgggtgagcgcgaccgccgagaggccattccgacggaggccgtctaaggcgaggccgcggcagcgaggtaggacaatgagcattgtggccgtcggtggcgaggccgaagttgcacatgctgagctcccacatgacgcggtggacccgggtgttgtcgacggcgagccctacctggagcggtttgagctcatcgagacgtcg

SEQ ID NO: 7723 - DNA, 37518 bp, Oryza sativa
ctagcaccgttgtaattggcatcatagtaacaaatagatgatccaatctccaataagggtcggacatctaattttgagcatagaaaatatcaaatagtattcggataatccgatcgccaatgaggaccggaccagccttataccattgattgtataaatggagtttgatgataaacgtgtttcggctctcattgatctggctttaatcatcaagatcaagatagattaagaacacgcagatgttccgatcgccaataaggaccgaacatctattgtgtttaatctagaaaattaatatttattcaatgtgctcaccatccagcgcaaatatcttgaatggcggcatgttgtcgataaatgactcgacttgacgaaggacgccggctgcggtgtttaattttctccgcagtggcagcggcaccggtttgctatcaccaggcgacttcaatctcctctcctgattttcctaatctactaagaagaatgggatgaatgaaaatgggcagatgggtgtctcctgtggcgtcctcggcgtcccccgctctagatgggttctgctccttatataggcagcggtgacggaaacagcctccgaatttccagcgccccgtgctaatcctcctgataaaccgatgcagggacgagccaatgcgtcgccgtgtactggagataattatgtgattaacatgcctaatgacggtgggcccatgtgtttaatcgcctgtcaatttccaaattggagataatgatcctcacgtagcaaagcaagtaacgatagcacttgcttatttcttttcttttaatagctccaatcttttgaatcgtacatcggatttaaaattcatttgaaccattactttctattcgaattatacatcaaaacgagtccaatatcgaatatattcggacaccgtgatatttaaaatttctgggcccatatgtcatatagacacgtctcgtatatatttaataaaattgggtggcagataatattttcgtacaaaattaaatgcccaataatttattatatcttatatgaatttttttgcacaaaaactcatcaaagaaatgccccccaccgagtatagtctgtacgcgaagtaggacaggctaatactcggtgaacaaatcatctattcagataaacctctccataaacgattaattttgctggtaactatcaccagtatatctccaacaagtccgagacgtatcaaaactgattagtgattaatccggcatggactccatatcgccgggcatatatattctcagcagccacgcctgcctagggtttcgaatttgtcgtccttctattctgaagtaattttctctaatctttgttcgtctcactagtcgggacaaacgaaccgatctacgtgataaagaccaggtttgctctacttgactatttcttgctttacatatcttgctaataccttgaaaccctcacgatcaggcatgtacttttcaataatcttgtcagctatttttgcctcccacttttgatagtactttaagatggggagagagagcaaagaaaacgttcaaatccgtttcagggcgagcgagccaaaaagaaacaaatcaccggagatcaacacgatcgtgatcctgaattgattaatacggaggagcaatgcgcccctactgatcaccagcgaaactccatggaatctggcagttcagaaggttctcgtgacatgcgcacaggataccttaaaacaactgctcacaatgtatgatcaaccttgaaccactttattgttttaaaacataagcgtgaccatactacttgcttgatgagcttcctgaacttcctttattatttctcttttattcttacagaaaatgccaatctcaatgtacatattatttagcgggtatgaaagagaagcaccgccgcaagaagaaaacggagaagcgttattgtggtgagaggattttgatttttttaaggatgcagagccaaccggtaatttacccgaggatgcacaatcaaccaacaatggtgaagcaaagaaaacagatgatttcatgagtcaggttgcttcatgtttgaatattaagtggggtcaacaacttatacgtgaagcagagtggatgtcgctcacgcagagtcgtgactgggcagcattccgtgtcccgacaccattttaaaaattacttgccaattgcaaggatgtccttgtaggtcatcaagatcaaccagggacacagccaagagggaggcctggcagcatgtgtctcttgaagccggttttatttaatgactccgggacttttgatgtgccacgtcatactggtacattggcacaaaagttcattacctcaagaaccaagcgatggttggaagatcagccaatgcagttaaggctagaaatttctcccaatgacaagctaatgctatgggctcgtatgctaatggtgaatccgtacgaccgtacatatctcaagaaggccggcgtactccgaggcataatggcgtctatttataaatgcaagatagatccttcattagtggccgcctttttaacttattggaatgtggatggacacactttagtcaccagccagggagagatgggttatcctctccatacaatgtacgatgccatgggcataccaatttcagggcgcctttatgaagaatttatccctttaccatccacagctcgtgggcatgtgcagactctgcacaatatatatgttgaggagtgtcccctacaactaaatgagggtcctggaatagtaaccatcgcgacatgggtcaatcacttcttcggcgaccaccctgtgccttttcagtcatttttacccaatggttttgctgatccaaaaaaacctttatatgagggcccaaattttcgtgttgagattcggaatggccgacccactgctatcatgtgtggtctcgaaatgacttacgtacacacctacccattggtggtgtaccgggcagcttttatcgccgcatggttatgcacatattgcgttccagtggaggaaggcaactttattcgccccgaggtttttactatggcaatggaaatcgctcaaggcagccgctgggccattggtgttacaagcatggcatttttatatcgtgccctggacaatgtctaccaccaagtagctgcacgtcaggcttctgcgagtgactgttcttcatttgtgccaggccattttattatgggctggtttgcatctttttggagagggttcctacgtcggcaactttatcttgcccggtgatgaacccgccctttattatagacttcagagactatgagtctatggatattaagagcgcacatagcttattttgggattttaatgatgctggaacggctttacgttcactggacttcttgggacggtccagcatccgttttcccacatccgaccaggaggtcgagttatttgatgaccgttctcccaaggcacacagggcaatttccatggcagccgtggatttcttggtcagctgcactgttggcggcgtcacctataggagaggtgaagtttttgacaatttggtttactgtcctcatcgattcgctcgcatgttcaactatgaccagcatgtccccaatttccttatgatcaccattaacaggacacgtagccttgattttccaagttacctaaatggcaattctagggatgaatcgctgcaacttttgcaacggcgccacctagcttttcataggccgaggggtcactcaatatttattcaacctttcgcccgggacaccatacgttcacttgattacatcaacgggtgctctcaagctttcaattttctaaagcatccgagcctattctgttcacggtcaaaacactccaccaaagctgcaactacgaaaaatgcacccggggcagaaacatcaggcatgcagtttaccaaattttttttaaagaaaaatatatactctgttatcaatatgaatggtcattggttactgtttcctctaatttattttcgtcccccttcttttttttaggaggttcaggaggtagggtgggcacacctaagcaaagaacagccaagtctgtctcgatctctcctgagcaccaggaggagagcgctcaaaccgagatcaagacaacgttgccattacccgcctcgagtgcgaaccctacagagattgtgagggtaggacccgaccggtctggaaaagacatcaagaaaatcagaacatgcattgccaacccagacaatgtcacaactcatgtgtctgcccaagcctcacaacaggagttattagtgttacctcctcgaaatgagactgtactcaactcgtcagccatgacgcatatcgacccctacagtgaagggttggctattccacatgatgatataggcactctgcccacagatcttcttacaggcgatttttctgatctagccactcttttggatggaggggcaaaccctgaaaccagtctctgtttagattcgcccatttttccgggtgctactcagaaggacaacgttaattcgcatctcctagaggacgacgagacgcgtaccgaggcttgtgctgatacagtaaaagggggcacctctcatcacggtacaactcatttattttattttatagacatttctgtttgttcctttttttatacaaataaccaatttcatgcactcccttccttcttatgtgtttcagcttcactgactggagttgaagagttgtccaatgaatccaagaagttatctatggatgttgagcaaatcgtcgcacaaattctaaaggcaccgaacgtagaccctggtgcaggggaaaactcctagttcaagggatttcatgggaacaactcggtgaccctgccgaaactttcagatgatgtttcagctcgtggtcttaaacatgtctggtctgagatcaaagcgtttcaagaattactcaaacaacgcccgatacagaaggatattgtgcttaaagagataagcatcaatctggatttgtggagtaacttcttctcaaaaccacctcctgaaataattaggctaatggaagggttacgtgtgcaaaagggagcgctatcagaggaagcgccactgccaaccactaagattgaccatcatattgatatgctccgcactgctcaagacaaggtggagtcatcgtgcgtcgctttggcagcactaacgagtcaatataacgtagaacgggctgtagaagaaggcaataagagggagtgctctcgacaagcccagaaaatcaaagcagagatagcaatgttgcaagcaaaacttcaacaggtggaagatgattattcccgtgctcaatgccaccaagatgttgtaatagagaacttgaactcccatcttgagcgacatcgacaagctaaggatcgaggatatgagattgcggcacagttagagcaggcgagcgtacaccaaaagtctctccaaaatattgaagactttactaagccagacgagtttggtctgtcccaatatgtctacaatatatttgattttttcataggctgctcattagatgagtagacgctgttttaaaatcttgtttcaggcttgtaatagctcttcagatattttatttgtttctgatataacagagtgaactcctttatttgctattatatactttgatttgcaccagaacaacggagtgaactccttcaaatttaataggagcgttgcattgttaccaaccgtctttgtgcactggcttcttccttttttttctttatatatatacatttcctcacataaaagatgctcacgttcagattttttagtggctttactactgtagcagtaacagtaacgccactaattcttcacgattctggttcagccatagattttttttattcaattttttttactggcttttaaaagaccagcctccccgctatagaaattatagcgaaattcatgcaacaatgcaaatgtcgataaatataccatagcgaagattcatgctatgacataaaattccttgtggcgaagaatcatgccgcggcgtgagaacaaaaaaaaatttaaggaagaaaacgtagcgaaaaattcgtgccacacactgatgattatatggcgaagtaatcataccatcttataaaattctattgcgaccaaaataaatcggtgccaaccaatagaaaattaatcaagctagacgcgaccgttaaaatggttacggtactaggcgtctaaactcgaagggtttcacagtcctgcattgaccgtactggcatgctttactgctcccaaatattgactgaccatcatccgaaaatcatagatgctggttcagtgcaactgtacgtaattgactgggccactgtgagaacgcgtcccagtataaacttgataggattaattgccgtccgaaaatcatagacgttggcataatccaattgttcatgaaataataagatcactgtagaaaaattcgttacagtgcagaattgttggaattaatcgtcgtccgaaaatcttggacacgggtgaaacccaattaaataataaaatcactgtagaaagcacattacactgtacaacttataatattaattgtcgtccgaaaatcatggacattggtatgatccaaccatatattaagtaatcatatcactgtaataagaacaccacagtaaacttagtaggaataatttccgtccggaaatcatagacgttgtcatccttcttttcttttgccacgtgttttttttgccacgcgtcataaaggccttcttcacacacatcttgtaaattcaggcttcaaatattattagcatatgagacggatgcccccgccgagtagagttcatgtgcaaagcaacagggactcgactcggggaaacaataaatgagttgtcttgtttccaaggaggagagagaaaaaaaatatgtgggatttttttttgtgtgttggcttttcttccggtcgccaagctatgaggtaacgaatggcaaactgctggaggatgtaatatgccctcaatttctgaataacgacgggatctcgcttaatgcttcaactccctcgtgtaacttgtgataatgagctcacgtttcatcaggatctcttgaaaacaaaggggtcttttctgagttttccttcaattatgtgcctcatattttttacctttatcccaggaaggaggataggataaggctatatttcaaaggtggtttgggtcaataggctatgaaattgccattacttttgctgagggtgggagatgactacttcccgctttcagattgaagaagagcaaccaacccggctacaggctgctgccaagacattgccatactttcgctcattttcttgacgatgtcgctcgagatgggagttcaagttctctgttacaacatcttgtcggtgttgtgcactggagtgggcatcttccacttgttgaagtcttgcttgcaacactgctatctctgctctaactttccgtgcttgtcgtgagcactctctcttgttgccctcctctactgcttgctctacattatattgactcgtcagtgcctccaaagcgacacacgatgactccaccttgtcttgagcagtgcggagcagatcgacgtgttggttaatctggtcctgttgtgcgagaacaagattagtagttggcagtggcgcttcctccgatagcgctcccttaagcacgcgtaacccttccattagcctaattatttcaggaggtggctttgagaagaagttactccacagatccaggttgatgcttatctctttaagtataatatctctctgtaccgggcgttgcttgagtaattcttgaaacgctttgatctcagaccagacatgtttaagaccacgggctgaaacaacatctgaaagtttcggcagggtcacggggttgttcccatcaaattctttgagcagggagttttcctctgggccacagttcatgttcaccgcttgtgaaaattgggcgattatatgcttaacattgatagacaacttcttggattcactgaacaagtgttgaatcctagctggagcacatgagaagaagggtagtgtgtgaaattgattacataaaaaaaaggaaaacagagtggacagagaagtataaaatgaaagaaaccagttgtaccttgcagagtggtttctcctgcccgcatgacagaattatccccattacaatgcttactagtggcttcggggcccactgccttgttagaaactccatctggtcgtcatcaagaagcttactagtaggttgagttgggggcatggtgcagatagtatcacacggcgtgtttgatcctccgccggaaaaatcaacatatgttgcggtatgatagatatgttatgtttccctgtgaggaagctgtgatgatccacatgaaaaaataagtcggtggccctgtttgatgttcaaacaagaggctactttagacaaccacatccacttcttcgctgtcccgattgccgttacatcttcgggtgagatattttgctggtcaatgtgatagaaaaatttgaagtcatcacaccaaagaaacatctcgccattatcttctcttggcgccttcttggctagtccactgtataatgtgtagattgaggacgcctcaacataggggttccccttttaaaaaaaagaggcacttataagatggatcaattcacggaagagtttaacgattcagaacctaacttctgtcccttttttttattatgatcttttcgccgtgagatttttgcatgccaaggcccctcccttgctgggaagtttccttgataccttcatcactatcatggccaggcaatggtgggtcatctgggatctcctgccaagtataagtggggttgcacacgctggtatgatcggcacgatcactagccttctgcattttcttgtcttgaacagtagcaaagaaattcgatcgactgctttccccagtcgatcaccgttaatttgcagtagctctgatcgaagattttaacgatctaacatgagctctgttttaattactcgattaagaagctgtacagactttatttatatatataggacatacggccatgagcccgtatgatacatgaactcggcttcaatatatatcagatcatgcacgtcatttgccgattggcagccagcttgtgaatcaagccatgtaccacacggagatggattaatccttcgtaacaatatactactgagtatttcaccgagtgaagtctgtcctgcttcgcgtacaaactacactcggtggggggcatttgtttgatgaatttttgtgctaaaaattcatagaagaaataataaattattgggcatttaattttatatgagaatattatttgtagcacaattttactgaatatatacgagacgtgtctatatgacatgtgggtctagaaattttaaatattatggtgtccgaatatattcgatattggactcgttttgttgtataattgaatagaaagtgatggttcaaatggattttaaatccgatatacgattcaaaagattggaactattaaaacaaaagaaataagaagtgctatcgttactacgtgagcatgcatggtcattggctgtggcgattaaacatatggggcccactgtcattagacatgttaatcacataattatctccagactgcagtacacgttgacggattggctcgtctctgcgtcggcttatcacgaagattagcacagggcgctggaaattcggaggccgcttccgtcgccgctgcctatataagaagcagaacccatctagagcgggggacgccgaggacgccacaggagacacccatctgcccattttcattcatcccattcttctcagtagattaggaaaatcaggagaggagattgaagccggccggtgatagcaaaccggcgccgctgcggagagaattaaacaccgcagccggcgtccttcatcaagtcgagtcatttatcgacaacatgccgccattcaggatatttgcgctggatggtgagcacattgaataaatattaattttctagattaaacacaatagatgttcggtccttattggcgatcggaacatctgcgcgtttttaatctatcttgatcttgatgattaaagccagatcaatgagagccgaagcacggttatcatcaaactccatttatacaatcgatggtataaggctggttcggtcctcattggtgatcggattatctgaacactatttgatatattttctatgctcaaaattagatgtccggccctcattggagattggatcatctatttgttactatgataccgataacaacagctttagatatttccaactttcattggtgattggataatctaaccgatgttttacaaaatatattttgataccatgcacacacatgggagctattcgtgatctttggaagttaaaaattatggccgagtatttacgaggccggtgtcacgatattattaacatgtccaaacatataggaacggatacatgttactaggttccgacgaggcaaaagtaacgatatatccacatctaataaaggctggcatatatgactgggcaccgacgaggcaaaagtcatcccctttgttatgatacctgactcatgtatggacatggtgataatatattgtgaccaggtttcggcaaaacaaagccacctatatcacagttatcattaaatctctgcaccaacttcaaccttcggcgagcaatcaattttgaagacgacgatcacaagcgcagcttaaaataaaacaaaagaaataagcaagtgctatcgttaccacgggagcatgcatggtcctcggcgtcccccgctctagatgggttctgcttcttatataggcagcggcgacggaagcggcctccgaatttccagcgccctgtgctaatcttcgggataagccgacgcagagacgagccaatccgtcaacgtgtactgcagtctggagataattatgtgattaacatgtctaatgacagtggaccccatatgtttaatcgccacagccaatgaccatgcatgctcacgtagtaacgatagcacttgcttatttcttttgttttaatagttacaatcttttgaatcgtatatcggatttaaaatccatttgaaccatcactttctattcaaattatacaacaaaacgagtccaatatcgaatatattcggacaccgtgatatttaaaatttctggacccacatgtcatatagacacgtctcgtatatattcagtaaaattgtgctacaaataatattctcatataaaattaaatatccaataatttattatttcttctatgaagttttagcacaaaaattcatcaaacaccagatgaaaagaaccaaatgctgataacttgttcaattgtgcttacctggaatctcttgcattacattcacttgtttcttttgcattacgctctcttgctttgccttctgcatcatttgactccgtagccgactacaccaaaataaatggtaaagcagcaaaaacacaagatgattaatgcaactagctccagattgtgataaaagaagcatatgtacataagacacactagtcaaataaagtgtgaacttgttcagttggctgtcttaatgcccagtattaaattttgcttttcagcagagcaaacggtcatcagactgagctgtagtttttgacactgcaatcatcattttcttttatatcaagctgtgatgtttataattggtaattcgtaccaagactaacttaggaccaaatttattaaggtcatgtgctggcaaatcagtacaacgttcacgaaatgacaagctctactagttgaactgcacagaaaatagagaatgtaatgcaatttactgaagaggcaatgacaacgtattatagaagagtacaaaaggataacaccaagttagttactgcttgaatcatcgttaacaggaaaatagcatggcgttcagacaaatatgttcatgtctcgacacagcaaagcaatcgccgaagtactattagttagtcatttagctcataaagacatgctatgtttcaatacagccaatttgctagccatttaaccaacgtgttccctttatgttggaaaacaaacacaaagtagccagtgctaacctaaagaatataaccaaacagaagggacacatatcgaacctttggatgggattctttctcagatacgaggtgaagtggctggggaagaagtattcgccgtgaaagactctcttataggccttgcaacgggagggtccttgtacctcttgcactttctttatttcatcatcatcttcttcttcttcttccacctggatgtagagggtgggcagtgaccgcagcaccttatttgtcatgtccaactcaacgatccaaaacaggaactcatcatcgatcttttccatgagcaggaaggaaacgacacctggatcaaccaagctcaggtgagaaaaagtcggcacagcacgcggaagagcacaggtgtgacctacggaattagcacaaagatcccagaactcggcggcttccattgtaaaatccagttcccaggtcttttggtcgatgctgaccagagtccatgccgtgatggtgaaagcaggagggtatacatccttgtctgcggtggcggcaatggtgacgcagaccagcttgatgaagaagccactgtcactactacctctaacacaaacacagcgaactgggtcggcgcagtaggactggctgaacaagcgggtgctgccatctctcaccggtttggggagcgggatgaagctgaattgatgtggctcgtccccagggttgaggacgtcgatgagcaggatgccctggtagtagtcgacccagcacaggaagcggtcgtggagggggagcacggcgtcggtcctccactcgccgaggttgaggccgagcatgctcatggcgcgacggacacgcaggggagtgatgctccactcctccgcttcccctgattgcacaacacagagctccacctccttgctcccactggatgtgaggtgcgccacagtgaagagcgaccggccgtcctcgccgtcgccgtcgccgtcgcggcacaggaggccgacgtctcggctgcacatgtagcgctgccgctgctggtggtacggctggtacaactcgtcctcctcctggtcggtgaagccgccgacgaagcaaggcggcagccgcgtgagcaacggctgcgaggagggggaggcggagtagatgaagtagtcgagggggtagtgcccatcgacgttgaacccgggttcctcgaaggggacggcggcgacgaagaggatgcagccgcggtgggcggcgatgacgtcggggtagcggacctcggggaggtcggccggccactggggagggcagtggaggtagaggcgggagacggcgggcgggtcggcgacgcggagggaggcgcggacggggaagccggtgcaggtccggccgaccttggacgccgtgatgtcctcctcctcgtacttgtgcctcctccgccagctgcagcggacgtacgggtcgaggacaatccagtccgccgcccccgccggctccggcgatccccggccttcttccatgtcgccgcgccgcagttcggtgttcggttcggatcggatctagctagggttttacctcccactcccagatgtctcgccgccggctggagtgggattggaacaagggaaaggggaactgaatggggatatttcctcgggaacgggaaggaacgaaacggatcccctcctgttgaattttttttatttatacatttttttattaaaatatttacaaaaataattttttgtttcgaaaatttacaaatctaattgcctgccgcctttaaaaatcaccctctcaaagggcggcaagggacctaaatacaaaatttttatttgtgttcaaacccttcccaccggttttaattgcttaaaaactaataatgcttattcgatactccaaatgattttaaatggaaaagtgataaactacaaagttagatctcatcaagatctacaactttatataaagtttatctccatccaatgtcgtttgaaatgtagatctgagattttttaaaatgtgttttatattttgtaacgaatatttggatatctaaaacatcttaaatgaaaaagttattaactacaaagttgtagatctccttgagctctacaattttgatataaagttttatttcatctgactttatataatataattttaaattgtaaaattatagagctaacaagttatgctggaaaatttacatttaggtcccttgccgccctgtggaagggcgatttttaaaaatcgccctcccaaagggcggcaggcgattagatttgtaaattttcgaaacaacaaattattttttaaatattttaataaaaaaaagtataaataaaaaaaattcctcctgactttggggggtggaaagttacggtgtcgctgcacttggtttcatccctgccgaccagttcatccaacggcacacatccatcttccctcctgcataccctattcatattgggctacccagttcggcctgcaactgtggccatcggcttgcccatcaggccacattgactttgttgcctgctaccacatgcgcgaatgcagattttctttatttttaattttatatttattaaaatattttgaaaaataattttctattcgaaaaatttatacagaactagtagcccatcgccccgacgattttatcgacgtggcagacgaccattagccctcgcctaacgaccggccaccgagagcaccgaaaatttacaggcggtcccattgccaccctcccagagggtggtttttggctctaggtgcccgcctataaaagggctaggagggcggcttggagtcagcaaaccggcatggcttcgccgcttcccttttgctctctctctctcgcccttccctccttttggattttgagtgaatataatgtaaaatcggagaggtacaaggggttttataccccgagggcataaaatcaccctcccagagagtggcaagggggccacctacaagtgccatgccatcctcgccacccttttgcaggcgacctcccgcacataaaaaaaaaccctctggaacgggacaaggggtccacctacaaaaatgctgggccgagcacctgcacattaaaaaatcgtataatcgaccgcgttgaataattcaaaataagacaagtttcaagtaacatcattcatgcactgtaaatcgacaactaagttttggacaacactataaggcaaatggctattgtgactaaaacaagaataattaactatttaccacgtttacaagtggtgataaagaatttgtcactggacccatatatcatagacacatgaggacccacatgttatagacagtgtcagattatgaataccgcgtacctaatagtagttgactaaatctcggcatgagccaccacataccatgtcctatatggaaacaacctgcggatataggaggagttccgggtaaggaaagacaaccagagttctacatggaaacaacaaggactactcggattgtatccatattggtttcccctagttctacttgaacaagagaacacctataggtataaatacaaggccccctatgaggagaggggatacgaccacctcaatcaacacccaccatagaagacaagaacaatagatcaagacacaagatcaacatataagccaacatacgccaagacaagacgtcggatatcgacttcaaggataagcacggctagtcccctacctggcacgccactgttgacgtttgatgtcgcgattctctcgaactagtacgtagcaatctcccgcaccgtaacctccattggtattcgagagatgattctactcgctcgctagttctcgaaccagtacatagcaatctcccgcaccgcaacctccattgatgttcgagagatgattctactcgctcgctggttctcgaaccagtacgtagcaatctcccgcaccgcaagcttccattggtgttcgagagatgattctactcgctcgctggttctcgaaccagtacgtagcaatctcccgcaccgcaagctccctggttctcgaaccagtgcgtagcaatctcccgcaccgcaagattccattggtgttcgagagatgattctactcgctcgctgggtctcgaacaagtgcgtagcaatctcccgcaccgcaagtttccattggtgttcgagagatgattctactcgctcgctggttctcgaaccagtgcgtagcaatctcccgcaccgcaactttcattggtgttcgagagatgattctacttgctcgctgggtctcgaacaagtgcgtagcaatctcccgtaccgcaagccttcattggtgttcgagagatgattctactcactcgctggttcgcgaaccagtgcgtagcaatctcccgcaccgcaacttccattggtgttcaagagatcattctactcgctcgctggttctcaaaccagtacgtagcaatctctcgcaccgcaacttccattggtgttttgttttataagagaggagaggtggctacatggccctatatgttttgttttattttttttcctgatgaggataccacgttagcgaaaccaaccatcgatccatactaccataagacttagtttaacccaattttataagttgtagggtcatactttctccatcccaaattataggatgcctcttcttaaaaagttaaactcgataattttaactaataatcatactaaccctatcttccaatcactaaccatatcttgcagtaaatgttgaataggggatgcatcggttcgtgctcctccatgtatagccgcttcccaagttcccaacctcctcctcagtcctcacgttcacatctcccaagaacgatacgcgtgggacccaccatccccacgccccaattcaccacccaagccgactgacagcgaggccccacacctccaaccccaccatccgaccccacacgtcagccacataacccaaaccacccctcgtacgcaaagaaaataatctccgccgcggcagcgcgctgtcccctctgcctctgacacgcgcagcgccaataacgagacaaacccgaggaggaggaaaaggatcgctggccccacctggcaggtgacacagccgaggaggggggaggaaggttggcccccacctggcagtgattcatcaggggccacgtggcgtgagggatttcaaacctggtggtggtttttgtccatggggtcagccatgatcgctgcggcctgagctagcccgaaacggcaaaagaccaaagctgcaaaactttttccctctcgctcggtctctcctctctcgaggagagtgcagcggcaggagtgggggtagtcgcagcagcggatcagacacacgaacagagagagagagagagagcagacaacgagtacttcgctttggtttgatttgtctccttcccgtggtgtgttggtggaggaggagaggaggagcatttgagattggagagggggagggggaggaggaggaggttggtgcagtactgctgggtgcggttcgggggagaagcgcggatgtgagaggtgaggcgcgcagcgtccagcgatcgaggagatcgttttgatgttgattcggtttggggggttttggttgccttgtttctcagattcgtgtgttttagttgggtttctcgtttttttcgaggattttcgccgggatccgtgtggttttggcccccctctttttgcgcgtttcgtttcctcgaagctctcgtcgcgagcatggcgtacgtcgcctctgttgctcgccgaagcgacgagagggggaggaaatggtgctctgtttccggtggtttcgtcgtgagatgttggggtttgacaagcgccgggttctcgctggcttccatttgcctggagttctcgtggattaaatatgccgttatgtatattgcgatgatgcggttttttttcgcttgtgctttttgcgttttgtgtgggtttgggaaaatttttaactaccttgcggtgctttcatttgatttctggattttggattgatttgcctcatttgacaaggatttttgaggattttaatcattccccgtgcaaagtaggggaatgcttgattattctcttttcctttttcagaatctccgttcggatttgtccgatgcacaagtcatccatgcgtactgctaatatgcgtcgtctagtgtctcggcgcttctggattgaccagtgctagggttttaggtgctgttcgttgatggcttcatgccttgttttcctttttttttttttggagatttgggcttttcgatgatttacgttcgtgtgtattccacctatttgtggtgccacgattcgaccaatttcagccgccgtgcgaaattttccttgtcgtgcctgcttaaaagcagaggcgactgatggattcgtggaattccatttttgtgaatctgtctgcagtttcagtcccatctcctggttcttccgcttgctgcttttgtttgaaaatgtttagcgtacagtgcggcgatggctcgagtttcgtgggtttctttctgtacagagatgatattttgtttcttgatttcgtttatgtgaggctatgggttttcggttgatgtaaacttgagcgaaatttatttatgtgttcgttgtgttcatctgtgtttcaagtgtttgaagagttcgttttgtggtttgattttggcaggacgcgagtgaagagacgaccgggagcatggatcgcgccaaggcagcagcgcgcaaggacaaggcggcggcggcggggaaggagaccgccgtgtcccgcgccgtcgcgttggacgacaccgcgctgctgctcgcggcggtgggaagcttcaggaaggagggctccgacgcgtcgcggatgctggaccaggagatgtccacgaggctgctccacctcgcctgcaagcacgacgccgtgcagtgcgccaggctcctcctcgagggcggtcacggtatcaccgcgtcacccgtggatgccagggaccagctcacgcggacgccgctccaggtggccgccgaggcgcactcggccaggtgcatcgagctgctgctctccaagaacgcgcgcaccgacctcaagctggtcgatggccggcctcttctcgcgctcgagatcgctctcttgagcagaaggtatgcacgctagctagtgtcgtccattgcttgtgatggtgatcactgagctcacttctcaaattctctccctgcaatggctgtttccctgtactgactgatgttcttatccagagctcaagttaaatggtcactggacaactccattgaggatcttctgtcttctctgcaggaaaaggtctgtatggttactaccaatgttcattcgctgtctcatcatagctggtccatacatcttctcacacagaaatgccaccttgttccatgtgtaggatctgaatgtagtgaggctctggcagagaaaaccagagaggttggggaggtggcctacagatatgccatggagggtcgtgttactgtgttggcaatgctgcttctggtggctgaagagaagatatcggcaccagtcagtgtagtaatagagggcgtcaggacaaagaaatcaatctactactctattgtggatgaggctctgtccattggggatgctccagcccgggacagcaatgagaggagaaaggccctgctcagtgagattcagctacttaaccaatttggggcagcgttatggagagatcgcaacattgacaagagaagcctgccccctctgcttaaagctgccaaggtacctctgttcatactgctgttcttgttgacagttcacagagctatttcagaatttccttgcttgacactttatgtggtatgcatactgatgagttacaattaataccatgtaagctgagcttttgagtcattttcatgccctgcccaatttcaaaactaaaatttctccaattatggtccatgcaagatgcttaaaatgtgctatgcataacaaggtgaagtttttagtgttacaactgtatacaccataagactttcttctgactgacctctcctgtaggttggagatgtaattacctgacaattcaggggcccgaatctgtataaaataccggcttcggccaacaggatgtagggttattacctgacaattcaggggcccgaacctgtataaaataccgctttctgtgaggaaaccaacgaaaaccaagctacaaccccttttcgatcgcatgtccaagaaggtggccggttggaaaccgaagtttctctctccggatggtcgtctttgtttgatcaaatcagttttgatggccattcctgtccatcttctttcggtcatgcagctcccgaagtgggccattaaagatattgaacgctgctgcaggggttttctatggaaagggcaagaagaagttagtgggggtcactgcctcgttgcttggcgagtggtctgcaggccggttgagtgtggcggcctgggcatcagggacatcgatcgcttcggaaaggctttaaggttgaaatgggaattcaacagactagagcaagaagacagaccttggacaatggtgcggtggaaatctgataaggatgttcgcgacatcttcaattcagtggcacagcacattgttggagatggcaatcgcactgatttttggagaggtaagtggctgccccgtggaggaagcattgcaaacaactggcctattcttttctcctttgtgggtcgcacgaagatcaccgttgcacaaggcctgctaaacaacagatgggtgagggatttgcaggggtctctctctaatagagctcttgttgattacctggcgctttgggatgagctgcagctcgtctcgcttcagagtggtgaggcagattcagttttatggcggttctcagctaacggggtcttttcggcttcttcggcttatgagtttctcttctccacctcaatcaaatgcccccacggggagctgatttggaagaccaaagcgccagcaagagtgaggttcttcctctggttggcggtgaaggggcgttgcctcacggccgacaacctcagcaaaagaggttggccacatgatcccacttgtctgctatgtcaatcggcgccggaggactgcaatcacttgctcgtcaaatgccctttcactaacagagtgtggcagcaattgaaggcttgggtgaatgtcacttttcctctccctgctcagcttggcatggaactggcagattggtggcattgtgcccgccgctgttttcagatgaggttcaggactgcttttgattcacttttcatgctggtttgctggagagtttggaaagaaaggaatgccagggtttttgagaataaatcggttgtggctgatcgcttagttgcagacattaaggaggaagtcctgatctggagagcagccggccttttctcttgcgaggagtagccttaagctctttggtgcttgtaaatagtctttctcagttttcttaatttttcttcttttattcggggttcttccccggctcgacagtctaatgtcgtgtaatactggtaactcttctttcatcttaatgaaatttggtcggcgtccttccgccgacccggcaaaaaggttggagatgtaaatgtcacaaagatgctcctgatgggggatgttgatgtcaatgaagccgatcctgaaggaaacacagcacttcactggtgccttagtggtagttcaagcacacaggagccaaggtatgctatcagaattttgttctatcaactgttaaaaacttaaaatacaacatactagttcttactgctctttgcattctctttacttagttgtcttatgtatttgtgcaggattgtgtggctcctgctgaagaatggtgccagagttttccaggggaacaaacttggtcttacaccagtacacagtgctgcagctaagggaaattataaagctcttcaggtagccttttgttgcttctactcacacgatggcattttttgagcttataactaattgatagtatgtttgtttgctctgtaagtcacttctgcttcacgctcaagattgcgttgatacaccttccaagaccaaagaaaccccattgttcttagcagtgaagaatggttctttggactgtgtaaagcttctcctgcgttctggggctagcaccaaagtacagaacctaaggtggtaatatttggatttaagaagaatattgcttctgtttgatggcttgatgcacttaccatcctgtgatcctttgacattgaacagaaagcaaagaccaatagatgtggcaacgtcccaagatatgcgtttcattcttacctctgcaaatgtggctccatgtaagatattttctgacatttaaagatatttatcaactgaaatcacaaaaatgtttgtagtagtgcatacaattagcagtgttcgattcaatgaaaaagatttgaagattggtttcctgttggttttactgcataatgatcaatacgcagcaaataccttttcaacggaaatatattctgtttgtagggaaccgtagctcacatccggaaaaaagtgtgatgagcaaggaatttctagatgacaattttgttgattatgacagcaatgatttaaatgaaaggtttgtctggtgaatggtgcatgatttatatcagatcttccattcttttgaatactagaagcattgcttctcaccctatgtttcaaactaataatatatttattttgataatgtggcagctttactgggcttaaaacatcagcaagccatcgggatttccggtctagtaatggttctgcccagggggggcaagagtaagagccattgtgctcccaagcaaggttccaagtttgtgcctcgggtaaacaaacatgctctgcctatattaaccaattccctttttcttcacatggtctgcctcttataagattttcttttagcctaatcattggctgaagcacgactacactcggaaaatttttgttgggggcctcccaccttctgtgggcgctggtaaacttcagaatcctgaactacttgtacttaataaagttagaactaatgtgtttcgaagttttaacacttgccttgttttgttcttcctggcagagtacctcactgagttcttcactgctgaatttggacctatggaggaagcagtagtcattgggataaggatgggtgatcgggtgcaatccagaggattcggttttgtaaagttcaaaagagaagaggatgtgataagtgcaaaggaaactcatcatgtgtacatgcttgggaagagagtggaggtaaaggatgctgttgctagaggatccttgccttcagaaatccagaaaacttcttcattcaggcaccacaaccaggaggttccaaaggtaactcatcatctgttgggtggtgagctaaaggaggaacattacattaggaagcggaggcccttgccagagaagtgtcttccatcttggttctttatattcaggaagtggctgccaggatttcttgcagatgctactgaacgacttggagataggtacccattgagctccctgaagggtgatttcagagcaatttgcagaatggagcttgatcatagcacacttggttatcctaagctcagtgatttcatgcgctcccttcctggtatctgcagaatgtgtgtagtccctgtaggaagcggtcctgcaacacacaaggtcctccttccaccggtctcgcgaccgaagtatgtacccttgctagtaccattctcctttgatcatgatgagctcccagaatcagtgtcagatcatcagttcccgatgtctccacttaccactaatatcaccgaggactcccctcgtaacacagacagtcagcacggtgatacttgcagcgagagcaatgcggagagccagcaggatagtgcttccactgacaatggtagccaattgtacacttcaattgagcctgtatctacaagaaagcttgatgtagttgagcctctacctgcaagaacacctgatcgagttgaacctcagaagattggttctgatcctgcgagaaagactatttcccttgaatctggacttggtgtgcagattttcataggcaatggtagtgcaaatttgtcactacaggtcgacgtcaagaaagacgttgaatacatgctgatgttatatcaaaagagaactggaatcagcagtagaaatatctattttgtatacagagggaagaggctcaggttaaaccgcagcttactatcatatggtgtacagaaagacagtactgtgaatgttcgcagtagaattctggggggtgctggtacatcactggaggaatatttacacaagcacaagaatagtcttgtgaaaaaaaccgccttgtatgatggaagattcttcccagagttgacacccagaagcagtattcttttgagaacatgggtcttatgttttacaaaggcattcaaggagcgacattgctgggagcccaaatgtgaactctctcatttcaaggttatcaatggtcatgtcaaggttagcacaccagcaaaagggaacctcacaacgcattttctgcaagaaaatttatcttttctggcaaagacattaaaggatttcttcagaacaattggaacaaatcttgtctcagaatacccaccgtactttgaatattttatgaagtttatattgaaaatagatctaccatgcgtaccacatttgcagaaagttataattgaattgaacctatgctttatggattcatacatgagaggggtgctgacagtgagattgaagcaaaaatttgatagcctacctccaaaacaaagagccactttgatagataagatcaatcatatcacatgggatacatctcgaatgccaaatctttctacaattcctgtctttgataaaatcatcaaaaaagcaaaggatgatggagagccttacttcattgagaattcagtgaacttcgagtttaaggcgttcaatggatttaggttgagccgtgatgctcctatacatgctcctcaacacagatttgtaagtatctaacttgcttcagttttatttaattgtgaattgtttttattatgcttaatataatcatatccttgtcttattgcttttgtttgcttatccactaagtatcagtagtagtttagttgctcttttcttgttagtttactataaatatatgccatatgcttcgaataaaagatatagcttcaaaaaaaaatcaatcctctgttctgcttgctctctcaccctctactcacctccttcagttcattctcaacatattataggtatcacagtgctatttgtacttttcaggacaaaacatcggtaccttggaaggaaaattttccagataatacaatagaattgatgacacctgcttatctgggtgatttgcttcccgaaattatctggtgctttattctaaataaggtggacatcacagaggagtaagtatactgaactttttgtgagcttcttttacataatactttaattctaatccttatttgttgctactaatagattatcacaaagtcagactccatgctgtactatgtgccatcctataaaaacaggtaatatttacatcttgtctcatttatcttgatgttgcactctttgtaactgtgtaatagtttttgtgttagatgtgggtgaatatcccacgacacagcaaactactgtgcaggataaacagcctacaatggaagatgttggatcctcctcatcaatgcagcaaaatgtatggaagaaaatctggtaaggcgaatgagctgaagcttcacaacaaccaccaccgatcgagcaggagccggatgaagggtggaaaacagtagggaggaatggaaaaagtacatgttagctgcctcttccagctgatgaaaaacaggaaaagcttacaatgatcgtccatatgatttgaaaaaggggactgcagttgatcattgtgtactctttgtgcgggagttttgtaatagtagtgcttttgtattagaaacaccatgcttgcaaatagcttaaccatccaaactcatcagagggtactaaatgttctctctctttccaatcgcctacaacagactattaatgtgatgaaccttcaagttaagaaccgatattaactagatatgatgttgcttcctggccagtttgggtgtgaattatatttgctttagtttgttctgaattctgactattttcaagaatggcaaaaagaagaggatattttggtattacttttggagttcataatcacctattatttattactcttaggttatttacctgaccaattcgctatgcagctgaggttcctggactcatatagtggtaattgtgcaatttaatctggcactttactctaatcagttcaacatgtttatgtcttttagaagtagaatggccagttggatttgaatttttttttctttcaattatcatttatttttttcttttgtgtaaacacaatgttgtatagtctcagtgtgagtaatattgtcacctgaaaaatgaaatttttgtgccttcaaaaactttcatctgaagaagcattatcacattgtttctcctgctctggacatctttatttctcttttttttgatgtattccttgaaatctctacctgttctaccttttttcaagataatgttcatgtcctagcattggtccataacacactttgtggtggtcttttctggattggaggttttaacttttaacatggatgtcctgtttaattattagtgctcctttgtgccaccaaatcacaattaggaatctagcaagaggggtgaaaaccgtacggaaacggacgaaaaccacctttatcgttttcgttttcatacgtttttcagaatcggaaaccccggatacgaaaacggaattgaatattatcgaaaccgaaaatgaagcgaaaacgaaccattgcgaatacggtaacgaaaatttatcggaatacaaaaacccctcaaactgataaatccaattctcaagtctcaacggtcaacaattcatcataaaacataattatacaagtccaattgttaagtctcaacagtatatcacaaagcacaatctatggaataaattatctatgtttaagagagaaatgtcattgataaatcccaatgcaggaaataaatattcttatgtaacttcagatttgaataacaaatattttttaaaaaataacagccaaacaccatggtattcactgttcagtgcttaaaaaagaatccagggtatttcaatcacaaaatttctggaaagttttcggccgattccgagttcagacgaaaactgcccttatcattttcgattccgttttcgagaaaatatttccgaattcgtttccgtttccaaaaaattccgaccgacagattctgttttcgaaaataggttcggaatccggaaagttttcgtaccattttcaccccctacctagcaatgatttatttggtgcatgccttttagagcccacatatcctaatttactgtgtgtatagggttaatttgatctatgccattgcaaatatgtctattcaaataaatgatgtaattcgtctgtttatagctgtgccactcaaatattaaccaactgggccttacatacttcatacttcattcatgaaatccaacggacgaaaatcatctaatctaacgcctcagatcgtcccacatacccccttcaacctccgcacgtattccctcgccgaaaatcatgccgctcacatcgctcctcctcccccacgcgctccgcaacctgcgccatcacctcccatgccaccactagcgccgccccactccccggggcaaacctaatcgccgccgccacctactcctctctcccctgccgtctcaagctccacccccttgctcctcttgcgccaccactggatcactctccaccccggaggcaccgcgggtgatggcgacgcggcggcggtgccagaccgccgtggctcctctctgctctgccccttccttgtgcctcaccaccttgctgttgaaaggaagaaggaagttgcaaccactggtgtcagcgacgtcgactaaaccctagaaccaagctccagaatcgatctccttttgcttaccggtaatgggtgagccaattccgagcctacaggtacggactacttcctccctctctccccgacaatcacgacatcgattgatttatcccattgctcctgtgaacttggtgcattgtttgattcccaatttcagaatggcgtgtgaaattgcaagtacagagcgagcccagtcagtcatctcctcaccagcacggcggtacgagaagtttgggcacaacaagcaagcaggaggctagcaaaggtttgtcagctctaatccaaaaaacaacaccttattgcacatatgttccatgtatgtgaaagaccatatctactgtgcagacaacatgtgttattatcctatcgtcaaatctgatatacaaactatattgatatttcgagtgactgaataatcatattatcggtataggttagttcttttactcttctttcctggtcatattatcggtaggatgagggtatattggttggagttgctggcattttcaatggcttaaaaagtgatgttcagggttttttttccttggcagaagaatttgctaagaggctttgatgaggtgagctatccactataaaaataattttgtttcttttttgtactgaaagtgcctcattccttgtgttttctcatttcctgtggatctgcaggtcagggattttgttgcagatcagatgtctttgagggtatcacatttcatgctgaccgactgcatgagcagtacatcaattttcagctacagtgccactctacatatatactccctccgtccctaaatataagggattttaattattacaacaaatctggacaagcttcccatccagattcgttgtactagaatgtgtcatatccaaccaaaatccgttatatttagggacggaaggagtattctttactattggttatgacactcataggcttttatttctatagaagttgatgagtgtgaaattcttctgatatggcaggaaaaactgcaatttgttggccatgtagttcttgcttaagtacttactaaacaacttctgcaaagacatcttttttttatggcagactaggagacttgtctattctcaatcaattatataggttcacatacacttgtactcaaattcgtggcattccaaggttaaaggtgctgattagtggtcgtatcatgaggtcgagaaacatgtagttattgcgatgtatagatacatcataaatctgagtaaatcgttaagcaatatacattctccattatttaattattgcaattgttaattatgcttaaaaacataatgttaatcatgctcaaccgtaatgctggcaactaaaaatattacctagattgacagtagtacagttgaacatttgaacaatacctagactgacagtagtacagtttgggtggtgaaggtctcattgctcactgatggctttctaaatcccctatgccgccgtaagcctgattatcgtagtatattatttctttgaggtgttataggtgatatgaatgggcatgtacactgttatggccggaataaaacctaggtttgatgcccatttacatatgaagaacacacgaattaatttgatcagttattatgctttattctgcttgtttctatgcactacaatgccaatttgagtgcctatcttgtcatgctattcagtgtaatgtcttggcaggctatgaatctgttcatgcgtctatatgcagccttcatataagtaaggattaaccagattacttgctttgtctaatgcagcctcaccatttcatttgtggtgagcaccttaattccatcttgacattgtcgagggagtatatcatctacatctaattctgtatattgagtatatattgactaggatcttggaatttttatattaagtttcttagtttgatgatttgattagtttttcaactaatcaccattgatcacaagtaaacaccactaatagaagtttaatggctatttatctaaaaaggaaaaaactaagtttaatgattgaaactgcagtggtactatgatctataaacaaataaatctgctgagtttcctagcagctgctgggtgcactttcctcttgttgtgtcttccattaaatttcaaaactgcaaattctttgtataggtattacggggactcaaatgtacacctttcagttcacactcaattctgtataacagtaaaagcgtgaaaatataggaaagataattgatttgttcagaaaattattcaaatgctaaggtaatcactttctcaacatatgtatatgtacaacaatgcataccgtttctacttttcacagttggaacctgaaatatcaagattctaaaactaatgtgtgtctgctgcacagttcttaaaacaatgctatggagtattctatgactaatatgtgtgtactgtacagttctgaagattgttcaaagtgtggggaacttccgagggaaagttcgtcaaaaaactgcaggttaccagtgttttggtggacattcacatatttatgcaatttgatatgctaaatgaatttactactaatacattacatcaatcttctggttgtaactggttcagtggaccattagagctttctgttgacaaattaaatgagctttgttcatttatccaacaacttgttttctttttctgaatcttgctccaaattttgtgtcatattattgactattattttttaaaaccatacaaataatttggtagattttttcccttttcgctggacaaccagaactgcattcaattgtatgatttgtatcttagtcctttgcaggtaaggtatcgagaaaatatcataatggaaacagaggaagtgatgtaattctggaccttaattgtgaaccttaatatatacataactagttgattccccgcgcgttgctgcggaaattggttggaggcaacaaaatacaaaggttatatttgaaaagaaaataaaagaggcttgtacaaagattatcaaacttttagagtggaccaataggccaatattttgtttacatgacattgtttctttacatagggcaatatttggagtaccagtgatgagaaaatacgaattaattaaatcaagaaaattatggtgatctataaagatagtcccaaaaactttgtatgaaggaaaaaacaatttcatttttataaaaaaggaaacatagattataatgcacccgatacagaaagtctactccaatattaatgtaagtaagacaaacaaagttgtgcatgtacgcacatctttattgaatgaatgtcggtcagcaaaaaaagtgaattttatttctcaagatgataatttctttgtaagcctaatactttagtgcattatatctgtgtaattatgctacatccctaaattctgcataccaaccttgattgcatatatcttgaattgacaacagaattgtttgcatacctgtgtacatgtcaagtcttggcatctcagtgagcagtgcttgaaaataaattatgactaacagcaaaacactacttgattaggttccaaagtaaaccaaatcatcggtacatatgtagaatgcaagtaaagcatacctgggagtcaaatctggtatgccttgaaataggcaaatagcacaaaattcctgggtatcaaatcccgcttgaagttcgtttacagataaatatggcaaattgtaagtaaaagaatatttttatctggttcttggaattattgtcaggcctttggatttctgatataagtataaaaattttcaatacagaatgccttactggagtagcaggtcaggactaactttgaacccatcatgattcatgattcatgaactgaatgatggatttatacatcactcaatagtttgcaatattgaacacacacctgtgtacatttgtatcaggtaaatatgaaatagaagtgaatatccacttacagaagagagattagaagtatgtattagcggcagtttgctctaaaaggttataaaaataaatggggacattggaataggaatagtcatatacttgtattcctgtacacggctatacgatgaatcactgaatataatcgatagccactaaaaaaattgaacaccagaccatttgagcaaggccattcaaattccataccagcagcaaaactatagcgtagaaagtctcacatgaaagatcttgtccaacatttcattcaacaacataagtacctataacttggcagagatagttatatcctgttaaagaagcagagaattgctcctaggaaaagaagcaggagaagagaataatcaggaaacaggaaaacatcaaaattaacagaagtgcattacctaatgtattgctgccggttagaaggattggataacaaaggaaaaatgaatccgcagaaaaaataaattgggattaggctgacataaaaacgaaataggtgcggcaaaaaggtatgcaaaatagcaacaggcagatgagctgattgcctgaatcaaatagagaaaaaaaaaagaaagagtaaatcagcaagtgctccttgcgtgctatagggccatggatgctgaagcttggttctggctatggatgttgaatagtggttcgtaggcaactggcgatttggatcttatagatgggaagagagacggcaatgtgcagtaaagatgagaagcgagaaggatgataccaaaggacgtaagaagggaatatgaggcatcacgggagagacgggacggtgcagtgacaaggaaggcgatgcggccaggggccagtgctggaagggggaaggcgaagcgtgaagcggaggccacgcagcgtggctggtgcatgggggatgggggaggcagtgcgatgcggggaggggaagcgaccgcatctgtggccggcgcacgggggtggagaagagagcgcggggtgaaggagaagggaggggaagcgatggcaggcccgcggtgcagctcgcgcgcgcgcgtgcacgggggcggagaagcgagcgcgggccgcaggggcgaaggagaaggtaggggaagcgccgcatccggtgcggcatagcctgtgagcgatgcggatggggtaggagaaacctggaaagagaagcgcattgggcttcacgcatctgcgaccgttcagattagatctaacggctgataattaaatggtgatgtggcttaaccacagatcagctttgggtcttaactatatagaaagaagggatacttatttcaggaagacagacagaatacatatttcttaattccgaaggcattcagaatgtttattaaagatcattactgctgtttttaggaaacatattacatcagcgttgtcacgtttatgagctgacatagagtgatggtgttcatggtttcaaacgataatatatatatatatatatatatatatatatatatatatatatatatatatatatatatatataggagcatgtaaggcaaataacagggattttggccaaactgacaaaccaaggaaagagataaaggtttcttgaatattataaaaatacaataacaccgtagcattagcacgggcatattactagttttataaaattgtaaccatgccatcgccgtcacgttttccatcttcttccccatctgcacgtggggcccacccgtcagattcatcttcttcctccatcctctcctcttttctttttttcccacttctctccaccatgttcatgatgttcgccgtcgcgccggggaacgggttgccggcacggaggttgttgtcggcgtccgtcaccctgtgcaccaccttgtgcgtcggcttgccgtgctcgtccacgccattctctgcaaagatttcacatttctcactgtcaatttgacaaatgaactcatccaatctagggacaacatctgtttggatttaacaagaatggaccaaccaagatcgaagtagtcggcggctcgacgccacgggggagggcctcacggccgaggcaatgcggaggccgtcacgccacatgtcggggtccctgaccgccgacacgttgccgccgccattcgtcttgagtctcttgacaaactgcgccaccgagtagcacgagatggcgaggacttgacagactgcaccaccgagtagcaggaggccgaggagagaagtggtgtccgccacaggcccacgtgcatgggatgaggccaagaagtggtggagagagatggaaaaaaaaagagaaaagggaaaggatgaaggatgatgatgaatctgacgggtaggctccacatgtagatgaggaagaagatgaaaaatgtggcggtgatggcatggtttcaattttataaaatttgagtggcacaactaaaaatagacgaattgtaatggcatttatttgaatagacatatttgcaatgatatagatcaaattaaccctatttttttttatgttacccaatcactaatactgtaaatctaggaaatccgtggtagcgtgaaatacttcctccgatttttaatatatgctgttaatatatgaaaacgttgacttttatacatatatttaaccatttgtcttattcaattttttcatacaaaatataggtcatgcttaaattttttaatgataaatcaagtcaaaagaaaataaattatatttattttttttcaatattatgacgaaatatcttaagaagtcaataacatcatatattaaaaagctgagggattaccatttttggtccaggacaacacagtgccatggcatcttcctatctgtgctggtaaactaaaattacgaactcaattagaaatcacaatcctatctgtggaatgtgctgtcactgttcaattagcaaaagtttccttggtgattcttcagtaatgatgtagggtatcaatgatacagaacagaaggcatataaagtcatgcacttatgtaacttgatgaatgatctgaagataattgactagagattgagctgaatgaagcaaacttttggttacacaatgtcaggattcctattagttagattctcagcccaaaactctgaatattttttaggagtctgggtgaatttggcccccggatcctgacaaaaggtatcagagctactcggttcttggccagatccatcgaatttggaggtccttcgttggtgagggtttgaggacgagttcctctgtaaaattccatagccagatccttgagtccgattcggggatcaactactttaagtggtagcagggagggttggaagaagccgtaggtagttttcttctgtaaaatctctgtacctgttgttgctgctcatggcgaggggtggccgtcagatggaaatcgcggtagaggaattgagagtgaattttgaggagtttcagaagaaggttggggaagagaataagatgctgcaagagcagattcagaatcaggcagtgcaggctaagaatcacaaggacgaagtgatgcaaaatctggaggtgatacaagatattttgggatctatcatcggttgtcaagggcaagatggtcgaggtacactctgtcgcccgggaaatgctcagtcggtggcccctgcaagaagagcaaaatgtaaagctagactcccccaaattcttcagcttttgatttcataggagttccctgcccgatgcctaattttgaaatgggagaaacatatgccatacacgctcacaaaaccattccaactcaatcaccaccaccccccacaattcatgtatgtactcagaatacctacccaaatctggagtggaacacttcagtttactttggaacaccacctatacctccacctccacctccacagtatagaactggccaattgatgaccaatggacaaaaccctaccttaccaccatatttctaccctccctatcaatctccttggggttatcaaccaagtccaccacctccacccccaccctcctttgatttccaccgacctcttgatcgtggaccaccattctggcacagacaggaggagactcgttatgattctgttgatcacagttacagaaaaagacctcaatatggtgacccttttaatcgtaatcataagcatgtggattttccggtgtttgatggggatcaccctgagtcttggatctgaaaggccaacaaatacttttctctggcccgtacccctgaagaagatgaagtgcctttggctaaagtgtacatcattggcaaagcagatcagtggatctcaagttatgatattcctaccgatactctttcttggcctgaattttgcaccatgttgtgccagcggtttgcagttaagtcagtatggctcagtagacaattacattgacaagtttgaagaaattatgcctcttgtcaaacacaataaaccccatctcaatgaagaatacttcttggaatacttcatcttaggactgaaggatcatatcaaaagacctctcaagtctttgaagatgcaagcttatgaacatgctcacaattatgacagccccaccttctcttctatacagccagctggcactgctcattcttaccctaaagtggctcttaaggattcccctatgcaacctgtcaagaaggaaccaatgcaaacagacgcaaatctcttcctgttgtccaaaccagaggagggggcaaatgcttcaaatgccaggagccgtgggtccctggtcatggaagagtgtgtaaagtaaactaacaactttacttggttaccatggaggaggatgacctaccagttgaatattcaggtgatgttatttacactactcctgacagtcctactgaacctcaaccttctcctgaagtgtcgctgcatgctttgaatggtctaaatgctggtataactaccttcaccttgcaagttaaaattggctctctccttgctactgcactggttgatagtggcagtactacgatattcatgtctcccaaagtgaaggtaagagttgcttgtgtaaaagcaatttcttctatttgacttatctagccgtgtcttgtcttgcacatactcggctcagtgaatggttcatcggtgcacaaggcaaatttggaaatctccaaccatcctccaatttcagtaacaatggctaatggaggcacattgtccactggagtctgtagctcagtgtgtccttcaaccatatgaaattcaaggaactgtttctgtcacatcttttcgcattttggatatcaagggttatgccattattttttgttgtgattggatttatcaagggttaattggatccatgccattacatatttaccaattttgaaaaataccattactatttatctatttgaagccatgccattgtaattcaatagttatttgataatatatgccactacttaccccttcaatacattttctgttttttcttgaccaaattacccctatcttcttcattcatccccttcccactctctcatgtcatcctcttcaccattggggggaat

SEQ ID NO: 7724 - DNA, 49489 bp, Oryza sativa
aacatgtctggtctgagatcaaagcgtttcaagaattactcaagcaacgcccggtacagagagatattatacttaaagagataagcatcaacctggatctgtggagtaacttcttctcaaagccacctcctgaaataattaggctaatggaagggttacgcgtgcttaagggagcgctatcggaggaagcgccactgccaactactaatcttgttctcgcacaacaggaccagattaaccaacacgtcgatctgctccgcactgctcaagacaaggtggagtcatcatgcgtcgctttggaggcactgacgagtcaatataatgtagagcaagcagtagaggagggcaacaagagagagtgctcacgacaagcacggaaaattagagcagagatagcagtgttgcaagcaagacttcaacaagtggaagatgcccactccagtgcacaacactgacaagatgttgtaacagagaacttgaactcccatctcgagcgacatcgtcaagctaaagatcgaaaatctgagattgcggcgcacttaaagcaggcgagcgtgcaccaaaagtctctccaagatattatagactttactaagccagacgagtttgatctatctcaatatagatatgtctacaatttatttgattttttcatgggctgctcattagatgagtagatgctagtttcaaaatcttgtttcaggtttgaaatagctcttcagatattttatttgtttccaatatagcggagtgaactcctttattgttttttctatatattttgatttgcaccagaaaagcacagtgaactccttcaaatttaataggagcgttgcattgttaccaacaatatttgtgcactggcttcttccttttttctttatgtatatacatttcctcacataaaggatgctcacgttcaattttttttagtggctttactactgtagcagtaacagtaacgccactaattcttcacgattctggcttagccatggatttcaattttttttttggcttttaaaagaccagcctccccgctttagaaattatagcgaaatccatgcaacagtgtaaatgtcgataaatataccatagcgaagattcatcttattaataagatcactgtaggaaattcgttacagtgcaaaattattgggattaatcgtcgtccgaaaatcttggacacgggtgtaacccaattaaataataaaatcactgtagaaagcacattgcagtgtacaatttatagcattaattgtcgtccgaaaatcatggacattggcatgatccaaccatatattaagtaagggaagtgcttctatgcttctttaaaaaaaacctgcacgaaaattaaagcacatcaacagtgaggattaaaagttgattaacagagtaatcccctttaacgaggggtaattttgtcctaagaaaaagctgaccatatctagcccaccctgtccgcatatcagaatcgactggttcctccttgacttgcacctttgacggaggcgccatcttcgccgccgccgccggcaccgccatcccaccgggtcgaacgaacccatcttgcccgacgccggcacgcttgccggcggcattcgacgacagccttgtggcgtccatgctcgcgcatgccggcgcctccgcgggctcctctccttgacctgcagcaccgtaaacggaggcaccatcttcgctgccgccgctgccatcacttcgtcctctccctgttcctggacgtcctcgccatggctcccggcggcggcgggggccgcggggcgggaagcctggagggcctgcagctagctgaagcgggcgtggatagaggactggagggaggagaggtgggagtcgaggtcggaccagcggaaggggaggaggatgggcgagtggaggacgaggctgtcgcaggcctcgcggaggcgttgcttcttgccatgcagcgtcgcgatggcggcctccatctgcgccggccgtcgtcatcgccatcagagatggttcagggcacagggccgttgccgtggcggcggcggcgagctgttgcataatctccatcgccatcgattcttcgtgcggccggtaagaagccgacgcagtttatatataggcacgcggccgcgaacagtacgagacggataggatcagcgcatacaaccaattctatgtaaattcaaaagattgtgatcagccttgtgttaagttcagttcaattctgaatgcatatcaggtatcaccatatactgaggaataaaatggacatggaagctttggcaatctctgccgagaatcatgaagaagcagaataaggtgttgataatggtgagtgagggtgttgtgctcaatgaatcagccaaccagccatgtttcctgaaccacgagactattgacgaacctgaaagcacgacgacgagcaccacctacacaacacgtcaacacgcagctccccgaaggagagagctcgccggtgaaggaagcagcgacggcgtggttagtagcggaaggggaaaacactcttacagttacagggggtagaggacgcttctcggcgaaggaaagggtgcgggcgtgcggcgctgttcaccggaatgcgtcgtgagaactgccgcgcgctggccgcgaatcaatccatgagaagggatgtggatacggatatgggcttttacttctggacgaaattgccccttgctaatggtgattactcggttaatcaacttttaatcctcaccattgacgtgctttaactttcgtgcagtttttttttaagaagcatagaagcacatcccattaagtaatcatatcactgtaataaataagaacaccacagtaaacttagtaggaataattcccgtctgaaaatcatagacgtcatcatcctctcttttttttgccacgtgttttttttttgccacacgtcataaaggccttcttcacacacatcttgtaaattcaggcttcaaatattattagcatatgagatagatgtcccccgccgagtagagttcatgtgcgaagcaacagggactcgacttggcaaaacaatcaaactgagtcgacccatttctaaatcaatttggtgtcgccctctctgtttttttttcttaaacacggtcatcacttagaaactatggataatttatcgctatgatagcaaagctgtccattttaatttgtttgtgactcaatctgaagattagtattttgagtacagaccaaggtttaatatctgcgttcaaagcaccagaccctaacaaggatagggcagcaaaacttatttgtcactgtagcaagatttgtgctacagtctccatctcgagtaggtacagcataaacacatgcaccatatacaggaatggcatcgaagaaagaaactatagcgagaatccataccacagtgtaaaatactgtcataaaatttgtatggtagcgaaaatcgtgccacagtgtaaaactataggccataagtaaagaaatgtagcgaaaattcatgctatggttatgatgattgtattagcacatgtatataggatgtggcgaaataatcgtgccatcctattattttgctccatagcgaccaaaactgtttggtgcggaaaaaaacattagtcaagtttgatgtgaccaattaacatgatttattgactctattgtgaccactttataactgcggtgacaaccaatacaggagccagtagtgaagagatgcttctcctcacaacatgtagaattttattaattctactacgactgtttcactagtaagaagccagccagtcgagctcaatgattggagggtgtagaattgcccccatggtattgagatatagcgcaagatcataccacacctcaatataagtttatcaactctattgcgattgttttactgtcacgatgcccgccaatgaagttaaagggtttcacagctccatgcatgccgcactggtgcacttcactgctcccgttgtagcgaaaaaaatcataccgcacctcaaaagaatttgatcaactctactgcgatcgttttcaatgtaacgatgccagccagtggagtcaaaaattgacagcttcatgctatacacgctggtgcacgtcacttccccatctaataattgagatttgtccgaataatcatggacttgaataaaaactggtttgatccaatatcatgattagagcaggttattgtcaaaaatgtcatgaaaatgtagaggttcaaccatattacacggctgactcgctcaggaaatacattttacccaagtagtggaacaatgccaattatgagagtaatgtttatgtggcagaataagagattgtaatgatctggaaggagatccaaggagaaacagatctctcttttttattaccttctttaaatcaacgcaatagtcgatggtggtactactagagacggtattccctagtacaagtattcgccaccatgattttcacttgcgattcagcttactcgtgagttttgtgtaagggcatcacactttgtcaggatctctgatgggccgaagaactctctccaagcctcccttcagttatgtgcctcatgtcttccacctttgtcccagtaggggtatgggatatggctaatcattgagatggtttatgggtgataggctttggaaattgtgccattacttttgctgaggatgggaagtgactacattccgccttcagatcagggaagagtgacccattgattcaagagccttcctttatttttttctcttcttctctttcttccagattgtttttttttgcacacatattttgatcatacatttcatcggcttgatcactctccccctttagaacttggaaagtagtcaccacacctttagtgtaaactaagaattcctcactggcatttagtattttcttctttttttttatttgcccttgttaatacttcatggggtggcatgtggctccacactagaacttgacttttgtcagaataggtagccctttcaagctctttttcctatagttttccccagaagcttgcccccttaacctgggcaaaagcgaaagacatgataaaaacccaccacatcagggtttaacttggatcaagattcaaccgccctcttcatccattgttggtgtgagccaagtgctaagtgttgacttcgcttcatcgcgagatcaatcagttggagcatagtctgtactaggtacacatccactagtgacaacccaccaaaggtaatgcttccttcttatttggactctatgatccatgaaggagattgtttttagagaggaatgtactctttaaagataacaggggagatgtttgcacatacatattaaaataacatttttcatttattccaatgaggaatctcatggtgagatttcaactccaatatgtgtttgaattggcattgttctactcttggtaatcgactaggattccattgaaagagagggagagaacagaaagggaaggtagccaacataattaggctaaccatagtatttaaatggctaaatctttgatagataagcgttgggcatgatacttggtagtaccacacatagttcggttaacaccatgcatggtggtaaggtattgaaagatagaggagggaaaaaatatcgtttatttgatattggatcaagacaatgttactcccagtgttgaccaccttggccatgtgggacactcgctgcaaacgtgtgaaagcgagagtagaactacatcaagtagaataactcgtcattggagaatataatattttgaagatattttagtcaccctcataacattttatcaccaatgtcatatgaggagacatagtggaagcaatgcacatctaatttactgccccagccattttgcatagcactctaacttagagctgttgatcggtgttcctgcatagtccgtgataagtgatctattcaactcaagctcagcaatggcagagatgttgtgtaggaaattatgcatctggatttgcagagtggtgcttcaagggattgaatttgttgcacaataaattttggaacaaatctcttgcagatttaaaacacacgttgacatcgtgtttgccgctgtcgagctcaagttgtcaattggcattgttttgtaggctcactgaaggcaatcgagcctatggaatcagcttcggaatttatcattgaggggtcaaaaaattgccccctgcgcttgcttgtggtggaacacttgatgatttattttggtgactatcatcatgttggttagttaattgagtcttattgcttagattagcaagctctcatcttggtttgagaaattttgacgcattagcccaagggcttacacatgagaaacaagacccctgctgtctcatggagtatgattaacaataatagaggtagtcccaacctctatatgtatatttctataggacatcagggctgtccaagaaaatattattagagcgaaccggtattaaatgttgatatgcccctggcattcgacggcctctggatttgtcacctcaacttgaggtttgacagcgttgaagataatcgtttgacgaaacagcatgttgttcagcaaactaggagaacatataaataaacaaagatctgaagtgtttgttccctcactagggtgaccggtgctgaatttaaaatgtttttttattgcatagtcacatttggaaactttctatgtaactggcatgtgcagctcacatttttttaggccaatgttcaagcatcaggagagatgacccgaaccgtatgataaataaacaagagatataacgaatatctctcttaaaagtaatgagaatcatgtgaaaagaactcacacgcatagtagtcctttgattaatattttgttatctgagaagagtttttgcagcctcgactattttcaatcagatttcttcttcaaaggcatgcaagcagcgcatgagcgacactgcctggcttgctcaattgcaaggcttagctttgtatttgatgttaactcatgaatgagtctggaattactccgttgatatcttagttagccagtctcaccgcagaacatagccggtagaggagaaaagtgtagggatactcatgaatggtacaatgagtaccaagtagatttggatcagtagatcgacacatcacttgaaacaggttgcattgcttcattacataacttactgaagccaagtcgaataaccttgcatatatttaatttgatgccacagataaaaaaaatcttttgaatgtttaatttgagaaagagaggaataggatgtgcttgactgcataggatatatatgcagcagccacatataaaaattaatagaaaagcaatgcttacaaaagcatcgttcccatatatgcatactgcacggcaggcttttgtgagcctcttgttatttttaaagaaattaattaatttttttatagatcactggattatttttgtttttacaggaaatagatcgatacctcctgaaaactgccgcatatagacgttcccaataatttgttttcagaacagcctgaattaatgtctgtgaggtgactctctctctcaagcaagtgcgacagcaaagcagtgcacagttactatacttttatagaaaatgtcattcaataaactgaattggaaatacttgaacaacagccatataagtgcatatatcttgcacttttcaaactttttttttaaccagcgacatttgtcagtagccagtttcaaaagtatatatattagtatatgatagctaactcttcttgatgcagagaattacggatcagcaggaaagggaagacggcagcaatgcccggcgtggagcagtcaaataaataaaaactaggaggatgcaattgcccccggtatttcagtatttggaaatgtgtatatggatgtttgatccttgggtgctgccactacgccagatcctcacacctctgacgggatacctgtgacgggcaaacgaattggtcagtattgaccattacctttgacgggttatacgggatgccgtcaccggtgaggcatctggccgcggcccgtcacaggtatcccctcacctgtgacgggccgaaaggaaaacccgtcagaggtataccagtgacgagtttttcttccaacccgtcactggtatcccctcacctgtgacgggccgatacattagaagccgtcagaggtgatgggccgccacctgtgacggctttcatttctggcccgtcacaggtgagcggataccagtgacgggccgttgaatagaagcccgtcaaaggtatgagcaatacctttgacgggcttttttttatctaacccgtttgaggtgtgttgggtctataaatacccccaaactgccaactgctttccatcccgaccattgtactgttcacaaatcggttgggagggcaaggggggcgattttttactaaaattcaaggtaaaaaacacattattctccattcattctcaacatatcgatcatcatttatttttcctcgtatgttgttgatttcagatggatcgtagatggatgtactatgcgcatcgttcgtctaccgagtatagagagggggtcactgaatttgtcacatttgcggataatgacagaaaaagtaggatgagcatgcacatgttgtgcccatgtagggactgtaagaatgaacagatgatcgaagacaaggatgaagtgcatgctcatttgataatgaatggattcatgaagaaatatacctgctggaccaagcatggagagcaagaggcgcctgatgtcgcagctgaagaagtgttggatcagggtgtagagaacaccgccgcagctcgagaaggcatgttcgtaccttctcctttaggtggagagaccatagatttggacactcaatgtctatctacaatgttgcatgacattgaagacgcagaggacaacgacagagattatgagaagtttagtaagttggtggaagattgccagatgccgttgtatgatggatgcaagtcgaagcacagcaagttgtcatgcgtgttggaactgatgaagcttaaggctattaatggctggtcggacaagagttttacagaactccttgagctgttaaaggatatgttgccagaggggaacaatttacctcagacgacatatgaagcgaagcaagtattatgtccgttgggcctggaggtcagaagaattcatgcatgtccgaacgactgcattttgtattacaaggaatacgctgacttggatgtctaccctatctgtgggggatcaagatacaaacgagcaaagagtgaaggtgaaggaagtaagtcaaagaggggaggcccagcaaaggtggtgtggtatctcccaattgcggagcgcatgaagagaatgtttgcgaacaaggaacaagctaagcttgtgcgctggcatgccgaagaacggaaagtcgatactatgctgaggcacccagcagattcagtgcagtggaggacaatcgataggatttaccaggaattctcaaatgacccaagaaacatgcgtttcgcaatgtgtacggacggcattaatcctttcggtgatttgagcagtcgtcacagtacatggccagttctgcttgttaactataaccttcctccctggttgtgtttcaaaagaaagtacattatgcttgccatgctcattcaaggaccgagacaacctggcaacgatatcgatgtattccttgaaccgataatcgatgacttcgaaaggctatggaatgagggcacacgaacatgggacgcatatgcacaagagtatttcaacctccatgcgatgctgttttgtaccatcaacgattatccggcccttggcaacctttctggccaaactgtgaaaggaaaatgggcgtgttcggagtgtatgaaggaaccaagaagcaaatggttgaagcattcacacaagacggtctacatgggtcacaggagatttctgacaaggtatcacccgtataggaatatgagaaagaatttcaatggacacagagatacagccggacccccgacagagctaacagggacagaggtgcacaacttagtgatgggaataaccaacgaatttggaaaaaagaggaaagttcgaaagcgaaaagagaagagcacatcgaaggaaaaaacagaggagcatgtggaaaaacaaaagacaaaagagaggagcatgtggaaaaagaagtcaatattctggagactaccatactggaaggatcttgaagttcgccactgcatagatttgatgcatgtcgagaagaatgtatgcgagagtttaatgggattactgcttaacccaggtactacaaaggatggtctcaacgcccgacgagatctggaagatatgggtgttcggtcggagctacatcccataaccacggaatccggcagggtttaccttcctccagcctgctacactctctcgaaagaagagaagattgatttgctaacatgtttgagtggtataaaggttccatctggttactcatcaagaatcagtaggctcgtttcactgcaagatcttaagttggttggaatgaagtcgcatgattgccacgttcttatcacacagctgttgcccgttgcaataaggaatattttgcctcctaaggtgcgacacccgatccagcggttgtgttccttcttccatgcaatcggccagaagatcattgatcccgagggactagataaactacaggcagaacttgtgagaaccctatgtcatcttgagatgtactttcctccaactttctttgacataatggaacatcttccggtgcaccttgtgaggcaaacaaagtgctgtggtccagcattcatgacgcagatgtatccttgcgaaaggtacctggggatccttaagggttatgtacggaaccgttcacaccccgaggggagtatcatcgagagttacaccaccgaagaggccatcgaattttgtgtggactacatgtcagaaacatcttcaattggattaccacgatctcatcacgaaggaggcttgacggtgttggtactgttggaagaaagactattaggttggatcggaaggtgtacgataaagctcatttcacggtactacagcatatgactgaggtggtgccgtacgttgacgaacaccttgcagttatccgacaagagaacccaggccgatcagagagttgggtcaggaataagcacatgtcttctttcaacgagtggctgaagaaccgaattgccaggttgcagaacttgcctagtgaaacacttcagtggttgtcacagggtcctgaatggagtgccaccacctggcaaggatatgacataaatggatacacctttcacacggtcaagcaagacagcaaatgcacagtgcagaacagtgggttacgcatcgaggctgctagtgacggtggtcgtcgtgatcaatactatggtagagttgagcaaatattggagctagattacttgaagttcaaagtcccgttgtttcgttgtcgatgggtcgatcttcgcaatataaaagttgacaatgaaggtttcaccactgtcaacttggctaacaacgcgtacaaggatgaaccgttcgttctcgccaaacaagttgttcaagtgttctacatagttgacccgtgtaacaagaaagtacatgttgttcgtgaagggaaaaggagaattgttggattggacaatattgcagacgaggatgattacaaccagcacgtccacggcataggtcaagaaatacctctagaagaggaggaggaagaagatgaagttcaatatgcacgtgtcaaccatgaggaaggattatttttgtaatttatgtacgtagtttatgtctacatgtctgttatctgtatgactctaatatgttcgcaatgatcaatagtatattgcttatgaaatagtcaaataaaataattaagtgaagcacccactagaagtgaaataaaataattaagcaagtataagcattggaaataatataattaaagtagtataataatgaagtgcaattactactgttagtgaaataaaataattaagtataaaaaaatatgtagtgtatgtgaaaatatgttaaggaaaataaaagaactaagtgaaataaaataaaataaaattgctctaggcaaactcacctgtgacgggctctatctgtagggccgtcacaggtgacctcacctgtgacggcccagagtgttgggcccgtcacaggtggtcttacctgtgacggctccacggttggcgcccgtcacaggtgaggccacctgtgacggccacatagttggagcccgtcacaggtgagtttgactagggttgacctagggttggacatcttctagatcgatccagatccggcgcccactctcactcactcactctctcgaccgccgcctcgcctctctcgacctctctgccgccctctacgccctcctctccaccgccgcctcgacctctccaccgccgtcctcgccgccgccaaatccgccgccctctccgccaccctctacgccctcctctccactgcctcgacctcgacctctccgccaccatctctgccgccgccctctacgccgccctccccaccgccgcctcgacctctctgccgccctctccaccgccgccgcctctcgaccgccgccgtccatctccatcgacctctccgccgccatctccgccgccctctctaccgccatctccgccctctacgccgccctccccaccgccgcctcgacctctccaccgctgccgcctcactcactctctcgacggccgccgggacctcctctcagtcgccacgccaggaccgtcgtcaccgccaccgggatctcctctccgccgcctcctcctctcgaccgggactcgtcgtcgccgtgtgccgcctcctctgctcgtcgtctcctctccaggtacccctctctctctgatgcccatgaatggaagaattgattctttgataattaaggaactttattaggtttagggtttgaaatttagttcaaatggaagaattgattgattggccgcagatttaatgttgttccgaggttatcaaaccatcacagaatacaaaatgcatgggaaattttggtggattggtcagtgtagtccatggacggaaccgacctagacaccaaaattctccatgcattttgttttctgtcattctttgatgattaaggaactttgcagattatctaaacttgtggatttatataccctttttgtctatgaataggtgaattgcatgaattgttgtttatatacatgatttatatacccttgctgctgctgccacataaatgattgtgggctgttttattatctacacttgattgaattgaatggatgaattgctgtttacatgaagttagtagtactgtctcctttttttgatgaaatatatgcatatttgagatgtgaaatatatgaggtgatgaatttggactatttgtggatgaaatatatgcagtattagatgaattagtctttttgtattagatgattttaggattaattttgctgcattggttgaattttgcatgattttaactagataaatggccagtgatgttttatgttaatacacccctgccactgctgttattgtgggctacttgttaatacacccctattgttgctgcccctgtggagtatctttgcccctgttgctgctgcccaatgtgttccttgttaaatggccagtgatgaattgctcaataagaacaaattatctacacttgttctttttttatgcataagaacagattttctgtacttgctcttttttctggattgataagaggagactatatacacttgttttctgtcattctttgatgatttatatacccttgctgctgctgcccaatgtgttccttattaaatggccagtgatgaattgctcaataagaacatattatctacacttgttcatttttttgcccctacacttgttcatttatatacccatgctgttgatacccctgtggcatatatactcctcctgctgctgttttatgtcaatcatgcaaattctgtacccttgctgctgctgttttttaaatttgcatgattgattcagtggttatatacctctacacttgttctttttttatgcataagaacagattttctgcacttgctctttttttatgcataagaacagattttctgcacttgctcttttcttctggattgataagaggagtatatctagacatgttgttttagttaatttgcccctgctgttgctacccctgtggcatatatactcctcctgctgctgttttatgtcaatcatgcaaattctgtacccttgctgctgctgttttttaaatttgcatgattgattcagtggttatatacctctacacttgttctttttttatgcataagaacagattttctgcacttgctcttttgatgttatgatttcctctttttatcccttcatgcaaatgattgtaattgatgcatatttctcagcaaaactgaggccatatctttcatagtataccccgtattacattggatctaatgctatttagtctaatggtaggaaatttataatctttttcgcaaaagttaaaccatgtcaacgcccggcgcaaacccgccctccccaacacctgcgaggatccaggaagaagcaaacccagccacagaggcagttgccgaaggtcatcccgcgacaacggcggtccaacaacccgaaattcatggtaatttataggataaattttcaccacatgaccacataaattttagctagcaccccttagcaaatattgccttctgtttgtgctgcaaaattgccgcatgaacaacatacgtcgatgtcgggcgggacaagtgcaagtaggtctagtagaaatccgcggtcacaaaatatatggccgaccacagtgcaagttataagagaggttgacgctagtggtaggcccacggcgcccaggactgtcattggaagatggtctaactgctgcgggatagcggcacgtgagaacttcgggatcctccataaagatatcgggaagatcacagaagccgagaaagagcgagcttggacggcaatggagaaatggttcacatttccagccgaagcaaaggataggctcaagcggaaggcattccaaaagatgggcaaagcttggaagaattggaagtcgaagctcttcaccgagtttgtcaacccgcccggcaatcatacgccgttcgatgaataccctcaaataaccgaagcggtttgggaggaattctgctctctcaagaccacccaagagtttagggaatcaagcgaggcacatcgcctactgcaacagcggaatgagcacccgcatcggctaggcaccgcagggtacatcggcaaggaggcaatatgggcccaagaagatgcagccgctgcagcagcgaatgtccctaccccgttttcagacatccctgaacaaagagctcgcaactgggcgcgggcaaggggtaaggtcaacccggacggctctgtcacatttgagaacaaaagtgatgccgtcgtctatcaggaactggtgagttcactacttaacctaactaattttcgttcgtataaagtacaagttcgtataaacgactatcttcttttctagttgggcttggttactgaacaagcttcacaaagcgaggttgagtccgcgccgaagaggcgcaaagatgacatcctcacaaaggcgctcggaaccaaagaacatcctggccgaacttggggaattggtagcgatgtgccctggaagcatggactccctcagtacagatcccaatacaggaaacggaaagtctccaaggaagagagggacgctcgtttgaaggacgaacttaaggttgaggtcattcaagaactagaagctagcatgaatgcaagggtggaagaaagggttaacaaggtcctcgccgacatgaatataccccgagtcacaacacctgctgtgcaaccaactcctcgtgtacaacacgacgcgagtccgtcacagcataggagtagttgtgcatccacagaggtgccggcccctggtctcccgatcgcaccactagctgcagtggaccacatcgaggtaattgttgttatccgatccatatctaataaaagacatgtacacattccaatattaaattcaaactttcaccttatgcagggcgcagcacagtgtgtcctactagcgagagtccacccaactttcgctcctgaagtcgctgagggcatggctttcaagccctcggttacagacaaggtccacggcgtagacctgctagctgggtatgccaaggtgtccatcgatacagtaaaggacacctggtcaggctatccgctgcccgtgcccccaaatgatgaaatcatgactttgggcgatgcacgcaagacgttcatacaatggcccaaagaagacatagttgtgaagatgactcctcgtccaagtcgaccgacggagcttacacctcccaagtctaagctatcaattgaggctccccgtggaccggcattgtcagtacctcattctcccggtggagctgatatggacttggcagatatagctcaaagcttggctccaataaagaccacaagaaaggctgatagctccccaccacttgtcaagggccagaagcgtgaacgcggcaaggggaaggtcggggagttggcgccggagccaaaaaggggcaaggctgcgacgtcgatgccggtgagcaaatcggggaaggtcgtgagggcgccagcccaatttgagctaggcatgccattggtggaggacaatgtgttagctgtgatgggtattgcttgccgagagctacataagcaatacatggagctaagcaatgccaagcggaaaatgagggagtcatccatagttggacatcacgaccaccagccgttcctatcgtcgcctgcctatataactataggctttgatgacctcttcgaccttttcaggatccggaagttggacactggtcttctaaaatgctactccttgtaagtgcataccttctatacttgtgatatgactggactatatctcctaattaaattagttctaatacgtacatattttaaggttgtgttggatcgagagtcgtcgccatggtaatcaggttggattccttgatccatccatggtgaatgaggttaatttacgacagagcttcactgaggtggttgactatgtcaaccggtgtttatgggcccatcaagacaaggagtacatcatgtgcgcacagaaccaagaataagaggacaatacccttcgtgtatattgtttttgaagttaaggttcttagtactaacgctacataaccactgcgcaggcgacattggattctcctagtcatcgtacctaagtggagtcgggttacctaccttaactccaataagtccaaagattatgatttcagtgaaatcaccaaggccttaaatatggcttggggcccatatgtggaaaagggtggtaggcacaaggagggcaagaatgaactttatcatgacaccaagtttgcatgcgcacaacagatcggagaccaatgtggttttcacgtgtgccacaacatgtcaacacttctaagagaggtgaaagatttcgaccctgaggttgttgctaatggcgaataagctcatttcaatatctacattgctattcaaaacgtgctaattaacctcttatttattaaacagaaaggtagagctggcttcaagatctcacccatcaacccccccgctatcagaggcgaattgtgcgcctttattcttgcagaaataatgaacaagaaaggacgttttcatgccaaatagactcatgaacttggctagataatttattgtgatgtaaaaaagatgtttttataatttctggcgatgtaaaaaattatgtttttatagagtgcaatgtaatttactttcatatgtgcaatatttatggtactttactaaattgtcatcacatttgatcaactacgatttatgttgtactattcatctgttttctcctttttttttccttattgacaggttgtgcaggtcgatgacattatggctttaatccatttggtaagtatatatgtggttctatgagcaacgaccgaaattgtggctttcaaggggtgtgaatttgctgtgcaaaattgtggcatttgaactgcatatatgtgttgttggggatctgtgatgttatattgggggggtgatgtatctgtgatggatctgtgactagaatatatctgtgatgtttctatttttcagagggcatggctagcaaatcctgaggctagccaatatttagcatttatttttttctggaattaactcatcagtgacgggtcggaacaaaaatccgtcaaaggtaacataacctgtgacggactagcaaataaaggcccgtcagaggtgacctacctgtgacgggcctttacttttgggaccgtcacaggtagatcacctgtgacagcttctaactacggagacctcaacctctgacggcctttatttcaagggccgtcagagatgagtcacctgtgacgggtcctaacttgctcaaggctagcggagaccaacacctctgacggccttctagtaacttgcccgtcagaggtgggtgtcacctgtgacggccggccacccgtcaaaggtgactggactcaccagtgaccactgatcactgaccatgcgcgaagccgtcaaagatgagggtttgggcccgtcacaggtgaccttggccagtgtagtgtgcgtagcatagatgagagaagagcattaggagacaacacattggcagccatgatcatgccatgctgggatgtgctaggtgcattcctccctcgattaattaatgtctcagaaccaagccgaatggctctgatggactgcagtgcgcatgcatctgagttgagcccaacaattcactaacagtctttgtgcatttgaacggcagaaggaggaagtaatataagcacggctgcacatcaagcacatgctgcagtgcttattacggagtaaaaattaacagagaacgatgcatacaaaagcatcggttttatcgcatattgcatggtaggctctatgatcatggccatcttccatcgttaattaggtgtccggaaattaatattattactgccagccgccagcgtgttaattgcacaaactacatggtgcctgcgcgcaagcacaacgagcccacatatgtgtatatatattgaaccggccatccatacattgatgccatttcatgattttaatgagcaccatccaattagtgagcaaatttgaataatttaacgacgaccatcgtagcgtagcatagatgggaggagaatcaggtccgctgggcgtgccattttgtttgatgaaaacaaaataacgaacacacaaaaaatagggaaaccttgtattttattaatcacgattcattaatatgaatgtttacaaatacatcagggctcccacaggagttcgtcttttgccttcgcgaggaatacttaatggaaatgtatgctgactggagattgcatgcagtccgctgattccccgcgcctagcaatgaggctaccggttaattatatccataggacgagcctatggaacacctccgattaagatgcgctttgtgatcgtcgtcttcaaaattaattgctcgccgaaggttgaggttggtgcagaaatttaatgataactgtgatataggtggctttgttttgccgaaacctggtcacaatatattatcaccacgtccatacatgaatcaggtatcataataaaggggatgacttttgcctcgtcggtgcccagtcatatatgccggcctttattagatatagatatatcgttacttttgcctcgttggaacctagtaacgtgtatccgttcctatatgtttggacatgttaataatatcgtgactccggcctcgtaaatgctcggccataatttttatcttccaaagatcatgaatagctcccatgcgtgtgcatggtagcaaaatatattttgtaaaacaccgcttagattgttcaatcaccaatgaaagttggacatatctagcaccgttgttattggcatcatagtaacaaatagatgatccaatctccaataagggtcggacatctaattttgagcatagaaaatatcaaatagtattcggataatccgatcgccaatgaggaccggaccagccttataccattgattgtataaatggagtttgatgataaacgtgtttcggctctcattgatctggctttaatcatcaagatcaagatagattaagaacacgcagatgttccgatcgccaataaggaccgaacatctattgtgtttaatctagaaaattaatatttattcaatgtgctcaccatccagcgcaaatatcttgaatggcggcatgttgtcgataaatgactcgacttgacgaaggacgccggctgcggtgtttaattttctccgcagtggcagcggcaccggtttgctatcaccaggcgacttcaatctcctctcctgattttcctaatctactaagaagaatgggatgaatgaaaatgggcagatgggtgtctcctgtggcgtcctcggcgtcccccgctctagatgggttctgctccttatataggcagcggtgacggaaacagcctccgaatttccagcgccccgtgctaatcctcctgataaaccgatgcagggacgagccaatgcgtcgccgtgtactggagataattatgtgattaacatgcctaatgacggtgggcccatgtgtttaatcgcctgtcaatttccaaattggagataatgatcctcacgtagcaaagcaagtaacgatagcacttgcttatttcttttcttttaatagctccaatcttttgaatcgtacatcggatttaaaattcatttgaaccattactttctattcgaattatacatcaaaacgagtccaatatcgaatatattcggacaccgtgatatttaaaatttctgggcccatatgtcatatagacacgtctcgtatatatttaataaaattgggtggcagataatattttcgtacaaaattaaatgcccaataatttattatatcttatatgaatttttttgcacaaaaactcatcaaagaaatgccccccaccgagtatagtctgtacgcgaagtaggacaggctaatactcggtgaacaaatcatctattcagataaacctctccataaacgattaattttgctggtaactatcaccagtatatctccaacaagtccgagacgtatcaaaactgattagtgattaatccggcatggactccatatcgccgggcatatatattctcagcagccacgcctgcctagggtttcgaatttgtcgtccttctattctgaagtaattttctctaatctttgttcgtctcactagtcgggacaaacgaaccgatctacgtgataaagaccaggtttgctctacttgactatttcttgctttacatatcttgctaataccttgaaaccctcacgatcaggcatgtacttttcaataatcttgtcagctatttttgcctcccacttttgatagtactttaagatggggagagagagcaaagaaaacgttcaaatccgtttcagggcgagcgagccaaaaagaaacaaatcaccggagatcaacacgatcgtgatcctgaattgattaatacggaggagcaatgcgcccctactgatcaccagcgaaactccatggaatctggcagttcagaaggttctcgtgacatgcgcacaggataccttaaaacaactgctcacaatgtatgatcaaccttgaaccactttattgttttaaaacataagcgtgaccatactacttgcttgatgagcttcctgaacttcctttattatttctcttttattcttacagaaaatgccaatctcaatgtacatattatttagcgggtatgaaagagaagcaccgccgcaagaagaaaacggagaagcgttattgtggtgagaggattttgatttttttaaggatgcagagccaaccggtaatttacccgaggatgcacaatcaaccaacaatggtgaagcaaagaaaacagatgatttcatgagtcaggttgcttcatgtttgaatattaagtggggtcaacaacttatacgtgaagcagagtggatgtcgctcacgcagagtcgtgactgggcagcattccgtgtcccgacaccatttcaaaaattacttgccaattgcaaggatgtccttgtaggtcatcaagatcaaccagggacacagccaagagggaggcctggcagcatgtgtctcttgaagccggttttatttaatgactccgggacttttgatgtgccacgtcatactgctacattggcacaaaagttcattacctcaagaaccaagcgatggttggaagatcagccaatgcagttaaggctagaaatttctcccaatgacaagctaatgctatgggctcgtatgctaatggtgaatccgtacgaccgtacatatctcaagaaggccggcgtactccgaggcataatggcgtctatttataaatgcaagatagatccttcattagtggccgcctttttaacttattggaatgtggatggacacactttagtcaccagccagggagagatgggttatcctctccatacaatgtacgatgccatgggcataccaatttcagggcgcctttatgaagaatttatccctttaccatccacagctcgtgggcatgtgcagactctgcacaatatatatgttgaggagtgtcccctacaactaaatgagggtcctggaatagtaaccatcgcgacatgggtcaatcacttcttcggcgaccaccctgtgccttttcagtcatttttacccaatggttttgctgatccaaaaaaacctttatatgagggcccaaattttcgtgttgagattcggaatggccgacccactgctatcatgtgtggtctcgaaatgacttacgtacacacctacccattggtggtgtaccgggcagcttttatcgccgcatggttatgcacatattgcgttccagtggaggaaggcaactttattcgccccgaggtttttactatggcaatggaaatcgctcaaggcagccgctgggccattggtgttacaagcatggcatttttatatcgtgccctggacaatgtctaccaccaagtagctgcacgtcaggcttctgcgagtgactgttcttcatttgtgccaggccattttattatgggctggtttgcatctttttggagagggttcctacgtcggcaactttatcttgcccggtgatgaacccgccctttattatagacttcagagactatgagtctatggatattaagagcgcacatagcttattttgggattttaatgatgctggaacggctttacgttcactggacttcttgggacggtccagcatccgttttcccacatccgaccaggaggtcgagttatttgatgaccgttctcccaaggcacacagggcaatttccatggcagccgtggatttcttggtcagctgcactgttggcggcgtcacctataggagaggtgaagtttttgacaatttggtttactgtcctcatcgattcgctcgcatgttcaactatgaccagcatgtccccaatttccttatgatcaccattaacaggacacgtagccttgattttccaagttacctaaatggcaattctagggatgaatcgctgcaacttttgcaacggcgccacctagcttttcataggccgaggggtcactcaatatttattcaacctttcgcccgggacaccatacgttcacttgattacatcaacgggtgctctcaagctttcaattttctaaagcatccgagcctattctgttcacggtcaaaacactccaccaaagctgcaactacgaaaaatgcacccggggcagaaacatcaggcatgcagtttaccaaattttttttaaagaaaaatatatactctgttatcaatatgaatggtcattggttactgtttcctctaatttattttcgtcccccttcttttttttaggaggttcaggaggtagggtgggcacacctaagcaaagaacagccaagtctgtctcgatctctcctgagcaccaggaggagagcgctcaaaccgagatcaagacaacgttgccattacccgcctcgagtgcgaaccctacagagattgtgagggtaggacccgaccggtctggaaaagacatcaagaaaatcagaacatgcattgccaacccagacaatgtcacaactcatgtgtctgcccaagcctcacaacaggagttattagtgttacctcctcgaaatgagactgtactcaactcgtcagccatgacgcatatcgacccctacagtgaagggttggctattccacatgatgatataggcactctgcccacagatcttcttacaggcgatttttctgatctagccactcttttggatggaggggcaaaccctgaaaccagtctctgtttagattcgcccatttttccgggtgctactcagaaggacaacgttaattcgcatctcctagaggacgacgagacgcgtaccgaggcttgtgctgatacagtaaaagggggcacctctcatcacggtacaactcatttattttattttatagacatttctgtttgttcctttttttatacaaataaccaatttcatgcactcccttccttcttatgtgtttcagcttcactgactggagttgaagagttgtccaatgaatccaagaagttatctatggatgttgagcaaatcgtcgcacaaattctaaaggcaccgaacgtagaccctggtgcaggggaaaactcctagttcaagggatttcatgggaacaactcggtgaccctgccgaaactttcagatgatgtttcagctcgtggtcttaaacatgtctggtctgagatcaaagcgtttcaagaattactcaaacaacgcccgatacagaaggatattgtgcttaaagagataagcatcaatctggatttgtggagtaacttcttctcaaaaccacctcctgaaataattaggctaatggaagggttacgtgtgcaaaagggagcgctatcagaggaagcgccactgccaaccactaagattgaccatcatattgatatgctccgcactgctcaagacaaggtggagtcatcgtgcgtcgctttggcagcactaacgagtcaatataacgtagaacgggctgtagaagaaggcaataagagggagtgctctcgacaagcccagaaaatcaaagcagagatagcaatgttgcaagcaaaacttcaacaggtggaagatgattattcccgtgctcaatgccaccaagatgttgtaatagagaacttgaactcccatcttgagcgacatcgacaagctaaggatcgaggatatgagattgcggcacagttagagcaggcgagcgtacaccaaaagtctctccaaaatattgaagactttactaagccagacgagtttggtctgtcccaatatgtctacaatatatttgattttttcataggctgctcattagatgagtagacgctgttttaaaatcttgtttcaggcttgtaatagctcttcagatattttatttgtttctgatataacagagtgaactcctttatttgctattatatactttgatttgcaccagaacaacggagtgaactccttcaaatttaataggagcgttgcattgttaccaaccgtctttgtgcactggcttcttccttttttttctttatatatatacatttcctcacataaaagatgctcacgttcagattttttagtggctttactactgtagcagtaacagtaacgccactaattcttcacgattctggttcagccatagattttttttattcaattttttttactggcttttaaaagaccagcctccccgctatagaaattatagcgaaattcatgcaacaatgcaaatgtcgataaatataccatagcgaagattcatgctatgacataaaattccttgtggcgaagaatcatgccgcggcgtgagaacaaaaaaaaatttaaggaagaaaacgtagcgaaaaattcgtgccacacactgatgattatatggcgaagtaatcataccatcttataaaattctattgcgaccaaaataaatcggtgccaaccaatagaaaattaatcaagctagacgcgaccgttaaaatggttacggtactaggcgtctaaactcgaagggtttcacagtcctgcattgaccgtactggcatgctttactgctcccaaatattgactgaccatcatccgaaaatcatagatgctggttcagtgcaactgtacgtaattgactgggccactgtgagaacgcgtcccagtataaacttgataggattaattgccgtccgaaaatcatagacgttggcataatccaattgttcatgaaataataagatcactgtagaaaaattcgttacagtgcagaattgttggaattaatcgtcgtccgaaaatcttggacacgggtgaaacccaattaaataataaaatcactgtagaaagcacattacactgtacaacttataatattaattgtcgtccgaaaatcatggacattggtatgatccaaccatatattaagtaatcatatcactgtaataagaacaccacagtaaacttagtaggaataatttccgtccggaaatcatagacgttgtcatccttcttttcttttgccacgtgttttttttgccacgcgtcataaaggccttcttcacacacatcttgtaaattcaggcttcaaatattattagcatatgagacggatgcccccgccgagtagagttcatgtgcaaagcaacagggactcgactcggggaaacaataaatgagttgtcttgtttccaaggaggagagagaaaaaaaatatgtgggatttttttttgtgtgttggcttttcttccggtcgccaagctatgaggtaacgaatggcaaactgctggaggatgtaatatgccctcaatttctgaataacgacgggatctcgcttaatgcttcaactccctcgtgtaacttgtgataatgagctcacgtttcatcaggatctcttgaaaacaaaggggtcttttctgagttttccttcaattatgtgcctcatattttttacctttatcccaggaaggaggataggataaggctatatttcaaaggtggtttgggtcaataggctatgaaattgccattacttttgctgagggtgggagatgactacttcccgctttcagattgaagaagagcaaccaacccggctacaggctgctgccaagacattgccatactttcgctcattttcttgacgatgtcgctcgagatgggagttcaagttctctgttacaacatcttgtcggtgttgtgcactggagtgggcatcttccacttgttgaagtcttgcttgcaacactgctatctctgctctaactttccgtgcttgtcgtgagcactctctcttgttgccctcctctactgcttgctctacattatattgactcgtcagtgcctccaaagcgacacacgatgactccaccttgtcttgagcagtgcggagcagatcgacgtgttggttaatctggtcctgttgtgcgagaacaagattagtagttggcagtggcgcttcctccgatagcgctcccttaagcacgcgtaacccttccattagcctaattatttcaggaggtggctttgagaagaagttactccacagatccaggttgatgcttatctctttaagtataatatctctctgtaccgggcgttgcttgagtaattcttgaaacgctttgatctcagaccagacatgtttaagaccacgggctgaaacaacatctgaaagtttcggcagggtcacggggttgttcccatcaaattctttgagcagggagttttcctctgcgccacagttcatgttcaccgcttgtgaaacttgggcgattatatgctcaacattgatagacaacttcttggattcactgaacaagtgttgaatcctagctggagcacatgagaagaagggtagtgtgtgaaattgattacataaaaaaaaggaaaacagagtggacagagaagtataaaatgaaagaaaccagttgtaccttgcagagtggtttctcctgcccgcatgacagaattatccccattacaatgcttactagtggcttcggggcccactgccttgttagaaactccatctggtcgtcatcaagaagcttactagtaggttgagttgggggcatggtgcagatagtatcacacggcgtgtttgatcctccgccggaaaaatcaacatatgttgcggtatgatagatatgttatgtttccctgtgaggaagctgtgatgatccacatgaaaaaataagtcggtggccctgtttgatgttcaaacaagaggctactttagacaaccacatccacttcttcgctgtcccgattgccgttacatcttcgggtgagatattttgctggtcaatgtgatagaaaaatttgaagtcatcacaccaaagaaacatctcgccattatcttctcttggcgccttcttggctagtccactgtataatgtgtagattgaggacgcctcaacataggggttccccttttaaaaaaaagaggcacttataagatggatcaattcacggaagagtttaacgattcagaacctaacttctgtcccttttttttattatgatcttttcgccgtgagatttttgcatgccaaggcccctcccttgctgggaagtttccttgataccttcatcactatcatggccaggcaatggtgggtcatctgggatctcctgccaagtataagtggggttgcacacgctggtatgatcggcacgatcactagccttctgcattttcttgtcttgaacagtagcaaagaaattcgatcgactgctttccccagtcgatcaccgttaatttgcagtagctctgatcgaagattttaacgatctaacatgagctctgttttaattactcgattaagaagctgtacagactttatttatatatataggacatacggccatgagcccgtatgatacatgaactcggcttcaatatatatcagatcatgcacgtcatttgccgattggcagccagcttgtgaatcaagccatgtaccacacggagatggattaatccttcgtaacaatatactactgagtatttcaccgagtgaagtctgtcctgcttcgcgtacaaactacactcggtggggggcatttgtttgatgaatttttgtgctaaaaattcatagaagaaataataaattattgggcatttaattttatatgagaatattatttgtagcacaattttactgaatatatacgagacgtgtctatatgacatgtgggtctagaaattttaaatattatggtgtccgaatatattcgatattggactcgttttgttgtataattgaatagaaagtgatggttcaaatggattttaaatccgatatacgattcaaaagattggaactattaaaacaaaagaaataagaagtgctatcgttactacgtgagcatgcatggtcattggctgtggcgattaaacatatggggcccactgtcattagacatgttaatcacataattatctccagactgcagtacacgttgacggattggctcgtctctgcgtcggcttatcacgaagattagcacagggcgctggaaattcggaggccgcttccgtcgccgctgcctatataagaagcagaacccatctagagcgggggacgccgaggacgccacaggagacacccatctgcccattttcattcatcccattcttctcagtagattaggaaaatcaggagaggagattgaagccggccggtgatagcaaaccggcgccgctgcggagagaattaaacaccgcagccggcgtccttcatcaagtcgagtcatttatcgacaacaagccgccatttaggatatttgcgctggatggtgagcacattgaataaatattaattttctagattaaacacaatagatgttcggttcttattggcgatcggaacatctgcgtgtttttaatctatcttgatcttgatgattaaagccagatcaatgagagccgaagcacggttatcatcaaactccatttatacaatcgatggtataaggctggttcggtcctcattggcgatcggattatccgaacactatttgatatattttctatgctcaaaattagatgtccggccctcattggagattggatcatctatttgttactatgataccgataacaacggcgctagatatgtccaactttcattggtgattggacaatctaaccgatgttttacaaaatatattttgataccatgcacacacatgggagctattcgtgatctttggaagttaaaaattatggccgagtatttatgaggtcggtgtcacgatattattaacatgtccaaacagataggaacggatacatgttactaggttccgacgaggcaaaagtaacgatatatccacatctaataaaagctggcatatatgactgggcaccgacgaggcaaaagtcatcccctttgttatgatacctgactcatgtatggacatggtgataatatattgtgaacaggtttcggcaaaacaaagccacctatatcacagttatcattaaatctctgcaccaacttcaaccttcggcgagcaatcaattttgaagacgacgatcacaagcgcagcttaatcggaggtgttccataggctctttcctgtggatgtaattaaccggccgcctcattgctaggcgccgggaatcagcggactacacgcaatctccagtcagcatacctttccattaagtattcctcgcgaaggcaaaaggcgaactcctgtgggagccctcatgtatttgtaaacattcatgttaatgaatcgtgattaataaaatacagggtttccctattttctgtgtgttcgttgttttgttttcatcaaacatctggcttggagtgagattgcattgcatgtgacttagcttctttttaatattccggtgcagtctgcaacacagaaatgacgcagaaggaaaatcaagagagggcaacgcaactgaatggatccaaggctgaatcgaataagttgtctttgtttccttcttttcctgtacctgggagttggttgtataccccctctgactttgcttctttttatgcagttttgtacaaaacaaactcaagcagaaagcgaaacaaggggtggaatctcaaaagagagaaacgaaggctcacttgagcaagatgcttgctggattgaagattgttgaatttcttcatgctgaagggtggattggagggattatctaagaggttttttttttcattttaaagctattctaatgcctacattgtcaactacattccccatatttagtatgcttgtccacatgtcaatggcaccgttggagcaaatccataatgtgcatccttattccttaaatagtgcggacatccttaaataatcctttgagaagaagtatcctaacctttacaatctagttagaaataaaaatgaggtagtggccaaggtaatgagtagaatcccgttaaatgtgtctttcagaagatcaatactgggaagaaacttgaagcctggtatgagctagtgtcgaaggtattaagctagtgtcgaaggttgttaatactgttttgacagattagaaagatcgcttcttttggaaaaacaataaagatggcctttccacagtaaaatctatgtacaagttgctcatgtatgaaggggtggttcctaagaagaatttcatttggaagctcaagattccacttaaaatcaaaattttcttgtggtaccttaaggaaggggtaattctcactaaggataatctagcaaagagaaggtggaagggtagtctaagttgtttttgtaactcaaaggtaacaatataacaccttttgtttgattgctcaatggctaggtatatttggagtgcgctcctttttacatttgagattaggcaactgtgtagcatgtctcaaatgtttgggaattggctgaattgtgttgaaccaggctcaagagaatattgtttgtgggcatagctgcatttctttaggcaatttggttatatagcaatgatgtggtctttaattgctccaatcctacatctttcttgcaggtcattttcataggaacgcattgggcaatgacttgatctttgcttcttaagggaggcgatgaagaaatagttgagagcagcaaactgctggagaagcgtgtgttggagttcttctccgtgtatggctggaaccttacaagaagattggaagcctagtctttttcttcgtttgttgttcttaaaactctttgtgctgtcatctcttatgcaaaatcattttatatttaaactgacaaatagaacctggaatcatatatttctccccatcgaagaaaaaaaatgtacagatgatggccacgaaatatcaaaatccaaatgagcagattgatcgactcaaacaaatccagcaaactcggcaaaggaaacgaagacattttaattaatttatagaaatcagtcaaatgagatataggagtaattgatatgaccaagtccttatgtgtaactattttcttccaacgggaaggtgacaggttgtgcatctgccgattgatgacttttaatgcatatgatcgcctgacagccgtgaatattgcaacagaattttagttgtccagcaaaaagagatttgcagcttgcaggttcatctagaaaacctacaccagtaaaaaaaatgccgagatagaaaaaaaaaccatctagaaacgaactaggctggctcaagaacggagtgtggagctattccaccgtatcccagtcatagtagaaaaagccgggttgtcccggtggagtgctggcttcaccggtctatcggtccaacagttgggtcactggatgaaccgcggtttattccctatattttgtgttgccttccagtcacagcggctaagttatagtataacttagcctagcggttggcaaggtttgcatctatcctagcagcctgggtcgaatctcatccctgcaccattttttctcccataaaaatcaagttgggctcataagaaagatgctatcaagtggcccaactagctttgctcgaaaaccgcagccggttcacaccgggtcgattgtgtgagcgatcctttgagggaaccgagccatgcgatcctttgagggaaccgagccggtcagggagctggttccggttttttctactatgatcccagtagatcttttttttttcggggatgatcccagtagatcttattatatacttcttctgttttatactatataagtcttattatatacttcttctgttttatactatgtaagtcatttgcttttttttcctaacttcaaactttttaagtttgaccaactttataaaaaaatatattatcattttcaatacaaaacaaacatattatcaaattatatttaatattgaatttaatgaaactaattttgtattgtagatactattttttttaaacttggtcaaatctaaagaactttgattaagaaaaaaagtaaaacgacttataatatgaaacgaagggagtattgaaaagaaaagtttggtcaggtcgttatccgtcatacatggcacatttgcggcccagcatatacatacataaatctgtttccaacacacagcatattctctactctctacttatactatactactattgtaatggcaaaatctaaaccgagaagcctcttagtttagtgtaaactagcgaccaaccggttgtgagaataagtactactacacgtgcatgctttttttcctcttagacatgcatgtctttttcttccttcttataaagttttctcaaattacttatccaatctacaatccgattacaccattgtattcgttacaattaaatcttcacaacaagatcttacatgattatattacgatgaaaaatatttatatttgcaaattacttttattatatacgtaagttacttttatcatatatataagttacttttaaatttgactaaattacttcttagatatataaaagtaaattcaataaagtctaaaagtaatttacatatattataaagtatctttaaacaaaactaaagtaactttgtcacaacattagaagtaaattcgttgtagggataaaaatatgactttatctagaaattaaatttaatcagcacagatcaacacacgtaagtttaacaatttttaaaagtaacttcaatgttaattggaagtaatttttgcatggttcagaagtaactctctataaatcttcaatgttaattagaagtaacttttggatcaatgaaaaaaggcatgcattaaagttactttttttttcgttataagttacttctataatatatctaaattacttttaggctttattgaatttacttttatatgtctaagaagtaatttagtgaaatctaaaagtaatttagatatattataaaagtaatttattatttttcatcaaaatataatcatgtgagattctgttataaagatttaatttttacgaacatgatggtgtaatcggatcgtagatcggatgagtagtttaagagaaaattttatttaaagtataggtggatagagtctctcatagatagagtggtagttggtttagacaaaccagctaccattagtagctatatatatatatatatatatatatatatatatatatatatatatatatatatatatatatatatatatatatatatatatatatatatatatagtcacgtcctactataatataatataattaaataaaaacgatcgtaatgggggtcgtgatttctacaactattatttctgaccattagatccgcaacaatcaatggatgagattcatcttgcgatccttccacgcccacgcgcgatccttcccttggcgtagaaaaagaaccgttgccccttttccttggcaagtccgcacatcgtgccgcccctccgccgtcctcgccttccccaccacgccgtcgtcgctcccccgtcatccactcatccactgcgctgccgcaaaaagcgatcctcctgcatgcatgccgcttcccgccggagccgctcgcctcccgccagagccgctctgcctccctgctcgcgccgcgacggagaggaaggatagctggggtctgctcacaccgccaccaacggagaggaagtattttggtgtgtggtttaaggattgttgatataacgatttcattttgcctaatagtgtttgatgaaattttgttcacgttttattaattatttttcactaatgtgtctgcaaatacttgagtcaggataagagggaggatgccatattcagcctgggtgctctctgaagatgcataaccgtgtgatgtctataaatttcttctagtgcctgttgttgcagggtttatttctctatctgtttagttctgcttattcatcaatataatcaaagcttctgcttattactatagttttgtcatgactgaattctttactaatcatgaggcgctacactttatactacctaaattgattggaagaatatgccttcaatggaataagtgggactatacttaatcatccagttgtattactgccaaaaccctattccttaatcatccagttgtacataaatgttagatgcacaggttgcatatataaccctattccataatcacccagttgtacatctatatgttcgtgcttcataccagccttctgccttcaataccattaacaatatgtatacttatgattttttccccgctaaccatggctgctaggagatcttccctgttgtgcttcctaaggccgtgcccaccatgcaaggagcagagcaatgattactgcgttgataagattgactgattgagagggtcatggtgagcctaattgcaacattcattagataaaatggttgtttgattgctttagtactcttgtcgatatgtgacaatgttttgcactactaatattgtaaatctcccgggattgtcctcaatttcttttcactttgtctacccaataggagaaacctatgggatgtgctccgtgacaacatctgctcactggatgctactaaaattatgtcatttaatatccattttttactgtgatttttaattgaagtaagtaaatatatactacagatattttactgcctacctgcaaatatttggtttaatttgtattttctaacacatgcattttgatattcttacattggattatattttcattccattttgagctgaaaaagtggtattcagatattatgtttgacataactatttggacctttttccctaaactatacttatgtgtttcttaaattttaactgaagatggttctcttaggcaaaagttttttcctccttctgttagacaaagaaaagaaaaatgataagcactggataatgcatacatgtgtgcttgattataccgtatactaattgcgcggtgtgatatttgttttcagctgaagtgatagatataactgtgattgcaaggatgctaagagaccatggcaagcccaagggatgtaaggatgccaacgcgaaaccatggcaagcccaagggcacagctatcacggcagaagggggtgggcagtgttgatgttagaatagagcagagctatcagggatgtggagcaggtaatctcagcgtacaatagactaataatttttggggcaagagaaatgcaaatctcagattgattataatggaatgggagcaaaagcaaagatagtaccagatccaactctcctttccaggtttattacactattctcagcattttagttggtttccctgttagttgagtgacttagagattatcagattaggcttaaatagtctctaacaacctaataactcagattggatgaccattactactatattagcaatttcactgcatcaattgagtgttaatttatatctttgaattacgcgccattttcacaaattcaagatatcagaaattacgtggaagtgtaaatgaggtcttcaatgcattgtcttatgttacatctttcctgctcccctgttttcgttggtatatgcctcttacatccagtgttatgatgccataggaaggtcagaaggtgaatgatgaactgatgatgctatctgaaggtgagtgacgatgctgtctgaaggtcagaaggtgagtgattgcaattcttgcaagggaaaatacattgctccatgagtgtgactcctctagaggtatatgatggaatctcatttctacggcaaccttaagtgctatgtgtctgttggaggagagggaatgctgatgaaacctgaagttattaggtagtacaaggttgttagattcttacaagtttttagaagacatgaaagtactattcttaacgacctaattcttttggcacagacgacaggtccatcaaacatatatatcaagcaagacaaatgattcaagtgataattcaagatttatgctggtatcatttttgtggaatttgtattggttgagataggaataattttagctccattggcttttgtgggtcaatatttggattttttttttgcgttggacaatttatttctcactaatacagttgttagtttctacctatgcataatttagataaattttgaaagtgattatatatccctgtgggaggtgtgttgagaaaaacgtgcaatgtaggtgtacgttgaagagctagacaaataggttcgccacttcgctggctggtggatgataacttgaacctcaagatcacatcactaattaattctgataataaattattactttcgaaatgttgtgatttgatcattcatggatgaccacttgttctgcttggacagctgaaacaggaggtagctgcactggtgatgcctacaagagagctcactgcgacaagcttcatcaatccaattctgaaggttgaccagaacaagcacaagattgatgaaaaaaggtatatgccagtataaaggctgtctgtttcagtgggagaaacagagaatggttaggatgtccatcgatgagtgcaatggttatgtttactttttgctaaacatagagatgtgcaacattagcaattcctgggtcatacttttttcccacaatagaccaaattgttaatatagcatgacagattaatttgttttgagttctaatcagtgaagtgtatgcttgaatagtttatatactactaaaaacaaaagtaggggctgaatgataattagttgtgagttctgactataataagaggtgaagtggatagcatcagatttattctggtcctttatacatgctagctctgattgaagattcaaggaatagttacctagaattggaggacaaggaatccaagtatagactgattatatggtggagatcatcttttaagtttttaaggcccatatgctcagtaatacttcatagacttaatattcctcgagttgcaaatgtaggcgatgtgcaaatctgtgttggcccagagagcaccaatcatactagagagcaccttggacataaaaatatccatcttgattatctgaatagttttcctttgaaaaaaaatatagctctaaacatgtcctcacagtcacactagagagcaccaaaaggtgcacagcagctcagacatcacttgattcagctaccattgctacatatgtagtgttactgaaatagattcaaatcttttggtggtgatttataaagttttatctgatcaccagttttactattttgattacaacttgcaaccttttcttttggcacaggagtgcttacattaaaaatagggaacaaagtaactgcatatattttcaaatggctggagttctatatttttaccagtgtcagtgatattcatgataaatattggcttgcaaacatcatcaaccgtgcatatcttttggctatcttttcctccaatttttgtgcagtaatattcttgagcatggaagctgtaagcttccctgaaaaaaacagatataatttactctagattttctcatcatgtgcctatggtcaacagtactgagatttttccttgattttagtatagcatagctctgcactctcccggaatgcttcggggggtgtgtgggaattgaaagctttggggggatgggggggataaggcttattttgttcatgtgaatagcccttcacatacttcagaaaaatggctacgatcttgtgttcaacaacttgactgaaatcttattagtttttttgcaagtttgctgtaatttgccaattttgtgttcatcatttcaacaagagccactgaatgaaattaaaagctgaatttgctgctgctttcagatgcaagagcagcattcgaagcgttccattctaggaacggaagcagcagaggatgactcgttgatgaagtcatacatgctgctgttgtcagcgaacgccgactccggcaacttgacaaggtgagaggaagtgatggcgcagctgcacaagtttagcctgtcgtaacaattgattatgctatgcatatatggccgtctaaggggcatcgatttgcacatatttggttgtctggcaagagtgtacaatgacaagacttctccgaagattatgtttggtcaaaaaatgtgattgcttgtttggttgtatcttaggtgtagatatctatgaatgatttttgtgttttccatacaatctgattattttctaattgtaagatttctataattcgctctccaaaagagcctattattagtctttaatccatgattattttctaattgtaagatttctataattcgctccccaaaaggagcctattattagtctttaatccattgttatggtttgctttgcaattagattgtccaattcatagtgttatagttgattgacatcatttggtgttcatcggagtaactattgttgtattcagagatagattaacagcacaacaatgcacatttttgtaggatcgtaaagggcttttcctaccccaaaacctagccattgaggtgaggggctcccccacttatatcttaggtcatttgcccttccacaaccaatgtgggactattcaacaatctcccccttcacacattggtgtccctccctcaacccttcaccgccccttcaacaatctcccccatcttaggtcatttgcccttccacaaccaatgtgggactattcaacaatctcccccttcacacattggtgtccctccctcaacccttcaccgccccttcaacaatctcccccttcacacattggtgtccctcagcccttcactgccccttcaccgtgtatagaccccacagaacaggcccacggtccatcaggtatacgggccccgaaggcacccacggtccatcaggccttcacatactgtgtctccatcgggctagagatgttaacctagccaggctctgataccaattgtaggatcgtaaagggcctttcccacctcaaaacctagccatttaggtgaggggctcccctacttatatcttaggtcctttgccctttcacaaccaatgtgggactattcaacaattttattgtgttttcttccatgttatattattatgtatttaaaactcgttgcagcgcgcacggtcatccaactagatgatgttgcacgcttcagaaatcagaggcaatacaattcgtcacaaagttatatgctgatcaaagatggatggaaattgcaatcccattttctgatgcttattatagattgcaggctgcaagcatctctcttggaaggactgtcaagttgccagggtaatagatgtgaaagtgcatgaaatttgagatgaataggtgactcgaattacaattactaacttagcctgcctctctaggtaaattaatcacattcctcgttctgtgttttgtgatcttgtctttcagaattggaaaagataggctggaatgcaatgtcaagtaaaaggttcatggagaaattagtgatgggcggacatccgttaggaaaaacacaaaaataaatttcattgttctgtagactgatacttaggctgctttttaatgacttagagtagcttatgactatagatatacatgacaagttcattttcaatgtgcttgttgagttttgaatggctctatttgatgcattgatctgtcagtctgatgtagctgtttttttttaaaaaaaaaattcagcttatgagtgttgaatttctgttggcaatcaattctgtatgctctgtaaatgaggaaatccaatttgttgcaagccaatatgacaatggctctgtaaatgagaaagttacaatagattcagattgtggactgcaatttggaaccattaggttgtaaagaactggataagcctatttatgaaaaaaaaatatatgtcaaaaacccaattctctttgttgtcatgctattttcgaataggcctgtaacagtagccataagcgtaggtctgtaacttgagaattagtagccgctgaaaaatcgaaatgatattcaatatttgctttccaccaaactaattgttataactcgagtacaaagctttgggaggcaactctaaaatttcatatatgtacttttcactactgtcactttgcatatacatatttacatgagctgtgtgagttttaaaatgcatgcactctgtcttgtctcttgtacaatgatgaccgaaggttaactttatgtgttaagtccccacagattctgggtaattaattaactttgcaaaagtttatatccccaactgcaaatgatcaattaatatagtagctcaattagagagcagattttcatggatgccaaattttgtggactcaaagtaaagttgtaatcacctacatctataagcattgctgaagtgtaaacaatagtttcaggactgatcattttaggagcatagtgacaaagtgaacttaatagccaggttagaaacaacttctaaaataagagagaagcatcttcatggcttattgaactctggtgccttgcatgtgaataaatctcaagatacaaaagggtgataattttcttacacctaggaattttaattttaatttacaacatgtatacttatcgctttgaaattgtatgcctgccggagacctgtgcaactaggggcaaattgtcaaattgtagaatttaagtgtttgtcaattgcaaaatttctttaaaaagttatattgttcctgttgcaacgcacaggcacccagctagcatacatatatgtcgagagaacgttttggttctaggatctatatacatattatatattatacatattatacatgggtaacaatctagcatgctactcaaaggacgaagcttttgaacattggggtttccaagctcaaggttcttctgcttgtaaaatcaaatgtgtttttgattattattatgtgatgaacaattggcattggagattattggttttgatatttggaatttatttgcgaagtggttttggagataattggatttcacatgtgatctacaggatactgttggatttgggtccggtcagaccgggctgtgtatgccggtcagaccggcggtgatcgagcggtcagaccggccagtccacggtctgaccggccgactatgtgtcggtttcggtttcgggttgtttatttggatatccgtgattgtgtcattgttatgacttctagatagatactatgcgtatgtaatactgttgtttgctactaataagttaagttggggatagcttggtctcggaatatggtttctttgtttgttctatgtgtaggtgactcgagatgccggaagagtatttgcggtgatggaccgggagtcggcttggggataagacgacgtccgtggtggtcagagatcatgcgggatactaaggctagagttcaatgcacgtggttgataaagattccatatggcatacgatggaggtattgtgttcgtatgagatacggagtcgaatttggaaggagtccaaatttggtatgattggttatgtatagtttgtttcttgtactagagggtttcctagggtgattaggacttctagtatgagtttggttcgtggctttaggctgcctaccttgggtataaatagagagggagcgtgaggcttctcggtatcgcttttgagaacaattgagttgatagttgagttagggtttcgagtttagtcgaaatttttgtaaggagttctgttggtgcactttgtaaacacagagagaatcaataaagtcgtcatccactttaagagttcttcgatttgtgtttcatcgggtctcggcggtctaaccggctacacaccggtggtcagaccggcgactgctacagggagcggtaggtgatctcggcggttcgaccgatcaatctacatcggtcagaccgatgttcatcaggcggtcggaccggcacaacatcttcggtcagaccacgatccgtcgaatttgacggtaacttttatttccgctaaaagttttggttttttggtataccaaccattcacctccccccctctggttggcttagttgttgtgattcgatcctacactactaatcaatgctttaaactccattgcaaaaagtagcaccactacatatcatgcatattttcttaatttaaaataccccacaaaagttattcgttttttatttttccgtgtgtcatcctagaacatgaacaacaacaagaaaagtttactctcacccgttgtaattacatgcattttgctagttacctattataaaaattaaggatgattatgcaatggacactgctgtctgatgatctgatgcagagaggaggagttggtttggacgttcatccgccatgatagatcatactactacatggttatgctgctcttttctttgcttcattgcatgcatgcttcatccggcatcaggatacacaaaggtgcaccaaagcttacaaaagtcagaatcgacttggcaggattgctatactgtgctagagtatgtagctacagctacagaattacagagtatatgcactgtagagtttacaatgctttcgacattcttaattaattggccaacgatttattaacttgcatgtgttaccattttatatattttaggaattatatggtttttgctctgttatgttttttggcacacatctcggcatctgtatgtctcttgtagtcatagaatcataaagtcacaaaatcgtatggcaatagagatttcgataacctttttattattgcaaacttagtaatctatacaacgtaattttatttcaaatcggtaataatatcttcgatgtaatcatacatgggactggatttaacatctacaattaaaattgccattgtcatttttacccgttgcaatgcatgggtaatatgctagttagaccaaaaagtataatattgctgagccatgatttttgcggaacagggaagacaccctactccatttttttttcatttaggaaatacggaaaataatagtcttacatccaacacataatcatggttcaaattagataagtagcaaactaagcttagcaagtcgataaaactaattgcggaacagagtagcacgagctttaagggtacttaggcaatacaaattaatagcacaaataatcgcgcgataattgagtaacataagcacggggaggaattaggttcttgcttcttatgcagagtcgtagcggccggttgtcgagattactgcaggtaagaaacaatcgccctgtccaaaagttcaatagcacacagatataaaacttgaagacacaggcaaatgcatgcatgcatatgcaagaaaaaaaaactgtaagtcctagaatggcacattaattggtactccatatatggcatcgatcgagcatgcaattggacattcgaaaaggatatatatgtacaagcatcagaacgagttcatcaaaagaacagtacaaacatttctttttcataccatgccaattaatttattgaataatattatctagctaggataatattttattgaatattattgaataatattatctaaaatctagctagtgactaggatatggaattaaaaaaagacgtggatattaggatatggaattattgtcgactaagtacttgttgagattatagacatataatgatttaatctattccataaataaatcatgacattacagatgaaaactagcatgaacgcatcattagatctacacatgtaaactacacagtataacatgaacagattaagtatgcgcaacatattgaacacgtaccgaggtgacggaaagaccggctgcttggtcgaaacttttcgcaggtgtctacgaaggcacgaaacacgcgagcgaagaggaaggcgagccgtcgcgaacgaacagggagcagtcgcgcgaagcgcttcccaaaaaccttattgccgccttctcccggtgcagaacgtcgaaggcagaggttccggagacctgctctcccgattgccggtgcacgccggcgagcgggatggagtagtctacgagcgacggcgcagtacagagtaggaagcaaaccctagattgatttttttttgtatgttgcgtgaagacggcaggtcggtttatatagagaagggtcgcttgatcagggcgcccgcacgatctctactgcgcgtaaccgaaccggataagtcgcgcgtaacttatccggactccacgccgtttgcacgcaccggatttttcggaacgtttccaaaacaaaacgaatccgaatttgcagcaaaacaaaactgcaaaaggaggctgcatctgcgcaagggtgaggagccaatttttcggaccattcgacgcgtacgtcgtgcacgcgcgccgcctgccctgccaggccaggcgaggcgaggcgagcgagcgcgcgcgtgtgtttcccctcttctctccaccacacatgcttcaagtggctaggagggcatcctcccttttaaggaggtccccctctcctagaataagcaaggtggtactaaactccacatgcatgccatcccatgaggtgggcttttgtgattttccaaagaattaatcttcgagtgggctaaggcccattcattaattccaacaatcccccaccaaatctcaaaatcccactgagatttgccttttccaatgtactgtttatataccagcggttcgatggagaccaattaaggttgaacatccacctagaactccaagctacacttactcacaacttgaacaatggactacgccttgaattgcaagtcttgtgcaagcaagtttcactcaaagtcttatctggtactagaccgtctgtagactacccctcgggtggagcgtataagtcatactcctaggtctttagtaagcttcctagaagattcacccaaaatcttcatagactgcgaccaacagtcaagctcacaaaggtgagttccttcaagaatgctctgcaggacaacatctttgctaattaaagccaacagaactcattaaggcatagccaacctgccttgcagctcacaagagtatatgcatcttcacttggatagggtatatatattggtactctcctctagtttattaatggtttgttcttcccaggatctaattcacgggatctccgatcacatagactgggttaccaccatagtataactcacatgggtctcaaacccatctccttcgatgcattgtctatcacatttcgtgatagtcccttcgtgaagggatctgccaggtttctcgctgtttggatgtaatccaacgttataactccggagtttcttaatttcctgacagacttcaatcgtcttttcacatgtctagacgatttcatattatccttagaactattcactttgacaattaccgtttgattgtcacagttcataaggatagccggcaccggtttttcaacaacaggcagatccattaatagatcacgcagccattctgcctcaacagtagcagtatccagtgccgttagttctgcttccatggttgacctcgtcaaaattgtctgtttgcaagacctccatgaaacagcaccaccacccagtgtgaaaacatatccactagtggctttgatctcatccacatcagagatccagttagaatcactataaccctccagtaccgcaggatacccagtatagtgaagtcccaattccacagtacctttcagatagcgcattactcgctcaagcgcacgccagtgatcatctcccggattagaagtaaatcggctcaacttgctcacagcaaaggagatatcaggcctagttgcactagccaggtacatcaacgagccaatgatttgggagtattccagttgattcctagcaattctcttgttcttgcgaagcaacaagctaggatcataaggtgttggagaaggcttactatcaatgtagccaaagcgattcaagatcttctccacataatgggactgcaagagagtaatcccattctcacctctaattagcttaatgtttaagataacatcagctactcccaaatctttcatatcaaaattttgagacaagaatgatttaacctcatttatcacctcaaggtttgtcccaaatatcagtatgtcgtcaacatacaagcacaaaataactccctcacccccaccatggcgatagtacacacatttatctgcctcattgactgcaaagcctgcagatgtcaatgttttgttaaatttctcatgccattgcttaggagcttgtttcagaccatacaaagacttcaacaatttgcacactttgccttcttgaccttcaactacaaacccatcaggttgatccatatagatctcctcatccagctctccattaagaaaagttgtcttaacgtccatttgatgaacgagaagaccatgtgaggctgctagggaaagtagcacacgaattgtggtcaatctagcaacaggtgagtaagtgtcaaagaaatcttcgccttctttctgagtatagcccttagcaacaagccgagccttgtacttttcaatagtaccgtcaggcctaagcttcttcttgaacacccacttgcaccccacaggtttacacccatagggtcgctctgtcacctcccaagtcccgttagcgataatggaatccatttcactacggacagcctccttccagtagtctgcatcaggagatgcatatgcttctgaaattgacttaggagtgtcatccacgaggtacacagtgaaatcatcaccaaaagacttagccgtcctttgtctcttactccttcgaggagcttcactgacatcctcctcagagacaagttcatgtgtatgttcagtttgttctggtggtgtgattgaactgggaattatttcagagggttggttcgaaccactatgtgtatccttcattggaaaaaagctctcaaagaaggtagcatcacgagactccataattgtaccaacatgcatgtccggtacctcggatttaactattaaaaatctataggcaatgctatgatgagcatatcccagaaaaacacagtccacagtcttaggtccaagtttgcgcttcttcgttattggtacattgactttcgccaagcacccccatgtgcgcaaataagaaagtgatggttttctaccaatccatatctcatatggtgttttgtccttatttctgttaggaactctgtttaacacatgatttgaggtcaacaatgcctccccccaccatgccttaggcagtcccgcggtgtccaacatggcattcaccaagtcagtcagtgtgcggttcttcctttcagcaatcccattagactcgggagaatagggaggcgtcctctcatgtatgatgccatgttcctcacagaataagtcaaactcgttcgagaaaaactctccaccacgatcagacctaagcctttttatctttctgtcaagttgattttcaacttctgccttataaattttaaaatagtctaaagcctcgtctttcgttttcaacaagtacacatagcaaaatctagtagcatcatcaatcaatgtcatgaaatatcgttttccacccttcgtcaacaccccattcatttcacaaagatctgaatgtaggagttctagtggtgccaagtttctctcctcggcagccttgtgaggcttgcgaggttgcttcgattgcacacaactatggcacttagaacctttgacaatggaaaacttaggaattaaacacatgctggaaagccgagacatcaagccaaaattaatatgacataaacgtgaatgccaaacattagcctcatcatccacactgccacaaatatggttcacagacttattgcagaaatcagaaagggaaaagcggaacagcctccgcactcataacctttaccaataaaatatccatgtttagacacgactactttattagactcaaaaaccaacttaaatccgtctc

SEQ ID NO: 7725 - DNA, 1506 bp, Oryza sativa
cagtggcacaactacaaactgcacaaagtcagggaatcctcattcgtatagggtttattgttgtttttggaaaaagtacgaattaccctcccctgaactgtcgcggtcgtctgaattaccccctgaaccacaaaaccggacattcttcaccccgaacaatgtaaaccggacgaattacctccctcgatccaatccgcggtggttttggtctacgtggcagtccagtcagcaatttatttattaaaaaatatgtgggccccacctatcagtttctctctcctatctctcactctctctcttctcctttagacggcggcggcggaggcaggagcgcggcgagacggcagcggcggcggcgggggcgaaggaggcgaggcggtggcggcatcatgatgctccaacgcatcggcgcccgcatggcgacggcctatctcgcaatggtcgtggcggcgctcatcgaggcgaggtggctccgcgtggcccgcgacgccggcctggtcgaccggccggacgtggcaacggcctgcctcaccatggtcgtggcagcgctcgtcgaggcgaggcggctccgtgcggcccgcgatgccgccgctgcaccccaccgccgctcgtctccttcgccgcaccccgccgccactcgtctcctccgccgcaccccgccgccgctcgccgcctcatcccccgccgctcgcctccaccgccgccgccactccctgttgcccgcctgcctccgtgcgcgtgagtgagagagaatgagagaagacagagaggaatagttggataggagtatgacagatgggtcctatatttttttaataaataaaatactgaatggactgccacgtagaccaaaactaccgcggattgggtcgaggggggtaattcgtctggtttacatagttcggggtgaataatatccggtttggtggttagggggtaattcagatgaccgcgatagttcggggggtaattcgtactctttccttgtttttaatagctgaatgattttgtaatctagggtacaatcgaaaaattaatctattataaagtttaaaacgaatttaattttttaaagaaatttactataatgttttttatgaaaaacatactgtttataaactatagaagcatgtcgtataattaatctattcttcctatatttggattagagctttctgtgccaggaaaggcacaaaagccacatgttttgcatggtatttttaggaaaaatttgctacaggacaattaaaaaacttgtaattggttgtgagatatcgcaaaaagtgatacggctgatggacattacaaaatttgtgtgattagctacaggaaaccagatgcaatattttataatttctaggtcaaaaaaggtgagatttttttcaaaatagcgagattgcccctggcacctctcctctccagctcgctcgcctgtcacggagcgcggctgcctcctgctcccacagcctatctttggctcgtgctcctccacctctcatccccctc

SEQ ID NO: 7726 - DNA, 11484 bp, Oryza sativa
ccctccccccacccccccccccctcctcccgcagaccgtgtcctgctcctagcgcacgcaaggtcggcacccacggctgccatgattcgccctccatgacgggtacctcattgatcttgacggcgaacccatccgctgcccgacgcccatcgcccgttgcaacgtccaggccacgctcgccagggagaactccaacatcatcggcacctgctcctctgcccggtcagcgagatgttcaccagcgtggtggcgaccacccctgtgctcggcgccggcggcgacaacactaccgatggattcacctgctccggcattagctgctgtgatgcccatcgccatcggctgcccctcctacctcgtgcagttccttagcctggactagaactaggagctcagcggcaagctacccatcgccgtgcgcatcgccgagcggggctggttcgagggcgtcgctgccaagctcctcaacagcagctcagacgccgccactcgccggtcccggtggttctagagcagtaggcggttacgggagctcagggcgcgcgaggcggaggcggtcgcgtgcgaagcggcggccgcgctatgtgatagggccagtgagctggagaggagcggcgccaagggcaatctcgccatcttaaaaattttatcacctcttttgacccaaaaattataaaatattgtatctggtgtcctacaactaattatacaattttggtagtatccatcagctatgttacgtttttatgatgtcttagccaattacaagttttttgagtgtcatgtagcaaattttgctgaatttttattatcaaagaaaaacatgttgctcccatccaaagataatgaatcaaaaaacatgcttgaaattaattgcatgtattcccatcgaaaaaaaaagtaactgaatataaagattgtctccactctcctaattaactgaaaaacatgttgctcccatccaaaggccttgttaggctagttcctttccataggtattggaggaggttaattcagcatccattaaggtgcgtagaaaatactagggatgaaaatggtatggaaatttttaagatttctggctgccgtttccagttttcaccgaccgttttagtcggtatcagtaaccgactgtggtggaaatggaaacggtaatttcttctggaaatggtagtggaaatgggatggagatttttccgaccgtttgtcggtaaccgtatttatacggtaatttccatcaaaattccgaaagttccccagcggctcagccacctcaacttatcggaagcccatgaatgaaagaaacccggtaggcttgcagcccataataaaaggggaagtgaccagggaaaatattgttaaccctatgacatggcatgtggattttgctgaactttagtctcctcaacttatcgatgttgaagtatgaagtattgttgaactttctttatgttgtttgtcaaacttattatcgtatcaccaattatcatataacggtgttatgtggagtgtgatggtgcaaaaattaagttaaaaattcatctacgtgcatagttaaatgcgtgctatgccacactccgctgattccgacattaaattttgacttccgaccaatatcggtatattccgttccgatggtcccgtttccgatataccgatattaccgatatcgttacaatttccgagtctattgttccgattccatttttgagaaaaaaaatacgaaaataaaaatggtatagggtttttccgaccattttcatccatcgaaaataccgaacaagccccagatgatataatgtacagtgcttcaaccttatgcatttaggagaagttctgaggaaattggagtagagtatatatgtataattttttttgcggggatatgtataatatcatttacaaatggaaaaaaaaagatatatcgtgtcgaaatccaccagatcgaataggtattcgcacctgcaaatcactacaccattccctatgaatctgtcagcaaggcccacatacgctgaaaaagctactctttcacacagagagggtcaggttgtcactgtacccacgacggaataaaaattgagcatatgcctaatttatatcacaatttctatatatatgattactgctcaatataccgacatatatttaagagcaatttttaaaaaaggtaaatagtcagaattatgttctagctttagctaaatatttcagagaactacaacattatttatttgccttacgaatttagcctacttatcacacaggtactagtacgtggataatactcgcactctcttaataagagttgttccacattccatatgcattgaggataaaattaattttctcgtaaaaccgtttgctatttgttacagttttatgaaatactccctcaaagttgtagcaaagagatagtctcggcttttgtgaaatttactttatatttagcatttacatccgctccaaaaatatttgtgtcaaatacaatccccagtttatttcaccccgtacattcaccaaacttaatgcaacaggcaaattgtatgtacatcattcatttaccaaaacttgaagcgacgtatatacatgccagcgcagggtttctgggtttgtacagtacaatcgcaacaaatcagaacaagctgcatccggcactcaataaaaggacctagagtacacacactcaaatatatttgtacgaaataaaatggtcacagaattaattcacgttacgcacacaataaaaaatcaaatatatatttagtttcatcacaattctgtctgtgagaatcaaatatattatatatatttagttgacaatattgtaccctttttgatacattgagagtagagtgtgcatgtgtacatagaactaaactcgtgtgcatatgagcatttgtattcgctacagaatactcaaaatttgtgtaatttgcttatagacataaaaaaacgtgtcatggctgaaagtcacttaaaaatcagtaatttgttagaggacacttttggctcaattggaaagataaattattaaaaaagaggagattgccccaagaccatatgcttcaaatatggcgtgagagtaaaatttagaaattatgcaaatctaaatttactatcaacccaagtacaccactaacatacatcatattccatcatagtaatttactggagggcattttcattttcttgaaaaaattctctcccaactaagccaaaagtgttctctagtagattaccagtttttaacaatgtctggcacgtttttacgatgtctaacagtaaattatacaaattttaaatatcatgtaacaaattttgtcagacatggaaccagaatgagtctattagtggagtcacaactacaactcaccctctgtttcatggccttcgtccatctcaatcacacacgaagccgaacttggctggaatacgaggccagggtctaaggtggtgtttagtaagggacttgtgcttttgtgagagagactaaaataagtccctcctctcccaaacaccacgtaaaccccacatttaaaatcttgcctggaattgtcccaatttccatgacacgtcgtgtctgacgaatcaagatgacagtaccatgttcccttggtcatttatgcatatgccaccaataaaagttgctcaccgatcgagcttactaaaaacatgaaaatttgttgtgtcgtgtcaccttcacggcaagtgtcactccttatcttgcctgtgtacagacatgcagtgagtgttattttcaccttatttgcaagctgtccatgttgcaactttcaccatttcacaattccccacatagagaagacagccaacaatcaacaatgtaatcagatcttcaccaatgccttgcccatgacacaaaaggggggccaatgaaggcagcccttcagcatcagatacccctgccaaggctgcaaatgccatttgggatgaggccaacaaatgcccatgaaccaaacgtagcaaccaaaggcagccatcgaaattgttgtaccctctcaaacacacataagccaagcaatgtagctgttatcacacagtaacaaggcaggcagccatttctggtttctgccaccttgtagcctgccatgtggggcttcaggaatttaaaggaccacactctcacacacacacacactcctccaacacatatttacacaagttctgaatttacccatcaaacttcttgtaatcctttgtgtttgattgtcttcaatgtatagagatgcaataatcttgtagaagtttccataacatccgtaccatatgctcttaatagtgcagtaacgtagggcttgcttgaaaggcactgcagtctaattataagctagtctaattataagccgcgaagacacaataacgaggaataagactaattataattttaggtaagactttcctacctatgctcttcgcggtcgaaaactggctaaggaacaaaaacgactagaaaaaccatagattggaaaatttaagttgcaaaaattcaaaattaacaagcatgccctacaggttttaggggaaaaaatatgtaaaatgcatgggtggatggctcttaattgtatgcagctaactgggcatccaagcacaggaggcaggctagctggatagtaacatgcaggatgcaactgctccagatttaatggctgcccaacgccggccaactatccgtcgatgtccccatctacacggaaggagatcttctgcagtagtgaagctagctgctgctgcgttggggttggctcactgacgtattcacatagtattattgtactcctatcctatctacggttttctctgtttgtaggatgctggtgagttggtgattgcgtttagacgagggctgtgcttaattgttagctctgccagcttgatgggtttttgttactcgctccatcggcctgtttagttcgtgaaaaataaaaaattttgtgccacatgagatatttaaccggatgtcggaaagggttttcagacacgaataaaaaaactaattttataactcgtctggaaactacgagataatcttgagcctaattaatccgtcattagcacatgtgggttatcgtagcattaatagataatcatgaactaattaggctcaaaagatttatctcacgatttcccccctaactgtgcaattagtttttttaatctatatttaatgctccatacatgtgtccaaagattcgatctgatgtttttgaaaaaaaatttggggaactaaaccagacctaaaatacactaagttttcattcgacacattctcagttacctcttcgaaatatataaggcataggtctggactaattggggctacaataaaatcaagtggtagtaaacttatataagtagtttagtgctaatagtctcattttaccaatactaggttgctaatatttggacaaagtttaaactagaaaagttgctatattttgagacggagtgagtattattctcaacactaggtgaaatctattatggaaatgtgaagttttatggagtcacaaattttgcgacttgtgccgccaatattgattgagatatattcagaaattctataaattattaagttatgatattggagttcaagactattgtatatgcctgattttaccgtgtacaatataaatgtatttttcacgaaagataaattgacactcaatgtttataaattcttgtatatcgtccaaacgtgtatcaataaatcttgcagaaaaaagataaagattaaatacagacacgtaaaacgagaaagccattaatacatgattaaataagctttaattatttcaaacttaaaaaatagaataatataaaattttcgtacaaaatagtgaaaattaattatgctaaaaaatcaagataaaatatgtatcccaataaaaaaatggaatctacgtcgcaagatctcacaaccccagcaccaaccttttggatcccaatcaatgccacaaaagaaaaaaaaaaccctagaatatccacacaattgaatgattgattgcagctcaagcttcaatccgcacaataaacagattttacatttctaaacctctaaaaaagaaaatgcaatattagattgttcataccctcccataaataatcctcctgtacaacataattgcaccctctcttctcttcagcacactcccactgtgggagtcccacaaaaccccccctcctctcctcctctggctccctctgccacccagccaccacaggatggcatcctcctcctcacctccactcctcctcctcgtctccctcctcgccgccgtcgccgccgccttcctcgcggcgcaagctctcgcccaacaccaaccccaagtaccactcccatctccactctctctctctctttgcatttcaagaaaccaagaactgtactgaccgtgttcgtgttcggtttcgtagggaaatgatacggcggcggcgggggaggggtggaggccgaggctgaggaagacgtacgtggagggcggcgccgccgggatggtgccgcggcggcggaggctggtggggaggttccagatatgcgcggtgtgcacctgctgcgggggcccgcacggggtgtgcatcccggcgccctgctgctacgccatcaactgcaacatcccgaaccgccccttcggcgtctgctccttcaccccgcgaacctgcaactgcctcaactgccacctctagcagatatgcagcacagcacatcagccaagaaaatcaggcaagaaaccccaagtaaaagaaaaaaaacagtaatgcttaatgctgcttttaatctctttgtttttttttctctttttgatttttctttggttggtgccaaatcgagaaatgctaagaagaaatttgtttgggattggaagaacacttggatcatatagttagtagttgtagtgagtggaaatattggtagctatgagtagctttgtgatggatggatggatggatgttttttggttagtttttttttccccattttggggggtgactggttaatgtggtgcctattgaattgtggatataattaattagtatcttggtatatttgaaacaaaattgaatttgttctgtattgttacgcatattcttcctagtggtcgtgtaatatataccgctttagtttactgtcttcaaattcatattgcagagctagtatggttcttctcagagacaatgggtgacttggtggatttctgttcagtaccagagaaaaaaattgttttcctgatttggttttgttgtgattgaatctagcatgtgtacaactgatgtttaatatgtggtgatgcgtggaatgcggcagcgatagatacagggtacatgcagcacgactcttatcaatcataatatcatctacaatgtcaagttctgtttcctttcttgttatgcttttaattgatgcaatctagcattcattctgttgcacagtttttggtttgcagttctaatgccttgttgatgtgatgtccacctgattctattagcacaattaactgaatattattctgactctgactgttggagaagaatctgatgaatttgtgtgcaaggtttcaaaaaaaaaaaaaacaaaagttagctctgatcagttcttgtagaagtatgttttttgtgtaggaaactttttagattgatgcatttgagtaagttttagtctaagtagttcctattataaagtataagactaggacaagcagatgtactgaagtaattaagggccagttcgtattagatgatattggcatctggcttgactcgttttcaatccagctgaaattccttttgaatactacatttcaagctctgccttagcatatgtcctcctatctgattttgaaggtttgcactttacactttgatattgcacatcagctaatctttgccttttctatcaaattttttaatcagctgtcctgagggatgcattccttctttaattctcctgtgcagtactacacaataactattaactaccgtcttcaatgaaagtaaatgttgtggttagtggctgtccattttagtatatgttttttatattgtttgctgtctttgttgacagtccatgccactatggcaatgtcattgagacatagaaaggaaaataagtatattagggtaggacttgtccacacttcatttggctcctaaaccatccatagttgccttctgcagattttctgtttagattattcgaagataaattaatgttgatggattaattattatatgttataaatctgataaatagcttgccacaagtggtttaagcaatgcagtagaaattatttttctttcaaaaatcatatttttcgaagcatgtactaaataatccgcaccaataattcagtgaataaacaaaaatgagcatggtgatttggtcatcgacatcataagtttctgttgcagtttagagccatttccaatgctcgaatttgctgaaaaaaatcgaaaactccaactaattataggaaaataacctcagggggtgaacagagcgcaaatcactgagagagagagaaacaaaataccagcaagattatcagattgagcgtcgggtcggatagatggtccaaaaagagcgtgccctacaggatatggttttttcacgctgtgatggcatttctaagccagcttcttcaggacactgcaacagtactgggcggcatcatggaccaaaaaaattagttcggtattaaattgagacctcgaccattgatttgtgctcttgtggtcatcaggcaatgcacatgagctcctgcacaaccacatctgatctgagtctagctggagctccaggcctgtcccaccctatcttattgtcatgtaaaaccctttaaccctcaaccatttgtcactcttgcgatattcggaacacggtaatttcacgggagttatgtacatattccgcaaaaaaaacatcatatttccatatgtatatatgaatgagtttttttttagcacctcaaacagtcaataatgccgagtacaattcaaacccaacttttgtccttggtgcagctagagattcaagtctcccatgccacatggttcttacagctatatgactcctcatgggagacaatttgtccttggtgaggaagatattgtcacatgaccaaagggcaggcacgagtgttgtatttaccctttgatggttgtgtgtttctactatctagtgggtgcctgatagtgtttgcaactgattctaaattttatgagttccattttggatggattttaggaggttcatttgccactttcgttgtccatctctcttttaatgattgataagaagacaactaaaaatatacctgaaattattctttagaactaaaattcaaaattagttttggattttatgataatgttgtgccaaagaaccaaaccgagctaatatgtatttatccatgtaaacaaacagagtaatttttagaaagtcccacatttttacttgtggcatataactataattgttgtggcctaaacattttataaaaccccccatttattcaaatctcgagtaatttgagcatatctaaaacaatatttttaaaagtagtaaaaagttaaattgttaacgttagtcaagaactcaataatttaaaatgttatatacactctgcattttaaaatttgaagtaaatctatactcaacatgcatagcggtactttaggatcataatatatgaggttatatgtcaccagtcaaaatacatcgtttgaaatatggggttttgtgaagcaatgcgctcagaaaaaactaaccccccacccccccacgcgcacgcgcgaaacagaggtagggtgtgtttagttcacgccaaaattggaagttcggttgaaattgaaacgatgtgacggaaaaattggaagtttatgtgtgtaggaaagttttgatgtgatggaaaagttgtaagttttaaaaaaaaagtttgaaactaaactcggccctagtatgtattcgtgctcgttagcgtagagtccccatcaaactttgaaactttgctgaagacattcgcatgcaagatgcaataataacaatacgaataatcacatcaaaagaagtgataataataataagagtcaaaatttcacctatattgtcatacttccaagtgatccttaaaataaaaagagaagtgagataccactaagctatatagaaaaataaaggaaaagaattactcattatgtttcatagttttagttgtttcttgattttttttggcaaattttgctataggacaataaaaaattatgtaatttactggtagatatcgtaaaaacatgtcattgttgagagactataaaaaactgataactttccagatgacacttttggctcaattagagagaaatttttcaaaaagacaagaatgcccatagggtcaaaagcctttgggctgaaactggagcgaagatggaatataatttatactagtaatgtacttggggtgacggcaaaattagagttgcatgctttctaaaattttactcgaacatcatgtttgaaacatgtggtcttaggagcattctcttctttcttaagaatttatcaatctaattaaaccgaaagtgttctctagcagattaccagttttttaggacgtgcttcagccgtgacatattttttcgacgtctatcaacaaattgcacatattttgggtgtactctagcaaaaattgcccctttttctggaatagttgttttttttgtgtatgttgagtatgttgaacaatatttgtttacttatacacttcagaggattttaaattcatagaaaaattactaagattctatttaatttagataagatgactactccatatgaattaacaagatccatgggtgtaaaattactagagattctatttaatttagataagatgactactccatactagtatgaattaacaagatccatatgataagatgactaatccatatgaaaaattactagagattctatttattttctttttaaacttaggctgtatttagatccatgggtgtaaagttttggcgtgtcacatcggatatacggacacatatttaaagtattaaacgtagtctaataacaaaacaaattatagaatccgcctgtaaaccgcgagacgaatttattaagcctaattaatccatcattagcaaatgtttactttagcaccacattgtcaaattatggtgcaattaggcttaaaagatccgtctcgcaatttacacgcaatctatataattagttattttttttcgtttatatttaatactccatatatatgtccaaacattcgatgtgacagacagtaaaaatttgtcaggggatctaaacatgcccagagtttggaggaaaccaaacttgaactcgaacctcgcttctcggtctaatcagttagatacattcaatgtaaaaaaagaaaaaaaaatcctatgagacgtcaaaaggccatttgatgagctactgta

SEQ ID NO: 7727 - DNA, 34688 bp, Oryza sativa
aaacaaacaaagaaacaaaagatggcaagtactgaaacaatatagtaaccttttgccgagaggaatcgttctcatagactcttcgtagactcgtcggagactcatcgtccgaagagatcaccaaagccttcaacacctcctccttctccttcatcgaaacctctatacaactatcatcgtcatccatctcttctcccccatacctaatcaccttgccgtcatactccagtacaaagtcctcattctcgtggacacgcacgttctctaagaataagcggtactcctcttcgatgtcggcgttgacatcgtacactgcgggtactgtagatgagcccttctccttgcctttcttgatcttggttttactcttgtgtcctaacccaccctggtaggacacagtggagtccatcgggttgccgcttgcagtagaggcggaggtggcagaagcatggtggttcggcttcggcatcactggggaagggatcttgggtagagggaatttgtgcctgtaacaccccaggaatcacaacaatcctgagatgccactaaacatccaaacaaccatgccaaaaaaagaaaaaagaaatttcagtagcatctcctttaaaacaaagaaaactcgcagaagtatcaacttagagatatatatgatcgaacaacatactaccatacaagaacaaccctagtccgagggaaaactcggttaatatccaactttatcacctataacacctaatctaaactactccctagaacacaaccaagacaggagaaaaaccttacatatgtccccttgttgaagcccctctctttcccccttctcctcgcttcttcccttctccctaatcctcgatttctcctcttttttagatgcagagacaacaagatgggatgggggtaggagagagattgaccagggggagatggtgggggcaaaaggcggccaagtggatggagcacgccctccctagggttttggggagaaaggtgagttggttgggccttgggctaaccccttaaccgacccacctagccctcccacgctaattttaagttttcctcttattatttcaagaagaaacacatagaaacatccaaaataagtttctagggcggtctatacttttttgtggtatcacagtgtcaagctcttgattaatgggttgtttctaatcacgcctgggcttcaacatcatccatcatcattctgctttggaattagtgctaggtaaaactagatgtcacatcaaattaacgggctatacatgacaagaaataattcagatctggttgtttttcaccaatccatttttaaattacacatcatttccttataggatcactttgaaaagaatgtgattgagttttccatctttgatcgcacagaaagtcaagctggttaattatgtggaaatgtggaattgatttatttctatgtaaatgcttttgcactttccatttttatgtatataagaaccagctgatggttttttttccacaagcttcgtcgcaacaccgttacaccactggtcatcgtcaaggttcatcgccgaactgttacgccaatggtcgtcagcgaggttcatggcctccgcgttatagatagtatatatgagaagatgttattgcagcaggcaataaataatagttgccatgtatttgcaggataatgttttccatcatgagtgcacatgcatagagaacatcaggatgcctgcagttccgtatattgaggatgcagatgcaggggtgctgcaggaccatgttgaggatcacgatgatgctcttccacctgatctctcagggcaaatcgtggacgagcaagagtaatccggttgaagaggcattgcaaaaacaatagatgtgtttattttgcaaccagaagggacagtacagcaccagctatagatgcccaaatgggccgcccgaatggcacgggccaagcacggttgggctagtgccaagggaagttgcgtcggcatggcatgattggtacttcgtgccgtgccatgccgtgccagcccacgggctgcacgtcaggcccaggcacggcccactagcactcgggccgtgccatgccggcccgaaggcacgatagcctgtcgtgcttctctattaaataagtctatttttactccctcatctctctgggatgtgtcttatatggctggaataagtctatttttgctccctcatctctttgggatgtgtcttatattgctggaataagtctatgttgtatacctcatgtctttgggttgtatctcaaatggctgaattaagtctacaataggtccctcaactatttttctttggtcgtgtcgagccgtgccggcccaccgtgccgaggaagcaacctaggcacgtcatggctatcgggcccggccggcataagcatgacccagtcgggctgtgccgtgtttgggccgggccaaattgcctgtgccttgggcgggccgcgggctcgggccatatggccatctatagcaccaattgcccttctaatcttgagaatgcgtcaaaggccaaattttagtagatgtgcatgctagtgattccaattgccagatcattttgcattgtattgtgttgttattttgtaatctcttgtctagctcaggccttatcactttgataaattatttgtacttgttgatattttaattcctaaattaatgttattaaactcctctgtaaaaaaaatcatatgctagatactcactccgtcccaatatataagggatttcggacggatgtgacatttactagtaatataaatctagacaggctccgccatattgcaccatattgccatgccatgaggtactaccatggtaccgcaaagccagaaatcgtgatagaacccttcgcataactccccctaatcaagcgcaccacactgcaggttttgcctccacccctaaaaacaaggtgggaagcccctctattaggggtggcaatttccccgttggggccggggatccggcgggggcccgcccctacggggacgggggcaggggagaattctgacccacaggtgagtggggacggggccccacaaacttccggggatgggggcagggatcggaattaacccacgggtgatccggaggggccccagatgtgaggtacttctcttaaagtagctcattgcaataatatagatccaacaaacccattcaaaattgacaaaaaagctcaacaccctagttcccctcaaccataatacctttcctttcttcaaacaacccacacaaccgggagctattgaaattttatcataatattattcagtgtattgcaatattttataatgtattagctccatccgggtaacgccgggtcgcggtcacccgctaggtcccttgtgggggcggggacgggtgatgtttttcacccgacttcctttgcggggctggggacggggatacccgcatgagggcaagggcgggggcattccaacccaacccggccccaccctgccccgttgccacccctaccctctgtgccacaatgaatccaacaactacttaccccttaaaaccggggataaccaaactccatcagcccatgttcacctaggtacattagaaaaggaaaagatatactacaagtccagtagtggacttgtagttgcccacactagcttgtggtaagcacgacaagtctttcaaggatttcccatgaaccggtctttaattgccatggtgtgataataaaaaccatgcacccacatcccaccattaaaccatattttagttgaagaactacaaccaatgaaacatggccaagtgtgttgagctcacagctcgtcaatatactagatgtaaagaatgtgattatcccagtagtaattaagcatggctaagcataacataattctagctaggtcaagacaagtgacacaagcgagttaaattatcatccaagttatcaaggaatgaatatccagtaaatatggtcacaagcaagcaatccataccccatgtaattagcaaaatatatattttttgcaaaagataaaaccttttataaagtaggctcattatgctcaaagtggaacgcatgacttgccttgcttcttcatgttggcatgcaaaacagggaaacacactaataaaaccaagtaaacaatacatggaaagtaaacaaacatgtatagctcaattttaaaagaattttgcaagttgaatggcccaacttggagttcgtatgaattagatatgaattttagaagtcttgagccatttaaatgtgtttatagaattaaactccatttatcgtgtaattattatttatttctctaaagtaaaacaagaaggattattgcgtgagcagaggacgggcgtggaccgagtccacaaaaagtgggccccacgaatcagcagctcaaacggagttgatccaccgtgtactgagaccacaaggtggtccatgggactgccatgcgggcccgccacgtcgatggttagggcgaccacaggcatgcgcaggcacaacagattggcagctagcgccagcctgatggtcaccacaggcgaccactcgacacggcggcggcataagaggcggcggaagggacggggaaaagggaaggggcctcaccgagcacccaaacaaggaaggctgcggtgcgcggggctcggcgacggggagatggcggctactccgcttgtggtagcggtgaggacgaagattcggggctcccggcgtagacagaggggcagccgcggtgcatcggtccctggggaacaatggagaatgggctgggcggacttggtgagaagggatggcgagaggccaggaagaatgggtgaactcatccgacgtggtgtcaaagggattccggtgacgaggagcttcgaggaatagggtgcccggtttcctatcgccactgcgaagccagtgaggaaggacacaatgccggaggtggcctggaggctggagcagcagcgagtgccgaccaaaggaggagaaagcggcggtggcttcgggttgcaggaggaggtggcgcttcggcggtgttcggtaaggcggagcggaggccgagttgcctcttgcggtggcggagctaatggtggaggcggcaactccaatagcgggaaattggagatgggacgatagtgaagctctatatagctcgaggaagcagctctaaggccgggacgaggcggataggaggagccggacgtccacggggagtgggggaaggcgtgcggcgattgcattggtgtggttcgagatgcgagggcgggaacagggaggcgcgctagatgtgtgcgctgacatgggggcgtagccggttctcccgacctgaggttggagaagaaaatggcaggtgggtcctggtgccaccagttagtcagagagggagcgaaatagacctcgcaggaagtagggggcatgtgtgggccgtcggaaggagtgggcccaacatctccagcagggaggagggagagagggcttcggcccgtggggaggaaggaagggaaataaacttgggctggaaacagcccaggacagagagggggattttaatttatttttccatttttaattaattgatgaaatgaactttgtgttattaaaattaattagtgagctctaaaaattcaggagaaattccaaagagtaggagaatattaaaaaaatattcccagttatgatttctaaaagaaattttatttcccacattaaaatcacttgataaattgatggaggcggatgcggacgatttacggcacaaatcaacaaagatggacgaactaggctagaactaggtaaaaagtagatgcaatattgaaaaaaagcgattcaattggttaaattggattgagattagattgttgtttcaattgaaccggccttgtcccatatacaggggctggtcttccctcctacatgttctcctctatgtcaaacttgggatagaaactaatggaaacccaaaacatgccctctcaagtaaggaaatccgatatccgacaaaaacatctctgaatcgaactctatcggtcgaccagctacacttcgctggttagaccggctcatcacgttggtcaaaccggcccatatacgtacggtggtcagaccggctctgtgaaggaaaccgacgcctttcaaattttggtaatgtttttctatttggaacctaggtgtcaaatttgggtgtaaacattattttcactgctagttctagtcaagtgattgttatttttccttgataaaaaggagtaccttttgtatgtctgagtcgccttggttgatttcaatcttcatcggcatcagctacaatactaaaacatctgtgcatactcgatagaaaaacatcggtgcatactcgatagaaattgcagattaatgtagctgcagctatgcggagtcttgaacatttgctttgcttgtaggatggcatttttacgtctggaaattttaaatttatttgaattgtgttgttcgaaatttcaaatttgatatggttgcactctagtctctatacattagaaatatttatgtttgaatttgtgcagagttaaactagacgtagatatagtgtacattgctggagatgaaatttttttttttttgtcctgaagaaatggaggtagccccatttagctcgtaggaagtttaaatacggacacaccaaagaagctgcataatgaaatcatgctatatgtggccatgtatattaaaaaatttcccaaaatacaatttaacaaggccgatgcagcatactaaatcaccaatcttgatgtggcacattgtaatgtttcggtgaaaatttaccatccttttaattacgcacctacaatgatgtctccagatatagctgaggtatttatgaaagacatgatgatgcctacatatcatggtagtgcacgcaacaatatattgccatcaatgtgatttgaaaaaaaacacaaaaataaaagttatcaccaagatagacggatacacgcagtaagggtgcatagctaggcgagacccatgctatgttgacatggtatatctaggtgggcccagctagccaacatgcgtagtagcaaagggttgtaggtgcacttttagcatcacctataagagaataataggtatcagacaaaagtgtcacgttgcaagaattgtgtgtgaaggtcggcgtggaggcatgataaaaaggcgtacatgccgaggtttgtattgcgtggaattaagactacaattgcactacaccatggtccactttcgccaacacacgattatgttggcaaaaggcatattcagcaactacacaactgtcggcaaatcctttgccgacaattttcaccatagtcggcgttgcagcagctggcaaaagtttgttgacagttttaacatttgccaacacataccctgaaggctatgatagctatctttgccaacagataaatttaccttttgccaacacttcatgtttaggggcacaatacttttgccaacagacttttggttttgcaatatgtaacataaagccaaaagtatttcaaataaattaatttcatcgagttataaattaatattcgtcatagcactggtggagaaagcgtttgtagtctcggttcgtaaccccctttagtcccggttttcaaacgggactaccaatccgggactaaagatcactatctttagtcccaggtgaaataaccgggactaaagatcgaactgacctttttttttttgcatggccctgttgctgtatataaaccatgcatatagtttcaatacatatatatgcataatatatatatatattatatttatatatgtttcaatacatatacatgcataatatatatgtatttatacatatatatgttatgcaaatgcatatatgtgtatctctctctctctctatatatatatatatatatatatatatatatatatatatatatatatatatatatatatatatatatatatatatatatatatatataagaggaccactcttatgtactcccaggtgtacatactctctcttccatattggatctaataggatccaattaggacctgcttagctggtgggaatttttttttgaaattcctgattttcagccgaacagggaataagccaagttaaaaaaaattaagttgaaaaatatccatgcatgtcggcatggtattggttgcacgcctgtatctacgaatttgaaatgtagtatttgtgcacctagctgtagcatggaaattcatgacttatattctgttttattttagattaggtatatacttattttttaggaaccagtatatactatatctctgtttggaagattatataatttttatttgatgatccagtatatactaaaagctggtttgagaagtatatactacttaatttaagactattagtatataccgttatctttagagtctattagtatctgccacttgttctagatttgtttaatgagcatatactgttctatctttttttccgtatgtaaagagtcagtatatattgcattcctcattgaagatctctttgtttagtcagtatatactacatttctcgttaaatgagtatatacacattatttcgttgaaggagtatactgctcctttggccagtatatactacgtttgtcattgaagtttgtagctctctgcttttggtcttttgcggcttaagatacgtggagtaatttgtttgaatttcctcattccaaatggcgaccgttctacaagaaaatattaaaatattatatcagcatcagtaagaaaatatttgactcatcaatacatgtaatacgagatagaaagccttaatctctgcatcctcgctgacatatcagttagtaggcatcctcgctgacatatcagttagtagggatcagagagacagcgactagtagtatataccagtgtttctagagaacaagtataaatcacttgttttagatttatagatttatagtataaaccacttatctaaatttgtagtgtgtactgaattttttgttgaaggagtatatactgttcctttttttgggaatacgtactattcttttctctcttttttttcagtatgttactacttttttggtgtaaaaaagcactatattgaaaaagtccagcatatctatggaaaattcagtatatacttttgtgtaacaaagttcagtatatacttgaccatagaaaaattcagcatatagcactccatagaaaaatgcagtacatacaaagtccaaaaatcagcatatactcctctattgaaaagttcagcatatttatggaaaatgcactgtatactagtctaacaaagtgatcagtacatacccctccaaagaaaaatacagtatttaccactccatataactacagtatatacagagcatgccgccatccagcatattgttctagcacgccaccatccagcacattgtgacgagatcgatctggtcacagcagttggcatcgatcgttgccacggcccgcggcccctgcgtttgttgatgcatgtgaaatcaaataaaatctgatgcatcaattatgatcgacacaatcacctgaccggaattactgctgcacgggcagcacggcctgtatgccagccgatggatcgatgccgtcgtgtcctggacgctggccgggaagcggcgcgatggatgacgatggcgccggaagcgcctgtttctaccaggcaaatcctggtagtctcgttggatgatgatcatcagttggagggggctcgccgttgccgatgctgtaaaagctagtggtgtaggggtgtctccagcgctgcttgttgccatggttgtatgatttcagcgagccgatggattgtgtcgtcatcgcctccggcttgccgatgggctgcactgtagacaccgatctagtcgtcatgacgtggccgtggactggatgtcgatcgaatcgtcgccgtcgatgccgagttgccaacagatcaccctgccgaaaatcctcgatggatctagaagaaaaagagaaaacagggtggacataccagaatcaatcacctgggaattgatcaagccacccgcaggtggacgaactgcattgccgccgtggccgtatgattcgatggatcacgtcggcgtcagcgcgtcgcctccaaattgaccgatctattatttgcagtccggtttagcagtaagtcagaaagagatatttatgctagcatcttggtatggttacggttaatgcgggataaaagtattatgaggattttttttcgtccgcaaaaactttaatgggtctgtatgtggattcgttagcaggttcgatcggtgatgtccgctgatggacggtggatgagagcaggagtacgtacacctgggtgtatagaattattttcatatatatatatatatatatatgaaagcacttaatattttatgtgcatatatatatatatatatatatatatatatatatatatatatatatatatatatatatatgactaaaatatatatttacattaaagaaaatgtgtacatgtatatagaaaaatagatatgtattaattacaatccattatgatgtcctagctagctacgatttcgacgtagtagtagtcgttatcttagaagctaagaacctatgaattgtattttcgtcgtagtagaattcacccttgggatcaaggatttgttcattgatgaatcccatgagttgttcttgaaccgccacgataaatttcttgtgtgtgatcaggttatccctcatgcgaataaactatatgaatgtatgaaattaattagtaattaaacaacaaatcgatacatacgcaatgaaattttgaatttatttgtacgtacatcgagctctcttgtggtgatgatttggtctgcaaggcagtggcaatactcgcacacatagtagccgcataagttagttccctgcttttgctttgcgcactataaataaatgacaaacggcgagagatctaattaatatacacttatatgtatttgaattggagattcaatataaatgtagagcatgtgtactcactggaaaattaaacttctgcctaagtctttctctccatttgccgcggaccaaatgacggaaccgataccaagccctagatggagtttaaagctatgattcatactagcaattaattataacaagattcttaattaacataggaaattttgacagtacctgtctataagttcgaaaaccttgtcaaacgtagactcttttttatccattgagccatatacattgacggtgcaggcctccaagtcgaagagtaaaaggacccagtggaatctgcaatgtgcgtcggatgcattacatatgaaacacttagtatgttagtacggggatgaaatttggtataggaagacagtaaaaactaactctgtgttgtacggcaatagtatgaacgtcttgtaatgctgcgccttcaggagatggacgagattgtcctctgtggcttgcggatactggtcgagcattgcgacgtttactttctgagggtcgatgaatccagtatcgaaaaccccccgccgtcgggccctttgaatctccattctacaacgataaaaggaagtatatattatatatagtctacttatatacaaggacctaattaattaaaggaaacgtaataagaaatctaactgaacgataattacaaaatccagcaactcataatagagacgtcgagggcgtccagctggtatagttcatagacacccttgaaattgatccagagaatatcatctccttgcaagaagtctatgtccctgatcctcgctccgatcatctctctaccggtggcgctcatctccatgtacagttgatggaatttgtacatttgtgtgggtagggactgcagctgctcaggcttgacaggcgtccatgctctgtgatcctacctgccccgttgaggcgcagctgctacgattgcctgaagggctcaccattgcagggggaatggtcggctagggatcatgggaccgatgtgcggccatgcgttcatcaaccttccttgccacctcctcttgcatgctgagctcgtagctcgataccctgtactcaagatctgcaatcttcgcctcggtatctctcttgctcctcatccgactcctgtacgtgtggatgtcctccttgaatccagtcttccaaggaatcacccctttccctcgtgttcgtcctggatgctctggagtctgcagggcgagtgacagctcgtccttctctctgtcgggtcggaacgtgccctgagaagaggcttccactgcgtccgttagtcgacgcacagcctcgcgtatctgatcgctgaagaccagggagccatcaactgggtttagcgttccaccatgagcatagtaccagaacttcgatcgatccggccatttagcggtggccggttcgatacccctcttaagcaagcttgctccatctcctcccacttcggcagcgcgatgctatagtcgcctgaccccaagtagtgatggtacttcttcttggcggcattttctttgtttctttccatcatcgcctgcccttgttgacctgtcttttatgcaacgaactcgtcccagtgatcccttagctttgggaatgtgtcaaagttcagtgtctgccccttcaggatatatttgtggtacaaatctcccttgaagctctgaaactgttctgccattttctttaaagtccaccttttcactttgttctctgtacccgcggaaaaggtgaatatctcgagcattgtggtccacagcatctctttctctgaatctgggacaaagctctcattatctccgcgtgcccttgttctgcgccagtactgacaggcacgttatcccacacaacccaaccgttgtgtcgaacgtagttcttggctgcttctgccggggcactaggtcggccgtcttcgtccacttccgttatgatgtgccaaccctctagcttcttcgcggcacctcgttgcccgcgtgccctcttctgtccagcggagggttgacttccactagcctcctcctccccgttcccctcctggttcccctccgcatccctctccacgttcccttcctcgttcaagttctggtttggatcctcgttcccctcttcttcgttccagtactggctgcttccctccgcgattgtatcgtacagtatctgttcctcatcacgatcagccatctgttcatagaagaaatagttatatatgctaagtctaattgtcgtatattagaaccctagacaatcatatatcctaagtctaattacaaatctaataatcttatattaaaactcaaataatcgtgtattaaaactctaataatcttatattaaaactcaaaaagtcatatatgctaagtctaactgtcgtatattagaaccctagacaatcatatatgctaagtctaattacaaatctaataatcttatattaaaactcaaataatcttgtattaaaactctaataatctcatattaaaactcaaatagtcatatatgctaagtctaattacaaatctaataatcttatattaaaactcaaataatcttgtattaaaactctaatagtcaactatgctaagtctaagtgtcgtatattaggaccctaggtaatcatatatgctaagtcgtctaagtgtcgtacattacaactctagataatcatatatgctaagtctaagtgtcgtatattaaatctaatagtcttaattgcattaaaaatctaacaatcatatatttaattacatcacttgcctgcgcgaattccttcgagagctaactaccactccggcttgagggacgacaacgacaacgtcttttctgcaacatatatgtcacagcctgaattttcgttttaggatttataaattatctaataaattattaatagaatttatattaaatgttctttaatttacaagtgaagttaaatgtgggatataaaatttcctaaatataaagcatggatggatttaatttttattaaattctccatgattaattacactctctgaaattttctcggatttttcagagctcaattcctaaatgatacaaagaacagttcagtaattagttaatcaattaatgatctaattataattatgttaagtgcttttcttgtttaaaaatccttaatttataaattgttgtctaaaaggaattattagaaattatcttaaaagcctagaagagaagatcgaatttttttttaatttgttaaatctcaatataaaagtgggctagaaaaaaaaatcattaaatactttacttgattctatagttcctagatttttctgggatttatttgagccaaggaagtatttttaatcaatagaatatcatttcatgaataattttaatagaaaaaggttttaaaatctttcttttggttttgggccgaaagtcagcccaagtctctctttctccctctcctcggactgcttgcatctggcccagccggcccagtccaccgcgcccctccctcctctctctcagccgctgacaggcgggacctacctgtcggggtcgtcgtcctcctcgagctgcccggccgcgcccgagccaccgccgctgcccttccaaattccgtcgcccctctctttttccggtcaaattgattgagggcaaatgatccttgagatctcctcttccttttctcttttggaaacatcggctaattttctttggaaaccggtggatttgagttggattcggattcatctctctcctctaaccctagactttccttctcgccgccggtcgccgtgggcctccgttgccgcctcctagccactataaaagcatccccgggacctcctctatccgccgccacctttgccttagcccgccgtcgcgtctagcgccgcctccgcgtagccctagctgtcgccgtcgttgccgtcggttcagccgcgccgcgccgccgttgcagccgccgtcgtcggtcgccgtcgccaccatcgggatcgcgaggtcgtcgccgtccccgtccaccgcttcgccgccactgtagcacgccggagcaccgccgtcaccgtcgacccaaagaccgccgctgcttcaacctcgttgccgtcgtcatccgtcgtcgtttgtcgtcgtccaagatctcggtgagttcgccgcgtcgccctctacccgttggtgtcctctgtttgcgtcgtcgcgccatcgttcaccggcgagcatgcgttgccaagctgccgccggtgatgacgtcatcgctgacgtcatcgtcgctgtccccgtagacccgctgtggaccgttttgatctcggccgcccgttttggatagaatcgatctcgggcgttcgtttccttagaccgtcctgtgcacccggtttaccgtggaccgcctttgatgacgcaataatcctcattttccttttcaaaaataattcattattgcgtcataattcaattaaaatccatataaatgctttaatccggtttaatctttaaaaattcatatctaattcattgtaactcggtttaatgtggttcaagttgcaaaagttgtgtaaaataaagatctacatattaaaattatccataaattgaattaaatttatttaattctttttaaatgggctttaattagatttaatctagtaaaattcataataaattcatatgaagttagaatgaggccgttcaagtctcataattcatctaaaattatgatctacatgtttttttactttatatgtattgtttatttggtttttattagtctttttctttgttttgcatgttagcttgtcgtttccgtcgttgcgaaggttcgtgagtgcgtcgggagtgttcagaagattaattgaacaccgattattgcaaggcaagtcacacagatcctaaacacaatcctttgagcatgttgatcctatgtttaaattctctatttatttcaactgtgcatttattttcgaatgtcactgggtggtgtgaatctattcctttgttatggcctgtttgcattgattactctattccttgataccttgggatattataatttgactagttgagctttatatatattggttccactagatgttagatataattgcttagccatgtttagaaacattagctcactaatgggatgaaccatatatattacattattatttatagttatatttaatggtagctcacgatggttaatcgtgttatgataattaattggtaattaaaatatgattaatggtgggttgtgagcacatggttttgaaggtcgtgctcatggcaattaaggaccagttcgcgagctactgttgtgaaacattaaccgtgccaaccacaagccagcgtgggcaacggctttacattttgtatagcatggttcattgcggagcaccagactgagaagtggcggagataagcccacgggggtcgctggggagtccatgccttgtttataagggggtgattatgatccaggaacggtgcactgctttgagttgtgttgtgcgaggggtactgtcacagctcctttccgaggtaccgtggtggtattgaggcgcatggtgacatgttgtggggctgtgtcttgtgggtacagtggtacacctctggccagagtaaaactattcgaatagccgtgcccgcggttatgggcgggttgagcaatgtttttcgtgattagtctcacacctctcacaataattattgatgctataactggtaataatttgtttagcttctggtttggagttagatctgtacagccgggtatggttgttcaggatggttgggcctgtgcagcatgggtgtgctgttcagtgttgattaaaatttctgattaattactctactgttttactactcttaactctatgctaaatgctgcgctctatgctaaatgctgctttcgcaaatgagactatattatgccatcctttggtatccttgtgcacttgcatatttgctgtgtggcttgttgagtatgtcatatgctcattcttgcaataatcaatcaacctcagttgaagaaaaaggatccagaaggagaagacgtttggcttataccctagttgagctgcctgtgggagtggagctgaagccatcgctagaccgttaattccgctgctgtttttcttttcttttgtaagtatgtaacgttattattatgatggatttgtatattaaattgtcagtttgtgtacctcggctgattcctggactaggattttatgcacaaattagttcggaaattattagtgaatttccgggcgtgacaatataaaaaaatgtattaggataaacacaaagtaacatatattgtatttcacattcgcgttctcgttaagttcacgtttcgttcacgatcgttcacgtaatcgttcgcgttctcgttaacgtacgctaagttcatgtgcctatcacgtacgttcgttcgttcacattaacgtacgttcgttcgttcacgttaacgtacgttatgttcacgttcacgttcacgttcacgttcgttcacgttaagttcatgttcacgttaatttcacgttcgttcacgttcacgttcacgttaagttcacgttcgttcacgttcgtgttcacgttcacgtacgttcgttcgatttctcattcacgtacgtttcgttcgttcacgtacgttcgttcgttcactttcacgttcacatatgttcattcgatcacgttcacgtacgtttcgttcattcacgatcgatcgttcgttcacgtggcggcagcggagcggcggcgtggcggggcggctgcggcttggcgcggcggcggcgtggcagcgcggcggtggcatgccgcggcggcgtcggggcatcgcggcggcgtagtgtggcccggcgtcgtcggcactgctggcgcgatgtcgtcgccggtggcggccgcatcgaggtcggggtcggcatcgtcgagaagcagagtcgtgttcggccacgacgatgtcgacggcggcgtcggcaacgaggaggccggcggcggtttggggagagagagagagagatcgcgaggtcgtcgagagagagagagggaggcggcggcggctctcaccccagagatgcggcggcagcggaggcggtggaggcggcgacgacgacgcccgcgagacgacggcgagatacgacggcggcgttggcgcggggatgccctaggcagtggcggcgaaggagaagccgagagagatcgatcggggaaaaaacttctaagtgttggtggagaagacgagaatgcgcatcgggaatatatatacccctagatctttagtcccggttcgtaagaacaaccgggactaaagatattttcccgctatttccaaattctttttaaacccggttagggttaagaaccgggaccactgataaacgcaatgaatattgattttcattacatatgtgtttctaaaatagaaaataatacattaaaattttttaaagtcgaaaaattaatgacaattactttgaaaaattattgttgtctgtagtaaattaagtggataaaacgtaataatcaaatatatgatttaaaattaataaaaattctaataatcatatataattagcatatgcatgatattaaattgttaaaaattaaactttaacatatgtacgtaccacatgcatgattcaaaattaataaaaattctaataatcatatataattagcatatgcatgatattaaattgttaaaaattaaactttaacatatgtacataccacatgcatgatttaaaattaataaaaattctaataatcatatataattagcatatgcatgatattaaattgttaaaaattaaactttaacatatgtacataccacatgcatgatttaaaattaataaaaattctaataatcatatataattagcatatgcatgatattaattgttaaaaactctaattaacatatgtaaatgtcacatgcatgatttaaaacttttaaaaattctaattatctcatataactggcatatgcatgatttaaaattgttaaaaattctaataatcgtacgtaattaacatatgccatgcaataattgatttatatggataatcaatacattcaaaatagtttacattgtgtacacaataattacggcaatacatcggcggtgacggttgaccgcacgtactttctcctcactattgttccctccttgtgatcgctacgtgagtaaggggtgtttcatttgataggaggatgctagggtcaatcgtcaccgtgacgcttcggctcgtcaggccctctgcccattcaactgatcataatcctcatcagtcttgtcctcaactccgacgatttttcttttgcctgggagaaccacgtgacgcttcggctcgtcaggccctctgcccttctttcctttgctagacatgtccttcacgtataagacttgcgttacatcattggcaaggacaaaaggtttgtccgagtatccaacattgttaaggtcaaccgttgtcatcccactgtcattaatcgttgcgcctccaccagtcaacctaacccattggcaccggaacagagggaccttgagaggaccatagtcaagttcccatatgtcctcgatggaaccgtaagacgtgccagttgttcgatcgtgtcccatggcatcgatacgaatagcgttgttttggttcgtgctcttcatgtcttgggctctcgtgtagaatgtgtatccattgatctcatatccctggactgtcgcgatcgagccagatggtcccctcaccaggaaggccagttgttggttgatcgtctcgttaccaatgagatgttgccgtagccatgcggggaaagtatcaatgtgatgccgtgtaatccatgcatctgacttaccgatgtttctggcacgaactagagccaagtgctcctcgatgtaaggagctaccaatgaagattgttgcagaaccgtgaaatgggctttacggaataaattgttgtctaccatcattattgctttccttccgagagttccctttccccgtagtctcccttcatggcgtgattcaggtaccccgattgggcgaaggtcttcaataaattctacacaaaattcgatgacctcctctgttccatacaccttggtgatgcttgcctctagacgagcacggttacgaacatacttcttcagaacgcccatgtacctctcgaaaggaagcatgttgtgtaggtacacaggcctgagaatactgatctctttgacaaggtaacaaagcagatgcgtcactatattgaaaaatgaaggtggaaatatcaactcaaaactgacaagacatttcaccacatcattctaaagggcttctaatctatccggatcgatgaccttctgcgaaattgcgttcatgaaagcatatagctttgttattgttgcccggacattgtctggaaggataccccttattacaactggtagcagttgtgtcatcaacacgtgacagtcatgagactttaggtttgtgaacttcttctccttcgtgcttattattcgcttgatattcgtggagtatccagacggtacctttatgctctccaagcattcaaacatactttccttctctgccttgctaagagtgtagctggctggactcaagtaatggcttcctttctcctttggttccaggtgaaggtcgccgcgttgttccatatgcttcagatcattacgtgcttccagtgtatctttcgactttccatatacacctaggaagccaagaaggtttacgcaaaggtacttagtgaggtgcatcacgttgattgcgtggcggacgtccaagaattcccaatagggtaactcccaaaatatagagttctttttccacatcgccgcgtaaccatcttcgctctctataggctggcttccaggccctttccgaacactactttaagatctttaaccatagcaaacactgttttcccgctgcgatgtttaggcttcgtacggtggtccgccttatgttcatagtgcttgcctttcttctgtaccgagtggtttgtagcatggaatcgacgatgacccatgtacacaaccttcctatagtgcttaaaatacgtactttctatttcatccatacagtgagtacaagccttgtacaccttgttggactgaccggaaaggttgctaactgcaggccaatcgttgatggttacgaacagcagcgctcgtaggttaaactcctcctgtttatcctcgtcccacatggggacaccttcctttttccacaacagtttaagatcttcgaccagtggtcttaggtacacatcgatgtcattaccaggttgcttggggccttgaataataatcggcatcattatgtacttcctcttcatgcatagccaaggggggagattgtagatacatatcgtaatgggccaagtgctatggccgctgctcatctctccaaaaagattcatgccatccgtacttaaaccaaaccatatgtttcgtgcgtcctttccaaagtctttaaatttcctgtcgatgtttcgccactgcgaaccatcggcggggtgtctcagcatcccgtcctgttgacgctcttcagcgtgccatcgcatcattctagcattccccttgttcctgaacaaacgccttagccgtggtattatagggaaataccacatcaccttagcaggaattctcttctttgttagctgcccgtcaacttctcctggatcgtctcgtctaatcttgtatcgtagtgctttgcaaacagggcatgcttctaggttctcgtactactcaccgcgatataggatacaatcattcggacatgcgtgaatcttctgaacttccagtcctagagggcagactatcttcttagcctcatatgttgtctcgggcaatttgtttccctccggaagaatgttcttgacgagtctcaattaatcgccaaatgtcttgtcactaacaccattttttgccttccattgcaagaactccagagtggtatccaactttttgtgcccctgctcgcaacctggatataatgacattctgtggtcctctaacatcttgtccaatttatgggcccccttttcactttcacagtcctccttggcgtcttgcaacatctgaacaagatcatccggaacgtcgttaccatcagcatccctttcctcctcgcccgtttgatttccttcaaatccagcgtactgagcaaagtccggaatattgtcatcttccacttcatcttcttccatttcaaccccttgctctccgtgggatgtccaacagttatagcttggcatgaagcccgactcaaacaagtggaaatgaatagtcctggatgcagaatactccttctgattcttacacttatttcatggacaacaaataaaacccttatgcctgttagcttcggccactctcaaaaaataatgcacgccgtcaataaactctttggaccgtcggtcagcgtacatccattgccgatccatctacatgagataaaaaaaatcgaacacaaataattattcgtacaataatgacagtcataagataatacaaactctttcaacagtcatacaataatgacatatcattaatatcattattcatacaaaaattataaaatattacaccaaataattcttatttactatttctaaagttttaaactaatattaatgtgttgtacttcttttaattttcattttagtttgttttctattatttaatattaactttcactatattttccttctcaactattttataaaaccttctttagcaaataaactaaatttctatatattctttcttccccacacaaattttctctctcatcaacttacaactaaattttggagacaaaaaagtgtgcaaaacatagctccaaatgtaatatgacaaaaaaacattggaggatgaagttgctaaccttgtaggcacctccgatttgtatataatcaccaaaataaattcactagaaattttggcatgacctcccctcttttttgaagaaattttgaagcttgctcgggcagctggaggaggaagaagacatatatatatatatatatatatatatatatatatatatatatatataggggtgtgactttagtcccagttggtgttatgaaccgggactaaagatcccggggggcctgacaagccctgacagcatttgaaccaggactaaagatctttagtcccggttggtattaccaaccaggactaaagatcaaatatacccgttacccttccaggtttttattgcaatcgggactactgtggaattcggccgaccgacgaaagatggtttctccaccagtgtagcccatacatccacaagcattgtacatatttcaagaatacatttcaaatatcccaaggttacattcgttcagttatgcttttcaaatgctcaccaccttttcaattatgagaaggctaaatttgtttttcaaaaataatctttgctatatagttagttttagaattctttttacccatgtttaatgagtaatccaacaactatctcactgaccatatcaatgtttaaaatgacacactggaggatctatatgacgatgattttgcatatttatgtccttccatccataccttaaggaagaaccgaattttttttcaagtgtaacaaaatcatgtgatttgcggccgtgtgtattcaaaattttcccgaaatgcaattttagaagacacactctaatttcgtttaggctgcattcctagttacgttcattttgagtagattgggagaaaaattactcgtttttcacgcgcacactttctctctcctaaacgatggtttattgcaaaaagattttactttaaaagtgcatattaatatatttgtaaatctaaaataattaacactcaattaatcacaacctaactataactcttctcgttttacgtgtcatcccaatctttttcattttccccttccaaactccacctttacccacactgcaaaggtgcaaacgattttgaacatatatatatatatatatatatatatatatatatatatatatatatatatatatatctaatttgtatacaaattagatgagtttgatcacgtgaatatatattaaaatctctacttaaatctttatttttaccacttgttagatctcacttagaaataagtatcaacataataatagttattatagtatggtatcacttgttatggtatcactcttatccttatcatctccttcctactggcgagagcagatcgaggagcgagagcgagcgagcgaggctggcggagggcctgcgcgcaccggagccgggagggcaggcggccgggcggcgggcgacggcatggccgtgcgcagccacgcgcgatgggcggcggctggtggtgggcagcggccggcggaggacggcgaccggcagtgtggccgcgctgcaggcggcaacctgcgcctctaccggaggggaggcggcagcggcatggatttttttttaagaattttttattcattgcatggatctgagatgtatttgatatgtatgcgatgtgaatacatgatgtatttgtgatgattttttagaaattgtgatataatttttttagaatttgtgatgtatttggagatgatccatttgagaatttggaaatatatccttttgttctgtgatatgtaatgatcgatttagagatgatttgaggatggagtgaaatcaatatttaatgttaaaaacaataaaaaatagcaaccagacctagcctgactctatctttatttttaatctcgattatttcacccaagactaaagatggatatctttagtctcggattcgtggctctggttgcataaccgaaactataagggaggtaccaaccgggactgatgcccctttctccagcagtgtacagaagaaacccacaacctttccacccgacgagtgatagttttgcccgttaagagacatgtaaggataaaaattgaattatacattgctcctaattaataaagtaaatactcgtcaggttccgggtttcaggccccattgtcatctctaggttggtctatcctactaagagcaagtataatagtaggctataagccggctaaatgctgaggtggaggagaaaagagaggagagagaggagaaacgggctgtaaacttacagccggcttggacacaagaaccaagaaaatctgtgaaagggacaagtgggccctatattaattgtaaagagctaactattatatgggtaggctaagagaaggctgcaaagaaccttatagccaacaggtcagctgtattattagccttgctctaacatgctaatacgtgtggggggagggctgtgggcattgggcattgagcatatcacacaccaaaggagtacttttttttttgagaaccaccaaaggagtacttggggtgggtgcagaggcatgacataggtgcattcatacagagtttggattggtttgcgtggagatgaatcgaggatgggagagattgtaacttcagaccgcgcatatggtgcacgacatttgttcgcatcacgaacaagtgatgttttgaatagggtgaatagtcaaagtggtcctccaagtttcatctgaggctcagtttagttcttgatgtttcaatctatccatattagtccttcaagttttcattttagttcaaacttatccttgaaccaataactctcttcataaatgacacttatacccctcatcattcacatatataagagaaaaattgcatgtttgaattttttatagataatacatagtatattatgtaaaacaaaaaaaaattatgtactaacaagtgtatacgatagcaattgcttaagtttcatgtgcacatgttgaaataatgggaagtacatctgtaatgttgtttattcatgttggctttctcttttctagtatatagatgtatacaaattaagggcaaacaagacattttctaatagaagtattgactagaaatagccatatggcatattaagtggacccaatgatggtttcaagccaaaacaaatatttgaaggacctatgtggacaaaatgaaatatgaaggaccaaattgagccttcgccgaaacttgagggactaaattagctattcactcttttgaatacgtgcagtttgcaatgatattttttttatatttctaattcaacttttaaaaatgggaagactatagatttgtcttcaaaatagtttcaaagtgttataatttgcttgtatgttttcttaggttttatactaatattactaattaataatatccaggtgaccatgtcaatgtttaaagggttaaaacgccacctatatatatatgtcatgacaaaaatatatgatggtggtttgtcatatttatgtgcttccatgtggccatgtattatgtatattcgaaaatttcccaaaatacaatttaacaaggccgatgcagcattctgaattaggaatcttgatgcagcacattataatgttttggtgaaaattgagcatccttttaattgcacaggtacaatgatgtctccagatatcgctgagatatttgtgaaagacatgatgttggctagatacatgcatgtaccaatatatgccaacaatgtgatttgaagaaaaaaaatacaaaataaaagttatcatcaagatagactgatacatgtaacaaaggtgcataactaggcgtgacccatgctatgtagatatggtatatctagatggacccaacctgctaacatgcgtgggagcataggcctatagatgccccttgagcatcacggataaaaggagccgagcaagagtgccccatgttgcaagagttgtgcgtgaggtgggcacggaggcatgatatagaggtgtaagtggctaacccgcgaaacccacttataagctaaaataagccgcgagcccgcttattagcctataagtgggttcgcggctgacccacttacacccctggcatcacatgatgacaaaggcatacatgcggaggtttggattgcgtggagataagacttattgggcattcgttccagtaacaaacaaaagatgcttttcaaatactcaccaccttttcgattatgagaaggctaaatttgtttttcaaaaataatctttgctatgtagttttagaattcttttcaccaacactatattggtaatccaacaaactatctcgctgaccgtatcaatgtttaaagggaaaattggaaccatgccattataattttgtaaaatttgagatatgccatcctgacccacatgtcattgactcatgtgggttctacatgtcattgagataccgatgacatatctcaaactttgtaaaattataatggcatggttccaaattagccttgtttaaaatgacacattggagtaagaagcacttctcgaccagcatatatgatgatgattttgtatatttatgttcttccatccataccttaagaaacaacggtatttttttctagtgtaataaaatgtggccgtctgtactcaaaattttcccaaaatgaaattttaaaaggcacactctaatttcctttaggctgcgtttctagtgtagttcgtttcgagttgaccctgagaaaatttactcaatttttcacgcgcacactttctaaactctcctaaatgattgtgttgtttgcaaaaagattttactttaaaaatttatattctaatacctaattaatcatactctagtaataataattcttatcgatttacgtgtcatcgcaatatttttcactttccccctcccatactccacacctttacccacactagaaacagttttgctagtcccactccaaaaccatattgccctagcgaaacaatcaaacggtccaaacccattgggcccccaccaaccaacccccccttccctccgaccccatgggcaactcccgccgccccgccgccgcggccaccgctccgtcgccgtcgccgccggcgtcggacctggaggtagggttcgccaagcttcagggggaggacttcgagtactacatgcagacctactccatcgtcctcggccgccacagccgcaggaggaaccagcccgtcggcgtcggagtcggcgttggcgtcggcggcggaggcggaggcggaggcgacgccgccgcggacgacgtggacgtcgacctcgggatcctcggcggcgggatgaacgtgtcgcgccgccacgcgcgcatcttctacgacttcccgcgccgccgcttcgcgctcgaggtgctcggcaagaacgggtgcctcgtcgagggcgtcctccacgagcccggcggcgagcccgtcaagctcgactcccaggacctccttcagatgggggacgcccagttctacttcctcctccccacccgctccgtcttcgccaccgacgccgcgcgccgcgcctccgccgccgcccggcgcgctgtcccgccgcctccctcctcctcctccgacggcgatgatggggaggaagaacgcgaagcggcggtggctaagcggccgaggaacggagacgccgggtctctcgctggtcggtatcagaatctcgcgattcttcatttctatcggattattattatttatcgctgttggattgtgcgacctaacattatcttatcaaataccagtagaatttgattttgatatgttacatatcttatcctcatagggctacttgcaagcgtcactcaattccgttataaataagatacaaatacatttggggatacaggggggctgcttgtgtgttactgtggcaattgggtggtttctgggtggaactttgcttcctgtttgatttgattggataatacgaatgactgcttctggtttcaggtgaaaaatgaaaaaggttaatggacacggttttgaatgtgtggtgatgcaaaacaagaaatcagggtgttcgttaagtttttgctaataatctaatttgctatttttttgtgcccacaaattcagtttgctgtgggcattatgtttcttttatgatctttgtaagaacctatttgcttgcctgctgcatattgagtttgcagtttctgatcccgtgccttgtgttgctaatggttctttatgtcttatcaacatttaggacttagaagacgtgagtggtgaaaattagcgacttatgcaagtgatttgttcactaaactgcagtttacatgtcattagaaatttataatatgtatgttgagcaatctaagtttgttggactgtcttttgcttccttcatggatacataaaagtgatatgcaatatgaaagttgcaggggatatttggataatagatttttgtcttattcatgcaaattttggttacttagttatgataatttgcatatgagatcatttgtcaatttttcctcttaccatttctttacaatattggcatgtgtagcttgaatagcatgtctatctataagctatttccatcatgttgcttttgtcacttcatttttctttgaattacgcaacaatcctctcatcagaactcttacattgatacattctttcctattttttgaatagcccattgtgttgattttgccacatttatctgttaaagtttccaggaaaatttggttctatcttatattgatttgtaagttatgttcttacctgagcaattcaaactctatgaaatctgatcttagtaattactgtgacaacctttagacgttcctgtgccttttaatttttatcctaggtttttgaatgcaatctactaaaggaaccacatacagttttctatatttttggtttttaaataatctcaacattgctatttcctttagttttagtatatttgtgaaggaatagttcacaggcttagtgtatcagtcttctgaaagggtggcaattcatctaactaatgcatttggatgggagtggttgaatagtagctaatgttaccaatttggcatcgatgaaagttctatcatcattgtatatagtactacaggacatatgctgatatcctttatatataagttcatattaccctcaaattactttgagcatgttgaaaataattaatctatttgggtattttgtacaggaaggaagtctgagaagggatcaaaaggttacagacaatcagataacctacaactcttgcagttggaagagaaagatgttatctcatcaacagctactgtcttatctgatctctgtggacctcaggaatgggtgcctatggacaggcttcatgaagtggtaactttctcaatcttttcttcattcctcttgacgaaatgatcacatgtctaaacatagcatttggggtttttttttctgtttgttacttaacactgcatgaattgataacaacatgcctgctcctgcattttgtttattcggctcatttatgaaaacgataatacatttttctagcatccttgcaaggtaataaactaaacttacaagataaaaatatgatcattctgtttttaacattctaccagagctaaacaaatggcggaaactggtgctttttcagaagaataaatatttgtaaaatttgtgctctcctgctaccctttcatcctttatccaggaaggccctgtgctatggtctatggcatcaccttacttgtccactgtccatattagcttatttatgttctactggtggcaagttttgaaagggataagtccttattagcccccttatctgtcacgtttgtctaaaagcaaccctaactccaacattgggtattagcgagaaaaaagaaagagggaacggagagaggtggaggaagaagatgaagaaggttgtcaatgacatgtgggccctactgtttgttttagacttattggctgacagtaatgtcacgctagcgtcatgtaggcaaaaatccactctggtgactgagtgtaaagtaaacggtttatggagttacctttcttttgaccttaattgaggctgcctaaatgttcagtgatagtctttctgacctgaattgaggctgccgcagtctttgtatattgcagccaacagttaaggaaaaatacttctcaggctatgctactctcctaagcctggttttcacaatatggctctttcatatatcttttacacatgaatccgggaccacatgtctgtaaggcactaaggcataggcaacattgcctgtcataatgcaactgatgtttcaaattttggggcacaaatttggccattttgtttgtatataattctccctcagttcacaatattggtcaaattatcctatttagagatttatttgtttgttgcactacacgattgccttgactagcatagcatcaatatatatgtatggagtactacttcacaattcttatttttattccagtaatccataagaataaattttgccaagatcgtgttacccaccacatgatgtagcttcttagtagtagtgaccagattgaattgttactcatctagaatcatcccttaaaatgatgggttaccagcaattcttctgatcacaaattaccagtgtaaaatcatttctcactgccttcttaatgacatagctgcataagttgtagaaatatgttccaattggtattttcggtttcagctggttgaacagtgcaggcttttagttttgttttcatctgatgattacagcataaacaatcattttgaaagaaatcgggctctgctagaaactgtatacttggtagttcaagttctttggttcttaaccagtactctcttggtttttagttctttagttgaattttgtttcagggatagtttgtgttcgtcttgcacctgtgctaatgagtttgtcataatgcaatttcctgtaatatgaacatcgtgattatgctgtacaaacttgttagattgttcatatatgctctgtccatttcgttccatcctgacgatcatactccttttttcagatgtttgagaaatatggcgacttgtggcaccacaacagggtgcggaaatatttgacatcagaagactggcccaagagcgaaactgatggtagaccgtggcacgggctctctctgctgctaaggaagtaccctgagcattttgtgataaacataagaatgtcaggggggcggagcattgagtttgtctctctggtttcgctgcaaccctgactagttcgtagtgagtcgcatcctgtgtgggacaagctttggagcgtatgtttcgctgctcttgtaaacagcaaaactgaagttagcaacagggtaggaaagaatcctacaaaggttttgtttttgttttctcggcggttaaattggtagatacatagagtgtagggcaattttacctgtgcattatcagagtgcgaaagtttacctttcatttctctcttttgttgttgttgtgtgtgatctgcctcttggtgtttaatcgctcggtgcctggtacatgctgagctgagatggagggtgttttcctgttccagttggtctctgtgagggtcagagcgcagtgttgcatgtgaagtggtcagcaaatggggcctaatttggcaccgttcacccttgccctgctaaccatgcgctacaatcttttcaaatgtttttggaaatcaattgtagcagtagcatgacggatagattgagacataggaagtggatgtcaaaataattacctaatgtctgcacactgattcaggataagtaaaaactccagcttctcaacaaaaagaagaaaaaaagatttcacatgcctgattttttttttattttgtagtcacataaattccactatagtaagatattttttgcagtgttatgtagtctgctatttcacttaattttactgcaatcttgttttttatatgtatttgaattttgtaaatctttatcaattgaagatttattttaagcataggtttgttgtttgacctttatctaatagaaaaggaattttaattagggaacgggggagtgatgtgacctgatgagagtggctagattggcatccatgttacaatttcttttagtcacataaattccactttactaatctaaggctatctttgggaggtgagattgggtacttcaccttccgcacacgtaaaacggagctacgtattttcttataatcaattaattattccttacacttccattctggttagaatcccgtgtttttcctgtttcttcgttttttattcctgttattaaaagaccctaaaggtacaactttatgtagtctgcaattttagttaattttactgcaattttgttgatgtatatgtatttaattttttataaatctttgtcagttagagatatatttgaagtataggtttgttgtttcaacttttcgtaacaaagaaggaattttaattagggttaggggcgggaaggcacgacaaccgctatgccaaatcctccgggtggatgagatcatccaattttcttaacatcaccacgcaggccagactgcgagtctaacaaaaattattccaacaaaatatcgtacagacgcgggcttaattgttggcaccaggattactcaatcagtggactcacagaacaccaaacgttggtacgatattttcagaatgatgctagaccaaacaatatgttggtcattaattatgtagcaattacgtacgtttatcaatttttcattgaattactggaacaagaagagaagtttagcaatctttaattaattatttaattgtttttttacttatactgtctttatataaaaatcacttttttctatatctacatggttactatttttagtagcaaaattatattttctaccattaatattccggagttgaattttatttatttattatgcaccaaaatagggagtcttttagaatcccaaatttatatttcctattagtttcaatccaaaattatacattatatgttgtacataaatagtgtcctttccaaatttattttgtttataaattaatacggaatgtttttaaatataaatatcaattttaatatgaatggctacatttattcaggaatttatctttctatctgttcgttcactaattttagagcattgagcatacttaaggcaattttaaattcgccttaaattcatcaacataacacagtaaagagtcacaaataacaattgcacaactagcaggaatatatataagcccaaaacatgttaaaaaatggtaaattttatagggaaatttttctggaatacttttgactagtgagcattgaagggggcaatactgctactactagtggctaagcaaatgcaaaatcagttggaaggggcactggcactaggccatgcttaaatgagcagccagctttcacattggtctcttgattattggtgccaacaaaattaattggtggttttcaatgcacacccatctacaacctccaactaccttcccaagttctggttggctggataatgaccagcaaaaattagtaatttacatatgcaagtttttagtaagaatgattcacagggtaacaatactcctactgctaactgtactaggtgttacaggtgttttggtggtttcggctgtttaattagcgtagctttagggagtgggatgatcttgaggtacttgtagtacattgttttttttttgagtaaaccatttttttcgatgttttatctctctttatcaatgaaacgagacatgacttatgtctttcttctaaaaattccaacagggagaagcataagaaatggccttttgacgtctcataggatttttttttctttttttacattgaatgtatctaactgattagaccgagaagcgaggt

SEQ ID NO: 7728 - DNA, 26122 bp, Oryza sativa
cctcgctccgctcctgcgaaagacggttaattaccaaaattctaaattagcgttcggtcaaaggaaaaaaaaaaccttctctcctccccacgaataatcctcctagcaacctcccacctcatcgatctacaacacccgaactccgttgcacgtcgcgcgtcacccagatctcggcgtcagggtcgtggacgtcgatttcgctcccggccctatcggcgtcacaatcaccggcgatgatgcatcggccaccacggatcaccgccgacaagagcagcatccccgtccagatcgtcagccggcagcaaggtgattgggttggtttttcttttatttggttggattctgcattttgaacgaaagctgtcaaattcttctttctttgatttggttggattcagaattgacaattcatcataaatctgagtaaaattgttaagcgatattacattctccataatttaattattgcaattgctaatcatgctctaaacaaccataatgttaatcgtgctcagccataatgcaagcaactaataataattcctaaactgacagtagtacctttgggtggcaaaggtctcattgatcactgatgactttattagaaagccgctatgctgctgaacaagtataaagaacaaaatagacacatcatcaaaaaacaaagaatctaggaaacacagtgaaaatctgaattcgagtgtagttccaagtcataatgcaccgttcctctacagagttaccccaacatcaaattaaaagtccttcaaactatctaactatatgcagtatattaccttgacgatagatcaccaaaacaatcacgaaatctgaaaaagtgtggaatctaatttaataattacaacattcttaattaacatttttttataccctcaattagtgttttgttagtttaactaggaagcaagcccacccagtaggcgaacaatttatttactgtttatacgtaaactcgcctatcaccattcttcgtaaatatacgagttaacatgggctagattatacatctaatttacttatgcccatgcattgtgtaatatacaaaggaataattgtcaaaagatgatatcactaatgacgcaaccctcataggtgccggttgggaacgggccttaggtgtcggtttcccagctgacaccaatttgatggcaccttttccccgggcataaccgatacttatagagatttaaggtgtcggttcatatcccacaacgattcctatagtattcaatgaataaaaatcagctcgatggagccgccatcaccgaatctaggcagcagaagaagaagtagaaccaataaagcaaagtccaattacgcatctagtgccacggtggcgtagtccgacgtggctcaccggccagtgccaccaccattgttctcgacatgtgacgagcggtggcaggcgaagacctggtcgtggaacttttcgaggcgggtgtgcttggctgctcactgctccgccaacttctgctacttgacatccccatcgcgacgaaggacggacatttttttctcgttactctgcctcctccctcggtgccctcatcttcgcctcaaactcctctgcgcctcttgccaccgacacgccctctccgtctccagctgcatctctactctcttcaccctccacattgcttccttctaatactctctgcatctctgccgcacatgccctttgcttttcctccatctccaccatcacctccccacccgccatccacggtgtcaccgctatcgccgtaggtgccataggtggtgtcgtggtgaccgtcgacgcgaagctaagggtcactgacggtgagggtggtggtgccacctgagatgatgatatctagggcggtaacatcggggaggccatgagcagcgacacgacatcggggtgcccttccttgactagcttcccagtgcaattatcgagcaactagccggcctgccacacactactatgtcaaatggacaggaagatggggagggagatgcaaaggagggaggaggggagaggcgaatggagaagagtgtgagagagagagagagagaaagagagaagggcacgggggtgggccaggggagtggataaggtggatggggtggggtgctggctcgactcgggaaccgacacctctagtaaaaaagataacataactatacttacggtttttatttagaattggtacctacaagataagtatgatgggtcctataggtgtttaatcaatacctataatataagtacggtatcttaaagatattagagcgttatgttggaacggtctactctgactattctttcactacttggggcgttgggccgttacgatccatgatgacttatttgtatggttcctggtcttatgctttacatggtagattattattatgttatgatagcctacccataacccagtgacaagtgaggtggttattacaagtgaggtggttatttggcaaagtcggcgttagctaggggtggatatcgagccggctcggctcggctcagctcgcatcagctcgttaagataacgagctaactcggatcggctcgataaggaaacgagccaaaactacagctcggctcggctcgtcaggaaactcgagctagcttgtttggctcgcgagctggacactgctagttgagaaccttgaggtgggaggaaagagggacatcaaaatcaaattaagaacaccacgagaaaagaagcattgaaatcttcaagaacacaaggtcaaagaaacgttgaaatggattcttacagggagaaacgatacagtaaaagcaagattcaggctgacatctcgacaacatgcatgagcacaacaacttttcagaaccttaattaaatccttaatcgttttgatggacagcgcaatctcaatgacgcgccatggatggcaaggcccgcgctgcttccatttcggccgctgatgaggtgagattccgtgtcgacgagagcggcgccgcgccggaggggatgagtgcgacgtgcagccggcggcaacgacgatgcagcggggcttcgagagaacgagagaaggcggactgacggaggagacggcgcgtgcgacaactgattacatggataatggagtcggagagcttccactactggcggcggcggcactaccgctcgatttaggaataggttgagaggatgagagtacgacacaaatacttagggttagtcaatgtctgttggagatgggccaaatgggctttctttcacttgcggctgctgctgcttgctagctaaatgggctgctgcttcctacttgccactatttcgttgcttccatgcggctcgtagctcgagctgactcgttatgtctaatgagctaaaagcttagctcggctcgttaacaaactcaaacgagtcgagccgagccgagccgagcttctcgttcagcactagagccatcagcgccatagtgcgagcttgaggacaaagaaaggcggaaagaagctgacgtgctcgagagcgcagcagccacgaaggaggtcgagagagggcgtcgtcgcgacgaccacacatgagcttgccccatgtgttggccggccaacctcctactggctactactctacagctatgccatggaactcgccttctgttgagaaaaaaatggagaagaagaggggaaaaaaaacagaggggcaagatgggagagaagcactttggatggaatgctaaaatgagatattttgacagtttagtgttgacaccgaatttcggcccactcgttccaaatcccagaacatccttgaatggaacgggcgcccctcgccgttccccgtcatgcagtgctccggccagtttcccggtgtcagtagccataacgagtgaccaacaagtcaacaaccatatcagtacgactgagagtgtcacgtcacgtgggatctgggtgtgtttagttcacgctaaaattagaaatttggttgaaattgaaacgatatgacagatggaagtttatgtgtgtaggaaagttttgatgtgataaaaaagtaaaagtttaaagaaaaaatttggaactaaacaagccttatgtgtctgtcttttattccatagattttttttcttttgcgatgatattttccgtacaagttgtaggtttgtaactaaggcatcgctcctgctacatatatactccctccgttttattcaaaaaaatttgcttgcagtgtttgaccactcgtcttattcaaaaaatttgtgcaaatataaaaaacgaaaagttgtgcttaaagtactttggataataaagtaagtcaaaaaaataaataataatttcaaaattttttaaataagacgagtggtcaaatagtgcaaacaaaaactcaaaatcccttatattatgggacggagggagtatacattttctacgttgtgggatatcagggattttttttacggagttgctagaaatatggcgccatatgctacagtcaattttttttcagccacttacatattagttacatctcatttacaccccacttacatatgtaattagtatgtaattttcgaatttacatatgtcattttagttacttacatatgtaattttgagacttatattgtaaatacactaaaattacatatgtaatttagggcttacaatgtaaatacatgccgactattttttgatgaaaaacatggcgccataaatatagctacacccttttatttttatgtacctacgtgagtataaaatcccttatatattcaggatagaatatatagttctccgtatatatgacaaattgacaatctatttgtttgataaatgatttttgaggaaaagaattttcctttatttctgacctttttttatatgttagatacatgtccatgcggtacgatggaacataattacatcagtagaagctattgtctttttaatctgttatatgggaagaaataagtagtaatgtcttctcggccaattataatgcacgataacgtgtgctagctctagccggaaggttgatattaaaaggtgggatgaaaatcttctcaaacccacgaagggacttgagcaagccagtaccgatttgcattcaaaggctgccaaattgagtggagaagtgggactgctcttggattgtctgaagaattatcgatcacccaattagacgtctatttcatcattagttactttggagcttaatttacttcatatttattgagtggagcagtgaatgtttaaaagtgaataattatttctgggaatgctgagaaccttttatcaaacagtcacttctgaactttctatttatttttgtaaacgtcggatgcttatgtctaaaatactttttgtattattatttttgtaacctgataatcttatattattactttttatttattcccctgttctgatcatcctctaaaggtgagtactctacagctgcaaatttctttgctatgtatttcaggactttgtggaatgttattacttttattaatatttgcacacgtacacgttattttctagtacaccatacaccaaatacatgaggatctagagagttttatcgtgttaacttattaattatcaatatttgttgtcatttcaagaatgtacaattttaggctagtaaggtctttacgttccccctccccccccacacacacacatatatatatatatatatattaagatgtttttgccaggaatttcgtaagtcacccatatcaagtcggtttggtattccgcacacgctacgccgtatcgtggaacgagcgtgggacgtcggattttcgtgggccggctgggcctcctgcatgcctcctgaatgcctgctgcccgtatggctgggcctcctggttgcctcggacgatcatgccccacctgggctggatcggtctattgtctccaaatcgagcaagtgcaagttgatgagatgttgttgagttgataatttctcctattttgattatacatgagtatttctatctcttctcttctctactatttgtttcagttagcaaaaaattacattagcactttctgttgattgactttcttttgatcttgtttccgtaacaactatttgtatgggagaggagacacgcgaatcacgctagctagctatttctgtgatatatatatatatatatatatatgtttcttccatctccgtctttcattgatctgacggctacagatgtagcccgcgccatagctccgtcaccctctcaacgctgcacggcgcgtaaaggcctgattgctgcgtgcggcaagggatacgtgaaaaaggagcgggcccaattaaatcgcgcagtccgcttgcgagtcatgacttttcaatgaatgttacgcgtgacgaaaatcggatacggacaacgtacaatagctttaataaaaacatcttcaatttttaaatcgcggacgagggcaacgcagtccgaatcagacatgcggcaagggcaaatcgcccgcgcgagggcgtcacaggcccaatcgggcatgcagaaaattgcacgcgcgagagcattgagggcccaatcgcggtggcgcgtcaaggcgcgtgtggaaaacgtacttaggcatgggcccaatcattgcgtgcggcaagaggcgcgtgaaaaagaatgggcctaattaatttgtgcatgtcttggataagagggacactctggcgtaagaaaaaagaaaagaatttgacaaaaacataaaattaaaaccgattcaaacatagatgatgtaccaaaattctggcgaaaacattttcaattttttaaattggttctacccgttgcaacgcacgggcatcttttatagtatatatacatatgtatatatatatacatatgtataatatacatatatgtatgtataatatacatatatgtatacatatatatatatatgtatatatatatatatatatgtatacatatatatatatatatatatatatatatatatatacatatatatatgtatacatatatatatatacatatatatatacatatatatatatatatatatgtatatatatatagtaaatttgtttggtgctccatggtgcccggacaccatgattgaaattgagtatataccaaattcaaatgagtatgaatttgtgtatgccccatatgggtgtcatatatatatatgcatgtgtacggctttttgtccgcctacagtttaagctcatgcagtggtggagcatatttagccttatctttcgcttctatacgtactttacaatctttatattgcacagtttaggcacttgagtgttggtgcatggtttcatcttggttcaccttgttgtgatcagtgcatgatgtagacgttatactcgacgatggcgtcgtttttcttgaggtctaaggtgtgcgtcttcaactgggcgtagcctcgggagaaacggaaagtgccggtgccgccgatcactggcatctcccggacattgccaaagggaccattgcggccgagcacggtgaccacgctgccgttgtaggggccatgggtgaacaccaggttcatgacctgaagcaagccaagcttggcgaggcccgtgctcatgtacatcccttgggcccggcccacgggctgggactcaggttcaggcccctcggtcagcgcgtcatccatgacatacaactacccaaataatgactctgaaattgggtccaccgagtccaccacccttacagatgttggggacggcttgctcaccttgtcgttgaagtagaagtgtaggtgcgtcatcggctcagacgccaatccacggcgggtcaaacccatcgtggtttctttcgggcgggccgcacctgcagccgctgcaagggagagcacaagggtgatcaccactactcccttggcttccattgttgtgcttaattagtgtgtggaagctaggttctttctatatcttgtgacttgcgagtatcacttggagtgtgtgattcaagtggagctcatgagctacatatagtggtggcatgagcactcagcgtgcaatggaaagcggcatgtggcaagcggcgatcgctcaatcggcctcaaaggctggtgttctttctttttgtgagaacaggctgatgatccatatggccgtgtagtggaagcaagtgaccacaggtggtaggtttgatgggcacagattagggttgatcggcacagatacaatggtttgactctggatgggcaaactgtgaaaaaggaggaagatcgaagtggcatcgattggtaggttatggttgtgaagcaaacactggaaaagtattggctggtcggctcctagattgtgtcagagaaactcatcaccagttagctagattgttgatcatatggatgctactaccactggtggagaaatcatcttttgtcggtcggccgaattctataatagtcccagttgcaattaaaaccgggactaaagatgatctttagtatcggttcaaatgcagtcaggacttgtcaggcccccctgagatctttagtcccggttggtaagtcccacccctatatatatatatgtcttcttcctccttcagcccgagcaagctttaaaatttcttcaaaaaagaggggaggtcatgccaaaatttctagtgaatttattttggtgattatatacaaatcggaggtgcgtagaaggttagcaacttcatactccaatgttttttttgtcatattacatttggagctatgttttgcacacttttttgtctccaaaattttgttgtaagttgatgagagagaaaatttatgtagggaagaaagaatatattaatttagtgaaagttattcttaaataatagaaaacaaactaaaatgaaaactaaaagaagtacaacacattaatactagtttaaaactttagaaatagtaaataagaattatttggtgtaatattttataatttttgtatgaataatgatatgccaatactgtacgagtgttgaaagagtttgtaattgttttatcattattgtatgactgtcattactgtacgaataattatttgtgtacgatttttttttatttcatgtagatggatcggcaatggatgtacgctgaccggcggtccaaagagtttattgacggcgtgcattattttttgagagtggccaaagctaacaggcataagggttttatttgttgtccatacaataagtgtaagaatcagaaggagtattctgcatccaggattattcatttctacttgtttgagtcggggttcatgccaagctataactgttggacatcccatagagagcaaggggttgaaatggaagaagatgaagtggaagacgacaatattacggactttgctcagtacgctggattttaaggaaatcaaatggatgaggaggaaagggatgctgatggtaacgacattgtggatgatcttggtcagatgttgcaggacgccaaggaggattgcgaaagtgaaaagggggcccataaattggtgttaccaaccgggactaaagatcgatctttagtcctggttatttcacctaggactaaagatagcgatctttagtcccggttggacaaccgggactaaaggggggttacgaaccgggaggaaaaagggtttctccaccagtgtacatccgtttcatatcataagtcattttgatttttttctagttaagtctttttaatgtttgatcaagttcataaaaaatatatcaatatttcaaataaaacaaacataatattgaaatatattaaagtttatatatttaatgaatctaatttagtgttgtagatattgctaaatttttctataaatttgatcaaacgttaagaagtttcactaaaagaaaacttaaacaacttctagtatagcacggaaggagtattttacacgtgatttttttttccgagagaacatactgcgagggctttgcctagctttacaagtgaaatttcagtaccactaattgcagagggaccagatgatatggatgcagctactgtcgtacgaatgtacgaatgaaataaaatcagattggtacttttttcttgttgatggggacattggacatattgtgctccttatggtaggggtgaaaacggatcggataatatcctgtccgatccgctccgaattcgtctgaatcgaggatatagtataggattttagaaatccaacgtatatagtataggatatggtatctctaaaatccggtggatacggattatccgataggccgttttccagataatccgaaatagccaacacatgtgacctatctattgcatataacaaaagttggtctatccaatggcctaattcatcatttaattaacctatatttcttagtctgaggcttttaccgtctcatgtcacacttgcgtagctgtatttttatattatggatatcatgtattcatgttgtttagcacttaaacacataattattacaacggagacctgttttataggtgtcggtttattttaaaccgacacatatatgccttttcccatcttcacacggtggaaaaataataaccggcactttttctaagatgcataggtaccggttcttattataggtactggcttttaaaaataaaaaccggtactagttgcaacgagactcttttaagaactgtttcccttttataagattggtaccgatgtttcttctttttttctctcgttggtgcaattttttattaaaactcatagatttactttcggcataatttttttttattgtctatagtaaggtgattgtgtgttgtgacagaattgagtggtgacgactcaatgctcctagactaaggccgagtcgtagggagaagcttacaacgacaactttctcgttctacgtgagtacgttttccaaatctctaaacagtgtgtttcatataaaaattttctatatataaatttctttgaaaaattcaagtcgatctttttttttcaattttataataattaaatactcgattaatcatatgttaacggctctatcgtgaaaaaaaaacactcccgtaatttacctttgattacatttgtacaaattttatcttcttctaatataattaatatgcaaagctgttacgggttcgaaaaaaactcggtgttttacctttgacaaatgcttatcaacctttgagaaatatatcttgacatgagccgtatatacgtttgtattcgcatccattgagtatgtgtactctcatggagaaatcccatcagccttgttgttatgcgcagttcatatatgtaccgattattttttttagataatggaataaaacatcccggcctttgctcatcagagctacagccaattattacagaagtaacacccaaacactgagtgtagttcaaatgaattaaacacacccaacaaaataaaagatcaaactaagataaggagagcatatttattctagtctatttatgaatctccatccatagtttgcaaagagctgcatgaccgttgtctcaaacctacgacatgcaaccttcataagctctcgatcatcttcacacatttgcagctgtgcccaaaatcggagccaatatgttgccctgaaaattacctgcatatatgagatagatggtgatttgttaaaaaccatatcattcatagtcaatcacagagcccaacatatggcagaagctcttacaagtatgagtttactcagcttcttgtctatccccaaaagccaaccatcaaacatattagatatggtagtaggaaggtataaatcaagagagaactgtactgctctctaaacaaattttgcataatgacactctaaaaaaagatgttgaatagtctcatttttcatacaaaaataacatcttaaattgccattttaatttcgtcttgccaaattatccttggttagcacaatctctttaagcaagtaccacataaaaatcttaatcttaagtggcatcttaagcttctaaataatcttatttctctcactataaccattattaattaaagctagatacatcgacacaatatttcaacatatatctatcaaatatcaaatcttatatctcttcttcattcagtttgatttagaattgtatttttttagaaaaacattaattgaatagtaattcattagttcttttattgcattttgtgctctaatatctgtcggtttatttttttttcccttacaaatgttgtcatatattagtttccctattggactatgtgatattgccctttgcattacttctactaatcttataaagttgaacgcaaaaaatgctgttctaccttcaaatttttgtcatagaaatatatgtaatttatactacactaaaattaaactagaatttgtaacacatcatatgtctcgtgtgttagatgtctaattcaatcaataaaatcccacaacaacgcgtgggatatcatgtagtatttgctcatgaacgtagccttttcttccacatattttaattatataccaatgtttatcatgaaaatggggccagggcttcaactttgctaagtatagacacggcagtggtacagacgagaagaaaatgaatcaggtttaccacccaaaacatacacaaatacgtaatacaaaccatttgtgttcgagctgattgatcacgttgtattctccaacatgaacggtgaagagacatgcatgctgctagctggcacaattggctcacacatgtaatccgttgtggaacaaaatccaacatgattagatgaagctgcaattgtagtcatggtggagacggagatgcgaaatcaatcaagcgaatcaaaataagggtggcgtacgtgcttgtgtttctctataccttccaagctgactcttgtcatgaattgatgaagaactagtttataagagttttagtaaatacaccgtaggtgttcaattgttggatgcaatatgtttatatacttagatgttatatatatatatatatatatatatatatatatactatagaaaaaaaacccatgcatgcgttgcaacgggtgaaggctattttaatcttattattgttcaccttgaaattcactatgaaaatttgcttcgatatatatttttctagaaaatcatgtaagttagcatgcgagtttttttaagatatttcttatactgactccttctatattttcaaaagcggacgaacttaaaacccgactcaaatactgatctgtatttccaaaagtaaacgaactgtattttccaatatggttaaaaacctattcatacacggataacgtaccaaaatatcggtaaaaacatctttaatttttataatagtagagactagattcatagaaaggaaggctacatacagtggcggagggcagctaggtagcgtctgtaccccaaaagtggtttttacacaataccaaacatataattttaatactacaaaaataaaaacaattcaaacacaaacaagaaagctgttcaagaaagttagaaactcatttgtattattagattttaacttccacaaatctataccatacaaattaaactagtttgataatttattgataaatatcattatttttctaatcatcccatctaattcagagtctgaaccacatgacgaaaattaatcctggctccgctaccagctacgtagccacttatgtcttttcctcacagagatcaagtccttgaaaccaatatatcaagtagtaatgctaccaatttggaatttatcccgcaaagggccatattggtgtaaaaagtataaggaactagatgatgccccgcgcattgctgcgaaacttcgtagttagaaatggaggatattacatgtggaggtggcagatagatgtaatagaaagcacataggaaatcatattttatttcagcaaaaagtagccattattaattcataggatgaaatctatgaacataatcaacattagtatagttaggtacagaatatctcaaatagtaatagcaatgcaagagactcttttttttttatgtaagacatgctagtcatgactgctggtaggagcatgagtgttttaaatggaactgggaccctaatgaaaatttgtaaaattgaacgaatataggtatgggctagagcaatggttccaaatgaatggtaggcaacaaaacagaactgagaagattagtggctgcagaaatttttcatgtatacagtagcttaatttgtgtaggagaggttattcgtcgagctaagtaattatgtgtaacctactaaaagacaaaaatattttgtctcgttttgattcgtatcagttgaacttcaactttgttgaaaaaaaatctaaagaggttaaaagttttgtcatggtctttgggtcgggcgtcctaggctcattggatagttaggatttgttaggattagatgaggtttgttaggattagattaagtagtcatctatctatataaggagggatcctatcccaggtcaattaggcattagatcaagatttatcttagtgcccatcggcctgtcttctcagtgcgacggagagcgtcacgccgtttaggttcaggaccgttcctcgatattttatctactataatccaatctatctccattcatcccgattcttgtccacaaaatcctttcccgtgacaagttttgcattcatgctaatgatctaggtggcctttggctaactttatgattcctcttcccctaaactgaatataagattaacattgtgcaatccctttaccataaaataattttatttatcttgtaacaaaatacagttgccatgtctaaataaaccataagaaatttccctatctcataataacattctctttcctgagaatactaaccacttgttagagtggaaatattgtaatgatggaaacaaaataacttgtataattctggactgaaagaattcatagaactgaagataaatagttgcactaacctgatgaatctcccaatgtttcggagaatgtttaattgtgctgtgacaaagaacatcctttatactttagttaattagaaaaaaaaagaaatttgaagaattaagttacgtcaaccacaaaattgtatcttataaacctgaattaaagtatgaacatcatatagcaaacaatgattagcatggacagatccagggaacaatatgtacctgaattaggttcacttctgaaataatcacggtattgacctttcaatcaatcatagtcaattggtgaaaatctgatagttttgttatggaagaaattacttacaaagcaggtatcctaggataggcatatataacaatggccctgtttggatccaagggatattttttagccctccctcaaatagcccaaatagctaaaaagatccaaataggtgagctatttgagggctatttggaaatagcccacccaaaaaaactatcccacccaaaaagtgctaattggggctatttcaggtggggcctactgaaaaagtgtcttttctctctatctctctccatgaaaaggtgcattaaaagccaaatagctctcaaaatagcccttggatctaaataacttagagctattttattgaaggactatttccttatactaaaaaatagctctcaaaataactcttagctagttctccaaacatgactaatatctggaaaagctagtgaccatgaaccaatgtgaggcaattatgcattactgaatatattgttgatattttcttgacagatgtgtcatattggtggaagtacatgtatgttgtagttgctgatttgggtgggaatgaatgccctggggattgacctcagcggtagcccatagctgctgctacaatgataataggcaatctactaatagcaatgatttgcaaccggaattcagaaataaaacaaaaaataaaacaaattataggtgcagcaatgatataaaattggtatgcatacatgtgatcttagtgttctgatgccatattggctcatctaacaaaatttaaagatcgaatgaatttcaatctgtttgaacagggacagtaaatacctgaagaagaacccaaatcaaatctcttcaataatcttgggacaacaggaacagatcaatttatcatcaatctagcatgactaacgaaacacagaggtcctctcaaaaaaaaacgaaacatagaggccaatagattgaatgaacatatacggtttaacaagagtaagaagcatacctaggaatatatacacatgagatttgttggaggtgaggaagcaggtgaaggtttgaggggagggagaggcagggagcactacactggccaaggtcacctgtgacgggtccaaaccctcatctttgacggcttcgcgcatggtcagtgatcagtggtcactggtgagtccagtcacctttgacgggtggccggccgtcacaggtgacacccacctctgacgggcaagttactagaaggccgtcagaggtgttggtctccgctagccttgagcgagttaggacccgtcacaggtgactcatctctgacggccctttaaataaaggccgtcagaggttgaggtctccgtagttagaagctgtcacaggtgatctacctgtgacggccccaaaagtaaaggcccgtcacaggtaggtcacctctgacgggcctttatttgctagtccgtcataggttatgttacctttgacggatttttgttccgacccgtcacggatgagttaattccagaaaaaaaataaatgctaaatattggctagcctcaggatttgctagccatgccctctgaaaaatagaaacatcacagatatattctagtcacagatccatcacagatacatcaccccccaatataacatcacagatccccaacaacacatatatgcagttcaaatgccacaattttgcacagcaaattcacaccccttgaaagccacaatttcggtcgttgctcatagaaccgcatatatacttaccaaatggattaaagccataatgtcatcgacctgcacaacctgtcaataaggaaaaaaaaaaggagaaaacagatgaatagtacaacataaatcgtagttgatcaaatgtgatgacaatttagtaaagtaccataaatattgcacatatgaaagtaaattacattgcactctataaaaacataattttttacatcgccagaaattataaaaacatcttttttacatcacaataaattatctagccaagttcatgagtctatttggcatgaaaacgtccttttttgttcattatttctgcaagaataaaggcgcacaattcgcctctgatagcgggggggttgatgggtgagatcttgaagccagctctatatttctgtttaataaataagaggttaattagcacgttttgaatagcaatgtagatattgaaatgagcttatgtcgccattagcaacaacctcagggtcgaaatctttcacctctcttagaagtgttgacatgttgtggcacacgtggaaaccacattggtctccgatctgttgtgcgcatgcaaacttggtgtcatgataaagttcattcttgccctccttgtgcctaccacctttttccacatatgggccccaagccatatttaaggccttggtgatttcactgaaatcataatctttggacttattggagttaaggtaggtaaccctactccacttaggtacgatgactaggagaatccaatgtcgcctgcgcagtggttatgtagcgttagtactaagaaccttaacttcaaaaacaatatacacgaagggtattgtcctcttactcttggttgtgtgcgcacatgatgtactccttgtcttgatgggcccataaacaccggttgacatagtcaaccacctcagtgaagctctgtcgtaaattaacctcattcaccatggatggatcaaggaacccaacctgattaccatagcgacgactctcgatccaacacaaccttaaaatatttacgtattagaactaatttaattaggagatatagtccagtcatatcacaagtatagaagatatgcacttacaaggagtagcattttagaagaccagtgtccaacttccggatcctgaaaaggtcgaagaggtcatcaaagcctatagttatataggcaggcgacgataggaacggctggtggtcgtgatgtccaactatggatgactccctcattttccgcttagcattgcttagctccatgtattgcttatgtagctctcggcaagcaatacccatcacagctaacacattgtcctccaccaatggcatgcctagctcaaattgggctggcgccctcacgaccttccccgatttgctcaccggcatcgacgtcgcagccttgcccctttttggctccggcgccaactccccgaccttccccttgccgcgttcacgcttctggcccttgacaagtggtggggagctatcggcctttcttgtggtctttattggagccaagctttgagctatatctgccaagtccatatcagctccaccgggagaatgagctactgacaatgccggtccacggggagcctcaattgatagcttacacttgggaggtgtaagctccgtcggtcgacttggacgaggagtcatcttcacaactgtcttctttgggccattgtatgaacgtcttgcgcgcatcgcccaaagtcatgatttcatcatttgggggcacgggcagcggatagcctgaccaggtgtcctttactgtatcgatggacaccttggcatacccagctagcaggtctgcgccgtggaccttgtctgtaaccgagggcttgaaagccatgccctcagcgacttcaggagcgaaagttgggtggactctcgctagtaggacacactgtgctgcgccctgcataaggtgaaagtttgaatttaatattggaatgtgtaaatgtcttttattagatatggatcggataacaacaattacctcgatgtggtccactgcagctagtggtgcgatcgggagaccaggggccggcacctctgtggatgcacaactactcctatgctgtgacggactcgcgtcgtgttgtacacgaggagttggttgcacagcaggtgttgtgactcggggtatattcatgtcggcgagcaccttgttaaccctttcttccacccttgcattcatgctagcttctagttcttgaatgacctcaaccttaagttcggccttcaaacgagcgtccctctcttccttggagactttccgtttcctgtattgggagctgtactgagggagtccatgcttctagggcacatcgctaccaattccccgagttcggctaggatgttctttggttccgagcgcctttgtgaggatgtcatcttcgcgcctcttcggcgcggactcaacctcgctttgtgaagcttgttcagcaaccaagcccaactagaaaagaagatagtagtttatacgaacttgtactttatacgaacggaaattagttaggttaagtagtgaactcaccagttcctgatagacgacggcatcacttttgttctcaaatgtgacagagccgtccgggttgaccttaccccttgcccgcgcccagttgcgagctctttgttcagggatgtctgaaaacggggcagggacattcgctgctgcagcggctgcatcttcttgggcccatattgcctccttgccgatgtaccctgcggtgcccagccgatgcgggtgctcattccgctgttgcagtacgcgatgtgcctcgctggattccctaaactcttgggtggtcttgagagagcagaattcctcccacaccgcttcggttatttgagggtattcatcgaacggcgtatgattgccgggcgggttgacatactcggtgaagagcttcgacttccaattcttccaagctttgcccatcttttggaatgccttccgcttgagcctatcctttgcttcggctggaaatgtgaaccatttctccattgccgtccaagctcgctctttctcggcttctgtgaccttcccgatatctttatggaggatcccgaagttctcacgtgccgctagcccgcagcagttagaccatcttccaatgacagtcctgggcgccgtgggcctaccactagcgtcaacctctcttataacttgcactgtggtcggccatatattttgtgaccgcggatttctactagacctacttgcacttgtctcgcccgacatcgacgtatgttgttcctgcggcaattctgcagcacaaacagaaggcaatatttgctaaggggtgctagctaaaatttatgtggtcatgtggtgaaaatttatcctataaattaccatgaatttcgggttgttggaccgccgttgtcgcgggatgaccttcggcaactgcctctgtggctgggtttgcttcttcctggatcctcgcaggtgttggggagggcgggtttgcgccgggcgttgacatggtttaactttcgcgaaaaagattatgaatggttatatgtccaaatggctcttaaatccacatccaagttgcaaactagctacacattcaagttttaactaacagttgcaaccataggcagcagcatgggcaaacatagacagcaaggggcaagtgtagataataaaacagcccacaataatttatgtggcagcagcagcaggggtatataaatcatgtatataaacaacaattcaactattcatagacaacaagggtatataaatcaataagtgtagataatctgttcttatccataaagaaaagaacatccactgcagcaaaattcatgctaagatcctctattgatgctaagattcactgcaccaaaatcatgtatataaaatctagcccctacattcatccaaaacatccacagacaacaaatcacatttaattcatctatacagcagcaccaataatcgaaacaacaaatcacatttcattcatctaaacaatgcaattcatccatcggaaaaaaggaggaatgggggagggtggcggcatacttggagaagcggcgtacttggagacggcggcgcaggccgtagtcgtcctggatcctggtggcggcggcggagaggcagtggtgaagaggtcgaggcggtcggcggtggtcggggatcccggcgtcggggaggtcagggtcggggaggtcggggaagtcgatggacggacggcggagaggacgaccggcggcgagggcggcggtggagacggcggcggagatggtggtggagaggacggcggagatggcggcagagagggcagcggagatggcggcggagagggcggaggagaggttgaggcggcgacggtggagatggcggtggagaggacggcggcggtcgagagagtgagtgaggaggcggcggtggagaaggaggcggcgagggcggcggagagggcggagatggcggcagagagggcggcggcgaggagggcagcggagatggcgacggtggagatggcggtggagatggatggtggcggtcgagagagtgagtgcggcggcggtggtgcaggccggcgtcgggaaggtcggcggagagggtgagcggcagtgaggtcggcagtggagaggtcgaggcggtggtggggaggtcgaggcagcggtggagaggagggcgtagagggtggcggagaggtcgagagggcggcggatttggcggcggcgaggacggcggtggagaggcgaggcggcggtcgagagagtgagtgagtgagagtgggcgccggatctggatcgatctagaagatgtccaaccctaggtcaaccctagtcaaactcacctgtgacgggctccaactatgtggccgtcacaggtggcctcacctgtgacgggcgccaaccgtggagccgtcacaggtaagaccacctgtgacgggcccaacactctgggccgtcacaggtgaggtcacttgtgacggccctacagatagagcccgtcacaggtgagtttgcctagagcaattttattttattttattttacttagttcttttattttccttaacatattttcacatacactacatattttttatacttaattattttatttcactaacagtagtaattgcacttcattattatactactttaattattttatttccaatgcttatacttgcttaattattttatttcacttctagtgggtgcttcacttaattattttatttgactatttcataagcaatatactattgatcattgcgaacatattagagtcatacagataacagacatgtagacataaactacgtacataaattacaaaaataatccttcctcatggtcgacacgtgcatattgaacttcatcttcttcctcctcctcttctagaggtatttcttgacctatgccgtggacgtgctggttgtaatcatcctcgtctgcaatattgtccaatccaacaattctccttttcccttcacgaacaacatgtagtttcttgttacacgggtcaactatgtagaacacttgaacaacttgtttggcgagaacgaacggttcatccttgtacgcgttgttagccaagttgacagtggtgaaaccttcattgtcaacttttacattgcgaagatcgacccatcgacaacgaaacaacgggactttgaacttcaagtaatctagctccaatatttgctcaactctaccatagtattgatcacgacgaccaccgtcactagcagcctcgatgcgtaacccactgttctgcactgtgcatttgctgtcttgctttaccgtgtgaaaggtgtatccatttatgtcatatccttgctaggtggtggcactccattcaggaccctgtgacaaccactgaagtgtttcactaggcaagttctgcaacctggcaattcggttcttcagccactcgttgaaagaagacatgtgcttattcctgacccaactctctgatcggcctgggttctcttgtcggataactgcaaggtgttcgtcaacgtacggcaccacctcagtcatatgttgtagtaccgtgaaatgagctttatcgtacaccttccgatccaacctaatagtctttcttccaacagtaccaacaccgtcaagcctcccttcgtgatgagatcgtggtaatccaattgaagatgtttctgacatgtagtccacacaaaattcgatggcctcttcggtggtgtaactctcgatgatactcccctcggggtgtgaacggttccgtacataacccttaaggatccccaggtacctttcgcaaggatacatctgcgtcatgaatgctggaccacagcactttgtttgcctcacaaggtgcaccggaagatgttccattatgtcaaagaaagttggaggaaagtacatctcaagatgacatagggttctcacaagttctgcctgtagttcatctagtccctcgggatcaatgatcttctggccgattgcatggaagaaggaacacaaccgctggatcgtgtgtcgcaccttaggaggcaaaatattccttattgcaacgggcaacagctgtgtgataagaacgtggcaatcatgcgacttcattccaaccaacttaagatcttgcagtgaaacgaacctactgattcttgatgagtaaccagatggaacctttataccactcaaacatgttagcaaatcaatcttctcttctttcgagagagtgtagcaggctggaggaaggtaaaccctgccggattccgtggttatgggatgtagctccgaccgaacacccatatcttccagatctcgtcgggcgttgagaccatcctttgtagtacctgggttaagcagtaatcccattaaactctcgcatacattcttctcgacatgcatcaaatctatgcagtggcgaacttcaagatccttccagtatggtagtctccagaatattgacttctttttccacatgctcctctcttttgtcttttgtttttccacatgctcctctgttttttccttcgatgtgctcttctcttttcgctttccaactttcctcttttttccaaactcgttggttattcccatcactaagttgtgcacctctgtccctgttagctctgtcgggggtccggctgtatctctgtgtccattgaaattctttctcatattcctatacgggtgataccttgggagaaatctcctgtgacccatgtagaccgtcttgtgtgaatgcttcaaccatttgcttcttgtttcctccatacactccgaacacgcccatttccctttcacagtttggccagaaaggttgccaagggccggataatcgttgatggtacaaaacagcatcgcatggaggttgaaatactcttgtgcatatgcgtcccatgttcgtgtgccctcattccatagcctttcgaagtcatcgattatcggttcaaggaacacatcgatatcgttgccaggttgtctcggtccttgaatgatcatggcaagcataatgtactttcttttgaaacacaaccagggaggaaggttatagttaacaagcagaactgaccatgtactgtgacgactgctcaaatcaccaaaaggattaatgccgtccgtacacattgcgaaacgcatgtttcttgggtcatttgagaattcctggtaaatcctatcgattgtcctccactgcactgaatctgctgggtgcctcagcatagtatcgactttccgttcttcggcatgccagcgcacaagcttagcttgttccttgttcgcaaacattctcttcatgcgctccgcaattgggagataccacaccacctttgctgggcctcccctctttgacttacttccttcaccttcactctttgctcgtttgtatcttgatcccccacagatagggcagacatccaagtcagcgtattccttgtaatacaaaatgcagtcgttcggacatgcatgaattcttctgacctccgggcccaacggacataatacttgcttcgcttcatatgtcgtctgaggtaaattgttcccctctggcaacagatcctttaacagctcaaggagttctgtaaaactcttgtccgaccagccattactagccttaagcttcatcagttccaacacgcatgacaacttgctgtgcttcgacttgcatccatcatacaacggcatctggcaatcttccaccaacttactaaacttctcataatctctgtcgttgtcctctgcgtcttcaatgtcatgcaacattgtagatagacattgagtgtccaaatctatggtctctccacctaaaggagaaggtacgaacatgccttctcgagctgcggcggtgttctctacatcctgatccaacacttcttcagctgcgacatcaggcgcctcttgctctccatgcttggtccagcaggtatatttcttcatgaatccattcattatcaaatgagcatgcacttcatccttgtcttcgatcatctgttcattcttacagtccctacatgggcacaacatgtgcatgctcatcctactttttctgtcattatccgcaaatgtgacaaattcagtgaccccctctctatactcggtagacgaacgatgcgcatagtacatccatctacgatccatctgaaatcaacaacatacgaagaaaaataaatgatgatcgatatgttgagaatgaatggagaataatgtgttttttaccttgaattttagcaaaaaatcgccccccttgccctcccaaccgatttgtgaacagtacaatggtcgggatggaaagcagttggcagtttgggggtatttatagacccaacacacctcaaacgggttagataaaaaaagcccgtcaaaggtattgctcatacctttgacgggcttctattcaacggcccatcactggtatccgctcacctgtgacgggctagaaatgaaagccgtcacaggtggcggcccatcacctctgacggcttctaatgtatcggcccgtcacaggtgaggggataccagtgacgggttggaagaaaaactcatcactggtatacctctgacgggttttcctttcggcccgtcacaggtgaggggatacctgtgacgggccgcggccagatgcctcaccggtgacggcatcccgtataacccgtcaaaggtaatggtcactactgaccaattcgtttgcccgtcacaggtatcccgtcagaggtgtgaggatctggcgtagtggagaaatccttatattctgggacggatggagtagtagcaatgaagtttg

SEQ ID NO: 7729 - DNA, 26586 bp, Oryza sativa
ccatgcggttcataagtggaaccgtacggaaaaataaggggaccggcgcggggcggtcgcccacaagggaaaatcgattttcccgtgcagacctcctaatccgaccgcacgagataatcatcattatcccgtgcgatcgatctaagtggaccgtacggaaaaatcgattttcccgtgcgggctttttaagtgaaccgcacaggaaaataccacctcgtttccctcccatccacttcaaatttttcccatcctctctcttactttttcccttttagtctccctcaactacccccctttctatctaccttatctcttcctttctctaccttatctcttccgccacttaactccctccacaccatcccctcctccccttcctctctgtcgggccggcgagacgtcgagcggaccgcggcgacggccgggcgaggcggcggctgggcgaggcggcgagcaggcgaggttacggccgagcgaggcggcggccgggcgcggcggcgagctggcgaggcggaagctgggcgaggcaacgagcgggcgcggcggcgagccgggctcggcgacggccgggcacggaggcaagcaggcgaggcggcaagccgggcgcggcggcggacctcctcctggtggttgtccttgacgtgcacgtcgaccgcttcctcccatcccgtgcggcgacgaggcgggcgcggcggcgagcgagcgagcgaggcggtggccgggcaagacggcggccctcctcctggtggtcgtccttgtcatgcatgtcaaccgctgcttccattcccgtgcggcggcgagcgggcgggcccccgcccagatccggccggcggcgattttcgcattttttttagttttttttttgttccgtgcgggcggtataacacgaccgcacaggataatcgattatcctgtacggtcgacccgcccgcatgagaaaatgccgattttcccaaacacccggttacagacgggccgaactaccgcacgggataatcaaaacgcccacatagaaaaatgggtattgtagtagtgtactagcctctaactaggtcctgaagcttcctgcatgtcggtttatcaagcctataaataggaagccagtgtatgcatatcgactgatgtattcatccatcacttgaggaaagcaaaacaagcaagctagtagtaaagagctgtccaatcttgcatcacatttgctcctcttccagtacttcctctgcttcagaacgtgctgaacaaatattgcagcaccaacacgatggagcttgatgtggatttgcggagaaagaagctgaggagagttgtcctcattagagctgtcccaacccatagtgtctataagtagtttctatggtgccatatcaacaagacatcacaatagaaactacactctacaacccatggttttcttaaagtgggccattaataaatatatcatccctcttctctaccaatcatatttattcttcatctattatgaagacactattctctcccaatgcaaaacttgatagtgtctagtgcataggttctcgtgttaaagctgtgtcttgcatgagacccagtttcttcctctcttcactctctctcttaattaatatagtgccacataagttaaaagttctacatggcaatgtagttaataccatagacaccatactaggtggagggttgggactgcccttattgtcttcatgtcagccatctaggctgctcgttggtggatgtcggcggattccgtttcctgcccttgagagcaggtacaatagcaagctataagccaactaaaatcacatatcgagaagaaaatagaagagagagaagaaagcggctatagatttgtagccggctgcaacacagactccaagacgttaagtgtgtatgagaggtgggaccaggtcttaatggtgtagtatatttttatagttaactattgtatgaatgagctattagatttgtcagggttatggataccatatacctaatagtagttgactaaatctcggtaggatccaccacataccatgtcttatacggaaactgacctcgagggagtttcggataaggaaagacaaccagagttctacatggaaacgacaaggactactcggattgtatccatattagtttccctagttctacttggacaaggggacacctatgggtataaatacaagcccccctaggaggagaggggagacgaacaatcgacgttcaacacgatcaacacggacaacacagacgaccacctcaatcaacacacctaccacaatatacggaacaacagaagccagaacatacaagccaacatactccaagacaagacgccggatatcgacttcagggatagccatggctattcccctacggtgtctccggataccgtcaggagagacaaaagcgctatctctaatctcgccggacacggattcgaggaggagggctaccctgttgtcgactacaagtcagaacttcagaccgccatgtcgacaacagttagataggctatcccacatattgtactggtgtgattacggtgaataaaagcaataccggctccggccaacaggatgtagggttattacctgacaattcaggggcctaaacctgtataaaaatccctgtctccatctcttttacctcagtctcgcgtatatcctagcaccaacgatccccatactatccaaataccgtagtcgtgacatcaaacgtcgacagtggcgcgccaggtagggggattttggtgcttcaggatttcgacgagataggttcaagagatggactctctgacaacaagctactcgacgatttcggctgtggagagatcgaaatcatcaccatcgactattcgatccggcgagatcgaccaaacttcaagacgtcgccacagcggagaatagtgacttgatattatcaactaggaggtctccgatctccatctcttcggaagcgacatcatcaattgattttttgtaacctcggtaatgccgctgcctgctcagaacaccggccatcgaggaaccaaaatcaacatctcgatctattcactagattcttttgggactcggatcgttctcacaccccgattaggatccaaatttttgacccctgacgcatactgagaacatccatcccgacatcatgtgttccagggattattgatcacggatgtctaccaaggtatcgagagaacaacaagacaaagatccaactaatatgcttgctcctgacgtgtacacatgcatatgcatggactcagtacgtgcttaggcatgcatgcattagttggccgacgtgtacctgcaaagaagaccaacatggctgtctaagttgcaacgtgttgactattcagataaatcaacggccgcccgtgatcaggaatttagtagattgattttttaaaaatcggtctactaatttcgtagatacattcggcatgtatctacaaaggtacgcaatattttatatgcaatttatcgtacctatttagatcatacagcattatcagatctataatttattatgtttacctagagcatgtttttatacaatatctattgtgtgagtgtttctgatgttaagtcaactatggtctaacgctgggggctcgctctattttcttctgtataaattatgctcgtttacggtttacataatgcctgatacttacatctgctcgttatatcctgatagtactagaagatccacgcagtttttgagtacatactcaatattctctactatatgtcttgccttctagaaaatatttttcaggaacatttgagcactcgagtaggttgtagtcgagtacaccccactatcgagaacattctcgacaaatgcggagtcgtcgcacccaacttaccaacgaagaccgacgacctatctcatagcaccggccatcgctggactactcgagaaaaggttgttaacggataaatcctcgcgaacgccgtcggcttgatcacccgacatgattgcgaacagacatccggttataccacgagttgggtgtgtgagtcatgctggccacatgagacacacatgtaataaaccaactctagcacttccattggtgctcgagagataatcctactcgctcgctggttctcgcaccaagacgtagcaatctctcgcaccgcaacttccattggtgctcgagagataattctactcgctcgctggttctcacaccagtacgtagcaatctctcacaccacaacttccattggtgctcaagagataattctactcgctcgctcgctggttctcgcaccaagacgtagcaatctctcgcaccgcaacttccattggtgctcgagagataattctactcgctcactggttctcacaccagtacgtagcaatctctcacaccacaacttccattagtgctcgagagaaaattctactctcgctagttctcgaaccagtacatagcaatctctcgcgccttaacttcagatggtcgaggtacgattacggcggcgtagcggtcctcgcaccatgacttcagatggttgaggaacagctacgactggtcttcgaccggcagcgtagcggtcctcgtgccacgactccaaatgatcgagagacacctactcaccagttctcgaccagttgatcgtagtgatctctcatacatttgcttctagtggtcgagttacgactactgcctggtcctcgaccagcgatgtagcgtctctcccactacttcaactttaagtggtcgagttacgactactgcctggtccttaaccagcgatgtagcgtttttcccactagttccactttaagtggtcgagttacgactactgcctggtcctcgaccagcgatgtagcgtctctcccactacttcaactttaagtggtcgagttacgactactgcctgatcctcgaccagcgatgtagcgtttctcccaccagcggtgtagcgactctcctactacatctatttcagcaaagttgataacaggtacacaatatctccaagtgttttacccagagatcacttaccacgacgacacctagcgttgaaacctatcctactgtccctttacgccgtcttgataaggcctccgaggaacctaagggatattcggctggggacgcccagagccgataaggccttgtcagatcctgtagagacaaaataccatgtaagatctgatcgtgtaagagttctcgccgtgcgtattaaccaagccgtgtaatcggaaactgagctttccaacttcacggctgggggctaggatcagtgcttattcaaccaaggcaggtcaagggtccaagagccttatcccctgagaacaattctccgacgacaaggttgggggctagggagagtgtatgactctataaactgactgatcgaagtcggtaagagagaagacgctcatacacaaaacattggtcggtaaatttaattcattttcaatttaccatacatattataacattgtcaccctttgagcgttcgcttaggggctatttctatttgatattcttttctgagcgttgatttcaggaaaattctattcaacattgtggaagactccatgtccctatggttctacaccaagatcgactaagacgagtacgacaaatgtcgacaaagctccgtcgcagactctacgccttctcgatcgctcgagaacggttgctggatctcgacaaggaatatggaatgaagaaatggtgtacacctagacatatagcacataaaagcttagctaagagcagagaataacaggagctacattattataataaaacaagggcatctgtataaagaaaaaaagtaccatgtcttgaagtcttgattgtgagcacgataatagaacaaatatattagttgtcatacctccaaagcatcgataatgaactgcttcgaatcttcatcaacatgtctccagtcatcatgattgagagggaaacccttagttcttacaagtgtaccaacaacatgtggaaactctttagcagctttccctactggctgatcaaattcgttgaactccatcttgatcagtggctcgtcttcttctctaaaccatatgttatcctttctagtgaattttcttccttctcgtttctttggttgtgctctgttggaatctgaaatttgcaagtcagttaattagtcaatcaaatatatgaattgctcatatttataaaaataaaagaaaaccatacccccattctgttcagcagccacaggttgaggaccttcatcttgtccttcaggaccattagtacttccatttcttggtagcctagggtgcagatcactatgtcctacatgctcatttgttgtatcaattcttgctagtctggggcgtagatttcgaggttcaattggcacagagctaatgcattttctcttctacaatatcaaaaaacttgttaaaccactatgattttgttaatagcaatgcatcacaaaaaaaataaaaacatatcagcataccttgctagttttcttagcttgctgtgaagagctagctccttcagtccttatagactttagcatagattctagatttagaacttgtatcctgcgcttgttctcagcaacattttgatccctcctcctgcctcaaaacatcctcaccagaaagaggagaaggtgctagtctaaattctgttgtgccatcaaatgattttgtatctgatctaaatctatgatcagcatctaaaaacctgcgatgtgccatgtaagaactcttgctgccctttgatagccttgtataaccggtttctatgtggcaatcagtgcaagcaacttcacctgaagttgtgcatccatgaaaatatcctaagccgggatagtctgatatggtggttaatactgcagcacgcagttggaaaaattcacccttagaagcatcataagtcctaatgccttcacgccaaagagattccaaatcatctattaatggttccatgtagacatccatatcattaccaggggcagttggaccaggaattaacagtgataggatgaaattaggttgtttcatacacatccagggtggcacattgtatggaattgcaataacaggccaagtactatgggtagaattcaaggatatgaagggattgaagccatcagtagctaacgctaatcttatattacgactttcattaccaaaggtaggatggactgtgtccaagtgtttccaagctggagaatctgctggatgtctaagcaatccatcttttgtacgtccttcatcatgccacctcatatttttggccatctctgggttaatgtatagtctttgaagtctttccttaattgggaaatacctaagaacttttctaggaactttgtggaaacgttttccatcaagactctttctttccatcttccatcgagaagtattacattttgggcaagaagtataattttcatactgtttccaaaataatatgcaatcattttcacaagcatgaatgttaatgtagccaaaacctagagatttaacggccttctttgcttcataaaaatttttaggtagttctgcaccttcaggaaatgcctctctaagtaagtccagtagcatgtcaaagcttttatcactccatcctcctagaaattttgtatgcagcaaacagactaagaaatttagtttagagaaggtcttgcaaccagggtacagctcctgacttgcatcatctactaatctataaaaatcatcgacatcattattggcatcccctgaactgccatcagcagcacccccctcccccatttgatctaaaccatatgccatatctctaagcatttcaggaatttcatcacgatcaactgccctctgttctacttgaacttgttcatgtgtagtgcaatgtgcagaagatgatgcttccccatgaaaaatccacagccggtacccatgcttaaatccatcacatatcaggtgttcaattacaatgtttgcttccaaccatgaacaattaacacacttcttgcaaggacacagtattttatttccttttgctgaatgagtaaaagcaaattctatgaagttattgacaccacgtctgtactcagttgtgctcctgaaatactatattattagagtttggacaaatgaagatagtgaggctaaacaattccatgctagtaattgtgtgtttgtacctaggcagatccatccatctcttatccatgcttgccttttataatgaaatactaaatgtctgaatataaaatgcaaatatttgttatgatactgcaaaaacacaaatggttgccatagctctcaagctcaacaagcattctagtcatacattcaaaaggcaaaacatcgtgtaaaaaaaaactaaagtatgtaaaagtagttagtaaaccacatagaagtaagaaaaactgatgtcaaagagtaagggaaacacatgtaccttttagttgtgcgtttgcttgttaatttgttctggtttgcttccaaccttgttggtgtctctgattactcagcaagaccttctacatttttggataataaatacaaaattttaaatgcaacctctgcgatatattttgctcttgtgcaatgcaattgaaaaattaaataatctgagtgacaatcctcaggttcagaaaagagcatctgtatttctttttacttaagccactgaacatttgtattttcagatgaaataccataaacaaaatcaagtagtcaccctgtttatatgcagtacaatgggttagttagataccatatcacttaaggtaaattttgttaattgttagcacaaataaaaaggcagctatacacctaaatccagacaaagaatggatgctcgcatttgatggtctgctgctttacttacataattagaggagccccctagtcataaactaataaacagagaaggagttccacttccatacctagctaaatatgtcagggaggtcaagtagacaagaattaagcaaattccaccataactactgaagatagatctgcaatggaaaaggtagaaaattggttatgccagggtgaaataagcacacatgagtagtaacatctcagaagggatgggacaacaaccaattggaaaaatattccttttacaaagacagtaagaaccatcatctatcatttctaccccattagtaaaattaaaaatcttagcacaagactgaacataaaacagaactgttggtaaaatttatttttaccaacagactgtgtgacaggatattttccgacagacaaagtgacatctaaatttttttctactgacagacgactgtcttctttttagtgttgtggtgtagtgtgtactcaccgagataaaatttcttgacttcaatccaaattctcgattacagcaagacgggagacttagtcgtacgctctgtactttctcggtcgacatcaaagattgacttagacaaaccctttcggtacccgcacgaggctgataaaggaagtctaacgttatctctaaactcaccgagaacggtcacgtgagctcgataacagttcctccaaagtctgcgtattgagaatatgaactcgtttatttgcatcgaagtcgggggctactgtcagggttatggataccacatacctaatagtagttgactaaatctcggcaggatccaccacataccatgtcttatacggaaactgacctcgagggagttctgaataaggaaagacaaccatagttctacatggaaacgacaaggactactcggattatatccatattagtttccctaattctacttggacaagttgacacctatgggtataaatacaagcccccctaggaggagaggggagacgaacaattgacgatcaacacgatcaacacggacaacacagacgaccacctcaatcaacacacctaccacaatatacggaacaacacaagtcacaacatacaagccaacatactccaagacaagtcgccagatatcaacttcagggataggcatggctattcccctacggtatctccggatactgtcaggagagacgaaagcgctatctctaatctcgccggacacggattcgaggaggagggctaccttgttgtcgactatgagtcagaacttcataccgccatgtcgacaacagttagataggctaccccacatattgcactggtgtgattatggtgaataaaagcaataccggctccggccaacaggatgtagggttattacctgacaattcaggggcctgaacctgtataaaaatccctgtctccatctcttttacctcagtctcgtgtatatcctagcaccaacgatccccatactgtccaaataccgtagtcgtgacatcaaacgtcgacaagattagctatagatgatttggagccatcaatgggctatactattaaacttgctctcaaaaggcgagcagcctaggaggtagtgccgagccaaggagagggagcggagcggccaggcaaggaatcgtcgggggaggaggttgaggaatcgctgggcaggggagacggcgcggctgaaacgggccttgcggcgcacgcgcacgcgtcgggaggtctgtgaagagggtgggcgaaaggtggcgggatggcagcgagaagtggtgcaagaggagggccaccccgtgcatgcgcgtgggcatgcggcgcggccgagacgtgcgcctgtgttcggcgtgcagtgtgacgcgttggctcagagaaaacgatcgatgctttggcttggagtagtgacagggagaaaaacaatctaatgggcttttggcacatggatatgggtctctccgggatggctctatcgtttcgctccgtgtcgcttcagcgttggtacgataggcaacatggatgaccatccagagctgatcaaacggctgtaaatcaagtagatggtgtggcttatccacagctcagtaaattgataataactggactaagtagggatcacttgtataatattataggattcaaggcgtgctgggtgcctatatatggtagcgcccttaccagctccctgctatgccaattgctaataaagaatgaagaatagtacaactccaaaatatgtcaacaaccttcaacacaatctctattttatttggaagttggaactagtagtatacttggtcgttcctcggccgtgtacatattgattatagatctagaggccaggttttaatcccttattaaaaaatatatagcaggatatttaacactgtgtagtttttggaatttatagttctgtgattctgatcacttcaaccaaaactattcacataaacaatcttttgggcacacgtttttttttcttgtggaaaaatttgcccaataatacaatccatttcaaactactgaagtaatatgaccagaaacatgttgacctggtcatccctggagcatgccatacatgcatggcagtatttctagacatgacagggctttcttggtagccacctgcatgagacacacaagcaagtctgcatcagacatccgagcttgctctacttatccctaataaggtgaaagtggagacaacatttagctccatttcacaattttcactcagggaactccagatgcctccaactcccagtcatacatgccacactggtggagaaaccatctttagtcggtcgaccaaaatccacaatagtcccggttccactaaaagccgggactaaagatcatctttagtcccgattggtggctacagtgggtatatttgatctttagtcccaattggtaatagatcatctttagtcctagttcgtatgttgtccggggctgtcaggccctcccgtgatctttagtcccggctggtaacatcaaccgggagtaaagatcaccgtgatctttactcccggttggtgttaccaaccgggactaaagttaggatttttagtcccggttgttaaacaaccggtaaaacaaagcctctatccacgggtgcgtatgcaagtcgcctattaattccatccttatctcctcctctcccatccagccatcctctccatcttatcttcttctctcctcctctcctcccatccttctcttccttcttctctcaccccatctcctcccctttcctccccctcctctcctcccttcccttccggcagggcggcggaatggaggccgcggcggccctgggcggggcgacgggatggaggccgccgccggcggcccggcgcggggcggcgagatggaggcgacggcgggctgcgtcgagggcggcggcggttggctacgtcgggcaggaggcggtggccggcgctggtcgggagggcggcggccggctacgtcgggcgcggggcggcgagatgggggcggctggcgccggtcgagagggcggcagccagcgccgggcgggaggtggcggccggcgccggacgggaggcggcggtcggctgcgtcgggggcggccggcgccggtcgggaggcggcggcaggcggagaatttttttttctcttctctgtgctatctgatgaatgctgatttcctttctctgttctctgtggtaaatgctctctcttttctctgtgatgaatgctcattgttctgaagatgttgtagatctgaataagtgtaaagaatatggatgctttgttgtttgattttattcatttgatctatgatttaggctttgttgttgattttattcattcgatccacgagcgaaagctaaagaacaatcaaaaaaagaaaaaaggccaaccggatgaaaggaaaagaaaaaaaaagaaaaccaaaactttttagtcccgattagtaacaacaaccgggaccatatttttagtctcggttggtgttaccaaccgggactatatatcgatctttagttccggttatttgaaccgggactaaagataacaccaaccaagactaaaaattgatccgggactaaagattgtgatctttagtcccagattcatagtcccggttagaaaaccaggattacaaagggttaccaaccgggactacaaagcgtttctccaccagtgccagtatgccactaaaatgcatatgcatggcagttctcacttggcaacagctagctatctactggtcgcaagcggccattgtttttatatgccactgatgaatgacatgtcactttttttatacttggtagatattgcatttactagttggatacttactccttatttattttgttgcaagagacatttacaccttctctatttgtgtttaattacaaacatttggaataaaatagatcttcgttaccaaaactctgcaggtccacgttagtattggctaaatgcctacgattgtaagatgagttaattttttacggtcacaactatatgattgcatccttcgcattttacaagtgttgactaattcgattccgtgctcattctcctataaacaaatttgaggaaaaagaaagaataagcatgaatagccatgtacatacatccgggactctagactatataaaaatgtgtcatgaacccataaggctaggcccataggcagcccatcctagttaaatttgagataggattattagttagagaaaggataagattaagtattttctcgattaaacaatggatatcaactagtctaatctgtctctactattactattaatgttatcattactgctgtaaatatacacaagacatactaacagtaccattcttcttccgaaaaataatgtgtccatgtgcatttggtaatgttacttgaccttattactgattaaccggctgtaccactgtgcctatagctagaagtttgttgtgattaaggctaagttctaaactccaactccaaactgaagcttcctcgattttcgttaacacgtttttttctaactagtaaacaatgtgctttgcgcaaaaattttctatatagaagtttttctagaaaatcaaaaaatatatttttcaaatttataatagtcaatacctaattaatgatgttttcatgagccatcatgttttacgtgctgctaatatgctcctccaatatggagattcaaataagccataagactgcacgtctgaaaatgtttaccgatgttaactcaaagctaagcaaaattgtataaaccaccccaacggagtagctgctatatattaggcccatagaaaggagtgctatatagctgctttgtgttttcctcatagtactatctatcgagactgtgagcaccgatgtttcctttagggtttggaggcatacgggatatttctgtcattgttaaccaaacgtgtcgtagtacacgccctgccgtacgttggttcctcacgtaatgatatctatccacgtctgcaatgctgctaaattggatttcatgtagcacagggcatcggtgtgctggttttcgatctacgatgtcaccgttttcagttccatgtgcaaattgcaaatactgaatgaaaaattctagtacatgacgatggcaagctttcagaacaatctttatttcttttggacatagcaaggtgttcagaactggtcgtagtctttcaaaagcaaattttttcactgtaagcaaaaatgttcagaaaaacaatcttttgcgcactagtactagagttgaaatggcgagtgctttgaattactgaatatagtaaaacacattcatatggccctatggaccatatcaaacctgtcagtttcacacgcatttttcctccatgtgttcagcctcgcacgaatcagagaaaaactcgcatgttatttatcatggagtaaaaaggcagagttcaacaatccaaaacaaaataaagcttcaatgtactcattcatgatgttgtttttggggtatttagaatcataggcacaatgttgattttcttagtttgccctgtttcttgtccgggttggccactagatcaattgaggacgctgcgctctggacggaacgcctccgtagtgaagacagaatcattgtcgactcctggaaaagggctctttctctccccctctgatctaatgtatcctaaactcactgtactttcctcctctaatgaaattcaggtagggaaaccctcccctccggtggaaagtatgaaaaaaaaactcattcaccttgtgtctgcactctgatgaaacattttggaagaaatatctgccatgaatcaagagcaccagtttctacccttgtcatctttgcaagcagttcaacgggagatggaaggacaatgagtgatcttccttatttatatgtgcctacagttcactttacaatgcatatttttcaaagcaagtttagctgtaaataacacatttatctcatgatctaattccaagcaggcctgactgcattattttttttccacgtccctaacaaataaaaaggagggaagcccgttcctttataattttatttataagaaaacagaaatgtttacaaagaaatagattaaaggatttacaatgggccagctttaacaatgcaatttagtttccaacctatttacattgaaacggacaaccggatcatatacatatagctctcatgttctcgcactctcaactctacacctgtgactcatacatcacaaaggaagcccgatggtagaccttacaattaattactctttgtgagaactctcctatctatcccaaataaagtatccggtgtcataggtagcacaatttcacaattatcgaaattccagacgactcccactcccagtcatatggcttggcagaacatgcatctgcatctgcatggcagctctcacttagcaacggctagctatctatcagttgcaaacgtccatggtttttatatgccaatgatggacgaccaaccacttttttcagacttaatatcgcatttactatatggacacttacttctatacttggcttttttgcaccaaaaacctttcaccttatctatttttatttagagatagttagaataattctagaacttgtcacgagcagtatataagcggtccattgttcttctatttattagttttagttttgaacatcgctaaactagcgctactagagaaaacataagagtatttggacgtaagacattacaacgatggcacatatgaactctagtccgcctacatgccttgagtagaatatatgaattatacaacaaaatagtagttgacgcatacataatacttctcaatcctacacggacccttagctaagactgaaaaatttagttcaaattgttactttgatagtttgcatctccatccattcaaaaactatgacagcaaaaattaagggcaagtcggggtccttggtagtcaactgcgaggtttttgtgcttttgtactccttttaaagcaagccgtggtggtggtgtttgccgatgctagcaccacacctcaaaaagatgattgttgcatacacaccccctagtttatcgttggcgggctaaaataacgtccctatgtaaaaagatttggaattgtttggttaagactcctccgcctcctagtcacgcgctctcccgtccagtcctttttattttcctccgcttccctcttttattccacttcccctccgcctcccactctcgttactcactactcctttccccactcttccaccttacttcccctctctctcccaaacagccgaccagcgtcctcacttctccgggcagtgacggcgagcttcagaattgaagcagaggtagcctctggagcccatgggagcaggagcggtgaccacaaccgtggtggtgatgtgctagcacagaagcagcggatgcgccgccggcaggcttgggaagggcagatatcctgttggtgggctcgggagcggttaatccgccctcacgtttggcggagaggaggcgggtggtaccgtggtgacggcgtcaccgaagcagcaaccatgaccatggtggtggcagcgtgcatgtgtgcaggagtggcatatccgccgctgacgtgcttgtgaccaatggatcctccctcacgtgcggtggagatgaggcgaaaggcggcacggcgaccacaaccacggtggcaacgtgcggactcaggagcagcggatccgccaccggtaggctccagaatggtggatccaccgccagcaacaggggaagagaaagagccgaagagagcactttgcggttgcactgcccggtgaggaccttgctagggtttttatttttaagacaaactataaatcatcgagttgatggtccaccaatctaaataagttcacacatatttttcatgcttttacaactggacagaggaggcaccgtacttctgttctggtacatgccgtcctgcactactaaaaggttcaggacaaatatttgctcaggattgtaaccttttcttcagattttatcaccaatcttaattcctcacagaaagagggtttcaactgaacctactatatacatggcagtagcatagatgagaagatgctcatctgtttctgaacctaaaacaaacacacgatgaaaattaaattaaccgttcgttcgagctgatcgatcacgctgatctccagcacgaattgtgaagatatacttctaacttctggtatgtcgtctcacacttgcaatcagtggccagaacttgcataacttgcaagcgcaattatggtgaaaacggagatgcagaccatctaacgaaccggaaattaaaagcacagcatgtttgtattcctagtgcctcccatgccgacagtaaataaatacaaatgttggtgctcaagtctcggatgaaatagctttcgacttggaatgctactgcctctatcccattatatatgcgtaactgattttggctcaaatcccagaatatagggcggcacctgctaggctccgatttatacacattcaagcattgatgctcccttcagttcccttgcatacatatgcacgcattgaagacatcagcaaatgaaacgctttcataaaatttctcctagaataaatactttaaatatttgtattagaaatatatggagaccatatctatagattagtattaagataatactttaataaaattatacatttattggtatttctatatattataatagaaaatagtggttaaaattgttttttccttaaccatatccttcaaaaatgacaactattattaacccggatggaataagagcctgtttgctaggatcctagctcctagattcacctttgttggagctggagtccaatcaaacggtccatctctacccaaaaaaaatagagcagagccaaccagattgctgcagaaaatataactaactggatggagtggccttaaggtcgctctgcaactccggctctagcatttttacaaaactttgcaccgtaattatccgccaatgccattggatcatgccccttcgtcctcaacaccacaattggtgagtagcgactcctctcgataggccggcttggtgatagggttggcggcacccttgaaagagttcccagtggcggtgcacatggaggagcaggcggcagcacaacccgtcctcccctcctcttgcatctccttctccacacctgccccgaatggcggtagatctagcggcggtggcgagcggactcagaggtattagcggcgggcggtagatccagagatgaagaacgccagcagaaacttctcttcggttgaatcaccattgaagaccctagaactccacactccgtcacttcaattttgcacctgttttgtgattgatttgtagaaagtgttgtacccccaactccctccattcaattttgcacccattttgtgattgatttgtagtacctccgtttcaggttataagactttctagcattgcccacattcatatagatgtaaatgaatttaggcacacatatatgtctagattcattaacatatatatgaatgtgggcaatgctagaaagtcttataatatgaaacggaggaagtagaaaatattgtattaatcagtggggatgatttggtacgaggcttttttttctgattttgcactgatactgacacttgttgctagaaatagtcacttgttttagcatgcagaacgataaattagttagttcctaagaaattgctctaacataattattgtagatcgtacaagaacaagagccctctgcagagaagcttttcttgcactgtatctcgttatacttttaacaaaaggcagaagttctgcataagagaaaaatagttccgcagacttattatacaagagccatcagagaaacttagaaaatatattctatgtaagttagggctaaaagtactactctttgattattatcttgcgtggctaggaaggccacttgttcttcgctttacttcatcacaactatttcaatttctagctgataaaggtttatttgcagctaggccaccgcatcacggaaatccgctacagccatatcctagatgacaaattttatcttcctaatataactagaaaaaatacctatgcgttgcaacggtaaaatattttttatcgctatacacttttcagtcccaacccaccccgctatcttcctctacttggcttgcctctctttgatgtagcccaaaggggagctgtaggctccgcttgcatggtcgactgtcatatccaacctccggaagacagttctgtgtccgtacgatgccagaactgatcattcctatcaaatctggttgaatctttctcgatttcccaaaattggttaaggccttttgatacactcaatctcctccttttgtttttatcaaaatcgaaacggatctgcaattggttgagggattttgatacactcaatctcctctttccgtttttatcaaaatcgaaacgaatctggaaaactaggatagaatggtgacttttaaatggtgattaaatccaataaattaaagcggaattgaaagggaaaatcatatggggaaatgataagggagtagtggggaatcgacttttgcaatcaattggaggaaagaacgtatgaggaggtagatcgacatagcggcgatgttagggtttcgtcctatgaaaaaaaactgagcagataaaaaacaatccctaccagcctaacgatagaaaattcgtgcaaataaagaacaaatcattaccgtttgcgcacgtactcttacgcatgttaaagaacacgacataaaaaacggacgaaaaaaacacagaaaccttgcgtatttttatattaggtatagatatagatatagatagattaacgagcaaagctgttacgggttcgaaaaaaacttccgtgttttacctttggcaactgcttatcaaccttttagacatattttgacatgagctctgttacgtttgtatttccatccgtgttgatgagtatgtgtactctcatggagaaatcccatcagcaggctgcaagcccatttattgttacgcccagttcatatttggccgagtttagtttcaaattttttcttcaaacttttaactttttcatcacatcaaaacttttatacacatataaacttccaacttttcagtcacatcgttttaatttcaaccaaacttctaattttaacgtgaactaaacacaccctttataccgatcgattacttgctgcatgatgacaactaccgccctcgttacttcgccatcaacagcagtggctgatcaaagctatatagggacagttgctagcacatttccccagctatcacacatgagaacttcccaatatgcctcctagtccaagcaagtcctatagctgccacctttgctgttcctgcgtggctcctcgaggcacaactagttttgctagagaaaatgccatggccggttttatatatatgcctcagagaaggacatcaagcaaatgaatttcattgcataaacacttattatattttggggtccattggatttatgggattctatataaatttcttagattaagtgcaagctatatacgtactgagattaccagatactccctccattccaaaatataatgtacaatcacccttaacccaaagaccaagaaataattattattatattgtagtttggatcatcctaataaatataatgtacgcatccaataggattagataacatgggagtggaggatttaaaaaagtaataatttaatggagaagatgttatagttaattgcatgcttgcatgcatgccttatagtattatggaacatctaagaaaagtgtttgtgtcttatattatggaatggagggagtaatttctaagatcaagttgcaaattggagtactaattaatacaggtagttactctcggttaaatagcgtacgtgcatacacactcaaaaaagttactcaaatctatacattcaatatatttacataaaaacatgacacattatcatttattagcaactgatacattaattttaacatgcaaatctgcaatttattacaagcaagcataacaaatcgtccttacattattttcataatatttcaacatatttctatcaaatatcaaatcctatatttcttattcttcattcagtttggtttagaattgtatttttttagagaaatagtaattgaatagtaattcattagttcttctattgcattatgtgctctaatatgtgtcgggttttttttcgtcttacgaatgttgccaaatattagtttccctattggactatgtgatattgccctttgcattacttatactaatattgtaaagttgaacgtaaaaattattgttctagctgaatattgatcacgttgtattctccaacatgaacggtgaagagacatgctgctagcttgcataattggctcacagtaatccgttgtggaacaaaatccaacatgattagatgtaactgcaatcatagttatggtggagatggagatgccaaatcaatcaagcgaatcaaaacaaggatggcgtacgtcttgtttttctactaccttcgaagtctgaactctgatgaaacattttggcagaaatatctgccatgaatcaagagcaccattttctaacctagtcatctttgcaagcagttcaacgggagatggaaggacaatgagtgatcttccttatttatatttatatgtgtctacagttcactttacaatgcatatttttcaaagcaagtttagccgtaaataacacatttatctcatgatctcattacaagcaagcctgactgcattatttcttttccacatccctaaaaataaaagcagggaagcccgttacgttataattttatttataagaaaacagaaatgtttacaaagaaatagattaaaggattttcaatgggccagctttaacaatgcaatttagtttccaacctgtttacattgaaacggacaaccagatcatatacatacagctctcctgtcctcgcactctcaactctacccttgtaactcatgcatcacaaaggaaacccgatggtagaccttacaattaattactcttcacgagacaattctcctatttgtcccaaatgaagtacccgatgtcataggtagcacaatttcacaattatcgaaattcctgacgactcccactcccagtcatatggcttggcagaagatgcatctgcatctgcatctacatggcagctttcacttagcaacagctagctatctatcagttgcaaacgtccatggtttttatacgccaatgatggacgaccaaccacttttttcaaacttaatatcgcatttactagatggacacttactcctatacctggttttgttgcaccaaaaactttgcaccgtctctatttttattcggagatagttggaataattctagaacttgtcacgagcagtatataagcgatccattgttcttctacttattaggtttaatttgaacatcgctaaactagccctactagagaaaacataagagtatttggacgtaagacattacaataatggcacatatgaacgctagtccgcctacatgcctagagtagaatatatgaattatacaacaaaatagtagttgacgcatacataatgcttctcaatcctacatggactcttagctaagaatgtaaaatttagttcaagttgttactttgatagtttgcatctccttccattcaaaaactatgacagcaaaaattaagggcaagtcggggtccttggcagtcagccgcgaggtttttgtgcttttgtactccttttaaagcaagccgtggtggtgtttgccgatgctagcaccccaccactaaaatcttatgaagaaaataaaacgttatagaagttcgctatcaaccagatacaaaacgctctacagaatcagcataggtgagatgcaaatcacccagacggaatggatggataattgggtatatagattgatgaattgctctaatttgttgaaaattaatcccaacgatggtaaaacactataaaaaaacgacttttgcatacacgccccttagtttatcgttggcagactaaaataacgtccccatgtaaaaagatttgggtagtgtttggttaagactcctccgccacctagtcacacactcccccatcctctcctttttattttaatctgattccctcttttatttcacttcccctcctcctcccacttgcctcactcactactcctttccccactcttccaccttacttcccctctcactcccaaacggccggccagcatcctcacttgtccgggcggtgacggtgggcttcagaattggagcagaggtagcctctggagcccatgggagcgggagcggtgaccacgaccatggtggcgacatgctagtatgggagtcgtggatccgccaccggcaggcttgggaagggcagatctactatcggtgggctcgggagcggttaatccgccctcacgcttggcagagaggaggtgggggggtgccgtgatgacggcggcaccagagcagcaaccatgaccatggtggcggcggcatgcatgcacaggagtggcatatccgccgctgacgggcttgtgaccaatggatcctccctcacgtgcggtggagatgaggcgaaaggcagcacggcgaccacaaccacggtggcaacatgcggactcaggagcagcggatccgccaccggtaggctccagaatggtggatccaccgccagcaacaggggaagcgaaagagccgaagagcgcactttgcggttgcactgcccggtgaggaccttgctagggtttttaacttcttttgttttttttttatttttaatcgtttagtcgggtatccttactgggcgctagcaaaaaaaaaaggatctttgcaagcggccttctcgaaaatgattttttgtatgccattgtggtggcctcacatggaaatgccaattttcgcatacacttggtgccaggctggtggagcacccacccgcgaaaactagttccagccgtgtacaaagatttctatagtagtgtaatttgttttccacaaatatacattatagcttacactgatatacgcagtcaagaaaagtagttcctgtctattcaaaatattactccctccatcccataatataagggattttgactttttgtttgcactgtttgatcattcgtcttatttttaaaaaaaatggaattattatttattttatttgtgacttactttattatacgaagtactttaagcacaacttttcgttttttatatttgcacaatttttttaataagacaagtggtcaaacagtacaagcaaaaagtcaaaatcccttatattatgggacggagggagtaacttggaatgctaaattctcagcccagcaaatccatactaaaatttggctcccaaatttatttttagaacaaactataaatcatcattgagttgatggacccccaatctaaataagttcacacatatttttgaagcttttacaactggacagagaaaagggtctatttggagaagacaccgtcctgcactactaaaaggctcaggacaaatatttgctcaggattataaccttttcttcggatttttttcaccaatcttaattcctcacataaagagggtttcaactgaacctactatatacacggcagtagcatagatgagaagatgctcatctgtttctgaacctaaaacaaacacacgatgcaaattagattaaccgttcgttcgagctgatcgatcacgctgatctccagcacgaattgtgaagatatacttctaacttctggtatgtcgtctcacacttgcaatcagtggccagaacttgcataacttgcaagcgcaattgtggtgaaaatggagatgcagaccatctaacgaaccgtaaatttaaagcacggcatgcttgtattcctagtgcctcccatgccgacagtaaataaatacaaatgttggtgctgaagtctccgatgaaatagctttcgagaatgctagtgcctctatcccattatataggcgtaactgaatttggctcaaatcccagaatatagggcggcacctgctcggctccgatttatacacatgcaagcattgatgctctcttcagttcccttgcatacatatgcacgcatttaagacatcagcgaatgaaacgctttcataaaatttttcctagaatagatactagaaatatttgtattagaaatatagagacgtgccgtgccgggcggcccagctggccatgtataaaccagatacacatcgaactgcttccctggtctctgcgtccagggtagttaagccgtaactaatgggatgaacggagtatatattaggctcgtaggaatgaatgctatatagtcgctttgtgttttcctcataaagagcaagtcgtccttgaaaacaatattgccagtagtatctatcgagattatcagcaccgatgtttcctctaggattggaaggcgtccgggaaattttctgtcactgttaagtgaattgtcttaaaacaccttctgccctatgttagtatgttggttcctcacgtacatttatttaacctcatttccaatgctgtcaatttggaactcacgaagcacagggcttgggtgtgttggttgccaatcaacttggagttcttgatttgtgttgtggattgggattacgagctgtctgaagggggccactcgaagcataccaacgtctcctttttttttaaattggaaagagtacataggtgttggttttattacggccaatgatgctgggacattgccgctggatgattggtgacggttccaaaaccaatacctatatcgggtttgaaactgccacctattgcataatctgcgagaatgtgtattcaatagtaatgatatctattcagtagtgtctattaggtgcaactggcacctagctaatatcttgcattagaaactcatagatataaaagtctcatacaacaaatttctatacttcaaaatttatatgtttttatattgtaggccaaaatagatttttttaatagaaaggataccggagaattttacaagagaaatattttcatgcaaaaaattcttgggggaggaggcgccacatctgttccaatagaagccatcactgctggagggttctgacacttatccccaccttcgacacagtctcaaaataagcaatgggtatagggtggaaactgactttgtttagtttgcagttgtgccactgatatgtgggtcctactttg

SEQ ID NO: 7730 - DNA, 756 bp, Oryza sativa
caaagcttttcgataacctcgcattggcagtacctgctccatgaacttaaatcctcatgcactctaggcgtccatgtttctagcagtgagaggagttctggcgctcccgggaaagagaagtctcacacacatattaaatttatggttcaagttaagttctctctcacacacactcatggcagtcctaccaatggcgacaccgatgtagggcacgcctcttggccctacctcaacggctgtcccatcgtagcgcacctgcctcactcaggggtgaaccatctatgcagggatactgcctccgctcggctatctaatccgctaggtctatacccattcgagaagtacggttgtacgggggtcgtttcatgcttaacttcatggctcggtccttaattgaccggggacggtactagccttttccagataccacccaaatcctcggtccgccccagtcgaaaacagttgtttaattttatttctcctttcacaaatcatgtcatcaacatcatggcaatgtggcgctcatgtctccacgtgccgcatctcaattaccttcccaaaagtaattgcccaagcatatagcatttgataaatatgagtatgcatgattctagtatagcatttctaagcaattgtcataattgactagggactcatacgtaatcaggggtacaaggattttaagggtttttaagcaataaataaggcaccgtattatcacaagtaggacgttcatcatttgcatgcaattttatt

SEQ ID NO: 7731 - DNA, 1397 bp, Oryza sativa
atctggtctttcttttcttgccggcatcggctggttctctaataagcccttggagaagagctaaagtcttgggggcattatagccgatgacggggggagatggcccacctctgttggggatcagtcctggggcatactcgatatccctgccgctgttgctttggtgagggggagaggattctgttgtctgcaaatcaggaggaaagttagctaaggactaatcaaccaagtagttattcaaataaaatcaagtgagttaggatttacttgaggaagaatatctggaaagagatctgtcatatacatggaagccgattgatggaataagtgtagcttccattcagtccaccatctgtcaaatgctttgctcctaaaggttgccagctttgtggtgtcaatgctgcctagaggaggtccttggagattgagcagccgatccatcattaaagatgatgagatttctcctcggcattggatcttatcggcaaagaataagccgattaggaggttgcccattccaaattgtctggcagaactcattggatgataaaactcgtaggaaacttggatgtttctcccttgatgaatgccgactggaaggatgcatggggtgattgcagataagaagatttttctgggcttttgatatctgtcattgttgatgtcttcaaatctgaagtcccatggattttccagaagtgttgagtctccatagagaaaccaaactcgagcatccttttggaacccctcataaaagttgcaaaaccagtctttgagcagctcagccgatagttttgctcctgcatcagttggtgtagaggcgtactctccatatgatgtgcatctccgatgagtgagttcttctccgtcatcgttgacagtcggctctaatcttgggaattcagtttctgttatagatggccgattgacgaacctcatgactaccaagtttagccaggattgcagcagccaccatggtccacccgctccgactactgagctgacaattagcttagccgatgcattattcagcatttggtacaagtagctgaggagtattttgcctaaaggaaattgtccttttgtctccaaagcttcggctatgaactaccaattggttgtaggaccgcagctagacccacaaaagagaaacttttctaaccacattaacaggaaagccacatgttctcggggggtaactggaccctagcccatatatgctgctacatagcctaaccagctgcctatgctcttggtcttgaagtcatattggttctttgtattcaaactcatagggttggccgatgaggtgacatccagacccgtgatcatgctgatatctatgagagttggggtcatcagcccttgattaaacaaaaatgcattgatggtgtttg

SEQ ID NO: 7732 - DNA, 9636 bp, Oryza sativa
  unsure (1)..(9636): unsure at all n locations
atgcggcagcggcgcggggcgcgagtcgacaacgcgatggcgaacggggcgcggggcgcggggtgtgagccggcgcgcggggcgcaaggcgacggtacgggtcgacagcggcgacacgacagacgcgcggcgtggcgacgggacggtcgcgcggcgatggaatgggcgggcgacgcggcgcgggacggcgatgcgcggtgacggctatgcgtcggatggcgtggcaacgggacgggcgcgcggcggccggtgatggcgacgagcgggcggctcggcacggggctcggcgtggcgacgacggcgacgcgacgggcgagcggtgcggcagcgggatggcgatggggacggcttggcagcggcggcgcgcggctcggagcgacgatgggacgcgcgcggcgacgggacgggtggtgacggggcggcagcggtggtgcgcggcacgaggagggatgcgatggtgacggccgagcggcgcgcggcgcggcaggcgacagcggcacggcggcgggtggcgacggcgatggctcggggcgcgaggcgcgcatggcaggggaggggaaggggctagggaacacggtcgagcacgtggcggccgatgaacagtgccctttttccattaaaccgattttagagtatttcccatataaatttgatttcacaattcctaattttacatatatgcattttacttaatattcgtgttatcttaactaatgaattcaccctagattaatattactcatattttatttttatataatttatttgagctttaattagggttaattcttattccatcgcaatgaaatataattgatccaaatatggtcgcgataatattttatttattactatccacacctaatctttatttttaatttatatttattttaccaatttgtttttaaggtttatttctaattaactattctttactcacgattaataatcctcgagatcaactccagataaaatagacgaataagatcggcatgatgcaattagtttaaaaagtttttgaaaatccatatttttagagtttttgttttgtcggtcgaattttcagggtgttacaaacctaccccccttaaataaatctcgtcccgagatttcttaccagtcttcgaataggtgcgggtattccgtcctcaaaaattcttcactttcccaggtggcttcctcctcagtgtgattgctccattgtaccttgtacatacgccacactttgctcctagtcctctttgcggcttcatccaatatccggatcgggtgttctggatatgtgagatcattgctaatgtgaacctcttccagcggagcttgctcttccggcactcgtaaacatttctttagctgagacacatggaagactgggtgcacatccgcgatattctctggtaactgtaactgatatgcaacttctcctcgcctggcgatgatctggaatggtcccacatatcttggtgccagttttcctttgaccttaaacctttttgttcccctcatcggagaaacctttagataaatgtaatctccctccttaaattccaggtttcttcttcgggtgtcggcgtaactcttttgtcgtgattgtgctatttttagacggtcgcggatcaagcgaaccttttcttcggcctcttgaataatgtcaggtccaaataccgcccgttctcccgtctcggaccacattagcggggtacgacatcgtcgaccaaacaacgcctcgttgggtgacatctttaggcttgcttgaaagctgttgttgtaggagaattcggcgtagggcaaacatctctcccaatccttgctaaaatccagagcacaagccctcagcatgtcttccaggacctggttggttctctccgtctggccatctgtctgtggatgataagctgtgctaaatgcgagataacttcctagggcttcatggactttctcccagaaatgtgaggtaaattgtgtgccccgatcagatataattttctttggtacaccatgaagacatactatcctggtcatgtataactcggctagcttagcactgctataatttgtcttaacgggaatgaatctcgccgtcnnnnnnnnnnnnnnnnnnnnnnnnnaaatggaatcatatcctgttgcggttttgggcaatccaacaataaagtccatacctatctcatcccatttccattcgggaatcctgagaggttgcaacaaacctgccggcctctggtgttcagccttcaccttctggcatacgtcacagagtgctacgtattcggccacatctctcttcatgttgggccaccagtatccttccttcagatcttggtacatcttcgtacttccggggtgcaatgaatatgccgattcgtgagcttcctttaaaattaatcccctcagtccaccctgttcgggtacgtaaattctctttttataccatagaacatctttttcgtcggttgaaaattcctttgcacgtcctgcagctaagcgttccttcacctctcggacttcctcgttgtccttctgggcttcttctatttgggttctcaaaagaggttgaatgtccagggtgtttatctgtccacggggtactatatgtaggttcagctgagctatttcctccctaagctcagggaccatcccttccattctcagatgattgcaatggatcttacgactcagagcgtcggccacaacgtttgctttgcctgggtgataatgaacctctaaatcatagtccttgattaactctaaccatcgcctttgcctcaagttgagatctgactgggtgaagatatactttagactcttgtggtcagtgtagatatcgcaatggtttccaatcagataatgtctccaaatctttagcgcatgaaccacagctgcgagttctaggtcatgggtagggtagttttcctcatgtggtcgcaattgtcgcgacgcataggccaccacttttccgtcctgcatcagtactcctcctagtccttgcctcgacgcatcacaatatataacaaagtctttcctgatgtcgggaagaactaaaataggtgccgaggtcagcttttctttaagctgttcaaagctttcctgacattgttctgaccatacaaacttcttttccttcttgagtagttgtgtcatcggtcgggctatcttagagaacccttcaatgaaccttcggtagtatctagccaagcctagaaaactccgaatctcagtcacagatttgggtgctttccattccgtgacagcctccactttagcaggatccactgctactccaccggccgagattacgtggcctagaaaagcgacttcttttaaccagaactcgcacttgctgaattttgcatataacttatgcttccgaagtttctggagaaccaatcgtaagtgttccgcatgttcttcctcatctttggagtagatcagaatgtcatcaatgaataccaccacaaacttatccaagtattccatgaatactttgttcataagattcatgaagtatgctggggcattggttagaccaaacgacattactgtgaattcatacaacccatagcgtgttgaaaacgcggttttggggatatcctcggtcctaatcttcagttggtggtatcctgatcgaaggtctatctttgaaaacaccttagctcccttaagttggtcgaagaggttactcaatccgtggtagtggatacttatttttgatagttacttcgttcagtgatcggtagtctacacacattctcatgctaccgtctttctttttaacaaacaacacttgggctccccaaggtgacgaactggggcgtacaaatcccttctcttgcaactccctgatttgctttttaagttcttctaactcattgaccggcatccgatatggtctcttggatatgggggcagttccgggtatcaggtcaataatgaactctatgtcacgatctggtggcattccaggtaaatcttctgggaacacatcaggaaatcgctgcactattggcattccctttaggggtagcatggtaaatatacctccggcacgttcggttagcctaggatcttgatccatggttgctctcatatccgatccccagggtgtggtcagggtaacttctctacgtctacagtcaattactcctctatgctttgctaaccaatccatacccaaaatgacatcaagagtttggggtattagcaccataagattggagggaaataccacatccctaaggcggatgggtacgtcaatgcaagctgtatccactgctatctcacccccaggtgaatgtactaacattggttgtcttaatttaactctggttaaattgtgttgttgacttgctttcaaagatataaatgaatgcgatgctcctgaatcgaagagaactttaactggagtggagttgagtgaaaacatacccatcagtacgccttggtcttcctgggcctcttcagctcgaacatggttcacttgcccgcgtccaaatccggtagcggtcctgttagtctgcggagtcctgaatagacctcgtccagcagcaggggtagcagtaccgtgaatagccgttgcattagctccggtacgaatgggtgtcttgtttggatgaggacatttattagcgaaatgcccatactctccacagttgaagcagctccctggccttactgatccagtggcggcctgattcggtgtaggagcgcggttctgaatggtaaccggcctgtggaaattgctggaggcggcaggtcgactggttgtcaccactgttggtctccatgctgagggggttgtccctttagaacgctggggggcggtctgaggcgggcggttcatggcaagcctccttttacgattgtgctccactaccttccggtcgttctccagcctgacgaccttattgattaagctctggaaactatcgtggtcttgtccaatcatgggcccgcgtaactcgtcattcaagccttcaatgaatttgtcgatcttttcctcttcgtcggcaagatctctagttgcgtagcgcgccagctgagtgaaacggttcaggtactcttgtactgtggtattcccttgccgtagtttcctgaactcgttcttcttcatccgcatcaccgcggcaggcacaaagttgtcacggaaggctgtggtaaattcctcccagtttggttctccagcatcttcttctcgggcttctttgtacgtgtcccaccaatctccggctggtccttccaattggtttgccgcaaagatcaccttatcggcctcacgtactcgaacaagagttagcttcttctcaatgatccttaaccaatcttcagcatccataggttcttcagctgtggcgaatgtgggtggcttggtcctcataaactctccaaagcttgaccctccgcggttgccttggttgctcgcgatagcttgcagaagttgagtttgggtggccataattccggccagagtgtttaagtcgggtgtctgagtttcgtcattgctggttgttgcccgacgtcggcttgccatctgtgtaggttgatggagtaagcatcctaattttctaactagctcctatggctttatcccattaagggagttgtgtcgatatgaactttgtttcgcaagcatggtggaataaactcatttacaacacaacaacaatagatatcataaataacatcacagagtttcacaaatggtacataaatcatgatgcaattgactgcatatatacgcagtccaaataaggttcatccaaacgatacatcaaaccaatcatcaaactactcgtcaatctaggtaagggaagggggtgtctcgcatactatccaaaaaccatctgatacgagatcgaagctgcaaggagtccgtcagtctagtcctccagccatccgcaggatcccggggcaggtagagggtggtcgctggctcgcgcaaaccggagtccccactgctcaggggtagtggcctctggatctggcttaggcctcttgcccgggggtcgtgtgctcttgcgagcagtgctgagggtgcgagggcctccgaggaagctgatgcggggaacaggggtctcatcctctgaaggatcagtgatgtctggctcgatctcaggctcggcgtcggtcccctctgtctcggagtctatctggatcggagtctccaaaccgaaacccagctgcggagaaggtgtagggatcagtggagtgtgcaccaactccggaacaggtggctgtgccgctgtagggtccactaggtagggcgctgactcggtagctagcatactagcctctcccagaagagcgtggaacgccggtgggtacggcggggtgaggaagaagtagcggtcacggcctactgctgtggaagtagaagcccctgtagtgctgatcttggctgcttgaagctgctcctccagctagctgacgtgctcctgactctctctcagctgctcctcaagagtatccatcatcccgcggcgatcgttgtactggtcggataactgctggaactgatcgccgtggacctggagctgtgcctttagtgagtctatctcactgccccaagcctggtgctcctcctccaactgaagctgctgtgctgtgaggtcggtcacctcagtctctaactcccccacacgtctctggtggtcgtcaatctccaacagagcctcctcgtagtagtcatctactgcctcagcccatcgtgacaaccgtgtcaccatcgggttgtagcagcagggcatgtcctgaactgtgcaaactgagttgccctcctcccggaacgggtgatgagcaaactcggtactcactaactcagctcggtggatagagctgagtcggaggaagaccttccgggcggcatcctgcatcgcggtctctggcaggtctcggtggtgacgtgtctggaagctgtagtccaactcgaaagggactcgggggtgaatctcgacccgagccctcccaaactgagccacactgtctcactcggtatgacgggaacccagggtatcgcagacgcctcaacatccgatgcagctcaatgacatacccctctgattgaggtaagctcaactcccaggtagcgggtgaatccgaatctgccatctaattttaagaaaaacccaaggtcagttgagagtaaaacttgttttgtaaagggaatagttaagagtaagatgaaaagtgtaccgagttttgtaaacatagagtttttatttttgaaattattgctaaatgggaatttctcccttggccaacttagaaaaggggtggggcgccttttggtcttttcctacagtcgtatggctctgataccagctctgtggacccccgtttttataacaggaatcaatcgtgtaaacagtaccatttccctggatcaagtagtttggtacacacgaattcatagctgaaatatcaagtgcacatacacgagtgtctgatacgaattattacatcacaggcccgcatgcatagtcttaaatcatcggaccgagaggtccggaatacatccaaaagcagaaatagataaggcagcggaattcaggcagcggcatgccattgccacaggcaacgaccgtactaagacctactggacgccatcgtcttcatctccctcctgataataggcatagggatcctccgaggcttcatctcccacttctgataaattttatattcgcaaggatgagtaccaaccgtactcagcaagccaccacagcaacaatgcatatgaaagggggagttcaaaggatggccatagttcttttgcgcaaagcaagttttgtaattcttttcacaagcctaagacctagcattgactgatcaaattttagtaccagagtttgtatttaaacaacgacggttctgtccaccatccattgtgatcccaaggatagcttcccgccattgattcgtcatggttttctgaggatgtccaccttcccgcctctcaggaagtggctccaacagcataaaattcatcatgcaataacccctcccacacaagttaagaatttagagtctagccaagtgtaatacatgtcccggtgctcaataaccgcgagcacggctattcgaatagatttggtttactcacactgcagtggatgtacactttacccgcactccgcgactgcccaacacatgagcctcgtcccaacacatgagacgcgtcacggcaaagcttttcgataacctcgcattggcagtacctgctccatgaacttaaatcctcatgcactctaggcgtccatgtttctagcagtgagaggagttctggcgctcccgggaaagagaagtctcacacacatattaaatttatggttcaagttaagttctctctcacacacactcatggcagtcctaccaatggcgacaccgatgtagggcacgcctcttggccctacctcaacggctgtcccatcgtagcgcacctgcctcactcaggggtgaaccatctatgcagggatactgcctccgctcggctatctaatccgctaggtctatacccattcgagaagtacggttgtacgggggtcgtttcatgcttaacttcatggctcggtccttaattgaccggggacggtactagccttttccagataccacccaaatcctccgtccgccccagtcgaaaacagttgtttaattttatttctcctttcacaaatcatgtcatcaacatcatggcaatgtggcgctcatgtctccacatgccgcatctcaattaccttcccaaaagtaattgcccaagcatatagcatttgataaatatgagtatgcatgattctagtatagcatttctaagcaattgtcataattgactagggactcatacgtaatcaggggtacaaggattttaagggtttctaagcaatcctcttttcttttcttttctttcttttcttttctttctctcctccctcccggcttctttctcccttcctctcctttctttttcctctttcttttcttttctttcttttcttttctttctctcctccctcccggcttctttctcccttcctctcctttcactccctcggtttctctctttctctctcggctctttgcctccccgggcggtgacggcgttgggcgcgaggtgaaagggggcggggaggacggctcaccggcggcggcggtggtggtgacgatggcgacggcggcgcaaggcggcgacgcacggcgcggcggctccggggcgacggcgcggcggcttctaaggtggcggcgcggcggcacgataacggcggcgcggcggcgtggaggcggcggctcagtggagaggggagaggggaggaagggtgaaatggggtgggggataatggagagagagggggggtatttgtagagaggggagaagcggcggggcttgggcggcgcgcggctcggtgtgacgcgatggcgacgcgatgatgacgcgatgcggcagcggcgcaggacgcgaggcggcgacgcgatggcgagcggggcgcggggcgcggggtgcgagacggcgcgcggggcgcaaggcgacgggacggggcgacagcggcgacacgacaggcgcgcggcgtggcgacgggacggtcgcgcggcgatggaataggcgggcgacgcggcgcgggacggcgatgcgcggtgacggctatg

SEQ ID NO: 7733 - DNA, 3984 bp, Oryza sativa
gtccttggagattgagcagccgatccatcattaaagatgatgagatttctcctcggcattggatcttatcggcaaagaataagccgattaggaggttgcccattccaaattgtctggcagaactcattggatgataaaactcgtaggaaacttggatgtttctcccttgatgaatgccgactggaaggatgcatggggtgattgcagataagaagatttttctgggcttttgatatctgtcattgttgatgtcttcaaatctgaagtcccatggattttccagaagtgttgagtctccatagagaaaccaaactcgagcatccttttggaacccctcataaaagttgcaaaaccagtctttgagcagctcagccgatagttttgctcctgcatcagttggtgtagaggcgtactctccatatgatgtgcatctccgatgagtgagttcttctccgtcatcgttgacagtcggctctaatcttgggaattcagtttctgttatagatggccgattgacgaacctcatgactaccaagtttagccaggattgcagcagccaccatggtccacccgctccgactactgagctgacaattagcttagccgatgcattattcagcatttggtacaagtagctgaggagtattttgcctaaaggaaattgtccttttgtctccaaagcttcggctatgaactaccaattggttgtaggaccgcagctagacccacaaaagagaaacttttctaaccacattaacaggaaagccacatgttctcggggggtaactggaccctagcccatatatgctgctacatagcctaaccagctgcctatgctcttggtcttgaagtcatattggttctttgtattcaaactcatagggttggccgatgaggtgacatccagacccgtgatcatgctgatatctatgagagttggggtcatcagcccttgattaaacaaaaatgcattgatggtgtttgaccagaagtaagaagcagctgccatcaagggttcatctttggccgagtttgctatagtgaggtcaagtgcttggccgattccaatttcatcccagtgaacccttttgcttgctgatacatgtttgaaccatgtggtccaacttttctcgggtggaactttctctagagacggccaagatttgaaggtattcttccagtgacctagatctggattggttaatctgaagggaatcctattggtttcaccaatgataaactcagtgggatcaggattgctaactgggccgagaaagtagtagttttcgtgtgataggcttggaatcgcaactaggttggagagatgctacaaatccaaaacaaccgagaaaaagagagcgatataagacaagaggaaatcgatctgctgctaagaaaggggatctagccaacgaggacttatctcagcgtactcggctgatggcgcatcagatgggttggtggaggacgacatcgctgcgggtggaaatctcgccgaagatgaagtcgcctggaaatcgctattgcgtcggagagatcgccggagagagagaggacaaagtatcgcttgagcggtgaaaacaaaagtcacggcgtgagatttcttgagggcaacggttagtatttaaagcgatagaataacggtcgaaaaacggcggaatgcgaaacttgctcggaatcggtacacggcaaatccggaacattatcaaatatcctggacttggggggcatgtgttagcgaccaaatttggtaatatcagcatcggaagtgaagatgagatcgaagcggaatctgagataaggaatgctgcgggaatagagtaagaatcagctggagtccaaatcggctatgaccagaatcggctgaatccgaatcatacattcgaatgcgagctttggacctgtactagagttaagcagatctcccaggcctcgtgttttctgtgaacaggcggcgaagggaggtccggttaaaaagatctccaaaaagaaaggactcgtcgatgtcgctcgtgttttcagcgacgacaagtcttctgacgggactcagacttcgcccgccgaccgtagcttgcacctttcgaccgctcccattcttccgctcgatgctggcggagaaggtggtagcactgccatcggggctttagcctccgccgatcggatcgtcacggctgcggcgagggttatcggtagccccctgcgtcagccggttgtttcgccgctggtctaggcgaaggggaaggaggctgccgtcgaaacatctacctcggagtactccctcgcggggccccacttcgcccctggcgatttcgagtcccgggcggagcttattcccttcgtcgagggagtaagcaatcttgtcttacctgctagcaccccgagtctattcaccgagttgaacgagttcgatgaagggtgttccgctatcaaaagcttggcggttcgggtacgcctcttcgctctcttttttatcttcctctccttttttacatgtcccataattaacattttcgctcttcttggatccagattctcgcggcccactgttcgacagagtgaattgtgcggggtcgtcttgacggatttaagaaccgtcttcgggccaaggatgagaaaataggccgcaagagtttggagatggaggcccttgccaataccctcatagaggcgaaggccgaaaacaagcgtctctagaccgaattggagaaaggaaaagaggctagggccgagatcgatcgcctcaaggccaaactggagaaggaaaaagcccattctgccgcgctgaccgattattacaaccttaccgagccgaagatggaagctcttcgtctggaggtcagcaaggccgaggcgagcgctgtggaggagtcacggtggttttcgcgggagatggcgaaagccaccgaatccgcaaggacggcgtgccaaacgctccgccttgcccttactgacatggcagcaagggtgcgaggagtccccgccgaagacgcctcagccttcaacttctccgagtagacccagcaggatgatggtgcggtttcggactatgccactgcgtacggcgattgctatgagcgcgtatcggcggccttcactatgggccttctgcagcagttcggctatgagcacgtcgccgagttccctaactacacgaagggggactgggagattagtgcacataacgtttcgcccgcgctccgttcgtggcgaaagcagttctggcagaaggacggccgatccaccgccaaggcgcgccttctagagcaactggcgaaggcagaggcagcagaccggtgcgaagaagaggacgcggcagccgaagggggtggaggcgatacctaggatcacccagaggtgtgaggccctccgccctttccttagattttcgtagttttccttcttctttttctatttgctgggaaagatgtaaattctttttgtagccgaaaaggccccttggatatttggaatgtatgactcaatcttagccacttcttatggtcgatgccttcggcgtatatgactacgtcactttcgcattatgtaatattcgctcttttttcgcccgttcttactatgcacttcgtcttttgccctttctgcattgtctaccagggtgttcgccaaaaattgtgcattcggcccccttctgggagttggcaaagaaaaaacgagaaatttgtggcgttgaagggtttgccgaaggtacgatgcccatttcagcctgtttatcgcgaaatggtaataaacggccatagctataaggtttctaaggttgccggctggctgcgagcgcaccccgggcgaaccttagaagactacgatcatgttcatacaagacgtttggaggatgtggttcgtttttggcgaaaccatcagaagactgatcggcaggaggcaatctcccagcgtcgttacagtctagtctgtgtttcgcccccttctcctcttagggtcgtgtatgatattagtagtgatgacgaa

SEQ ID NO: 7734 - DNA, 5112 bp, Oryza sativa
ttcgcccgttctaactatgcacttcgtcttttgccctttctgcattgtctaccagggtgttcgccaaaaattgtgcattcggcccccttctgggagttggcaaagaaaaaacgagaaatttgtggcgttgaagggtttgccgaaggtatgatgcccatttcagcctgtttatcgcgaaatggtaatatacggccatagctataaggtttctaaggttgccggctggctgcgagcgcaccccgggcgaaccttagaagactacgatcatgttcatacaagacgtttggaggatgtggttcgtttttggcgaaaccatcagaagactgatcggcaggaggcaatctcccagcgtcgttacagtctagtctgtgtttcgcccccttctcctcttagggtcgtgtatgatattagtagtgatgacgaacctagttcgtctgatcatcccttagagagagagagagtgattgtggaggcgaggatgtaatttatttctaagctaggtgtaaagccattgctctttctttttacttgtaccatgttgatgtgtttgtattcttcgatgtgcttttctttaaaatcagtaaaggtgcgttttatttccttttcgctatttttgcattgtcacttcgcgtgctttcgttgggtcggaacatgtcagcccctttgcgtatattagcgaaataggttctgagtttttagctttcggcttcgttctcgatccgttttgttctacgttgtaggaagcacttgtgctttccttttgatcgagtgtaacggtgttcggttagttgttccccgaaacaagctgttgtgatttcaacgttcggcgagcgatgcttcggccgattcgtttcgcccccctggcctttttcgctgatcaggcgtttgccttgggggttttccacaaattatcaatcacacaaataaatgaaaaagaagcggaggacacagagattttatactggtttgggcctccgtggtggataaaagccctacatctagttattttttgtcttttttcattttcctcttttttttcttttttttcttttgccgaaaggcttacaaagtgccgaagggcttacataacgatatatacatttttacaagttggcgatttgggtgccacccgctctagacatagaaacgcttgagagaggcagcgttacaggaatggtcgaactcttcgccttccagtgtcgccagccaaaaggatcctgttctggacttgtgcttgatgaggtacggtccttcccacttcgattcaagcttgccagcagctatcgggttcgccttcttccttaggacaagatgaccaggcaacaactccgttggtcgaacttttttgttataagttgccgaagtgcctatggcatacttgcgcgtgtgttcgagtgcttcaactctcaccccctccaggagttcgagtggcacctcgcgcccctcttcgccccagagaacaacacccttggtgagttagcccccagctctgtcggggtcattgcctcttcgccataaaggagcatgaacggactgaacttggttggtcttgtgggggtcatccaaagggcccagagaacagataacatttcctctggccatttgcccttcgctgccccctcaagccttttctttagtgcttctaggatcttaccatttgtttgtttggccgccccatttgactgtgggtgcgtgaccgacgcgaacctgatttccaggttaagcccttcgcacatttctttgaatttgtcagagtcgaactgcttaccgttgtcagtgatgaactcttttggcacaccgaaatggcaaacaatgtttttccatacaaacttctgtactgctgccgaagtgatcgctccgaggggttcggcctcaatccatcgggagaagtattcgacggccacaattgcgaacttgtacccatttcgcgccaccgggaatggcccaatgatgtccaatccccatatggcgaagggccagattggtgcgataggctgcaactcatactggggcgcggtttgacttcggccatggcgctggcagctttcgcacttcttgactttcttaacacaaactttcaacacggtgggctagtacactccttgtcgaaacactttggaggcaactgttcttgcggcctggtgcgtgccgcagagcccctgttgtatcttcttcgccatttcctcgccttcggcaaaagagatgcagcgaagcaagggttgaagtaccccagagcgatatggctggcccgagaccatcttgtaccttgcggctctgagttgcaggtgctttgcttctgcttcatcttctggaagccagctagtctcaaggtattttacgaacggtgttcgccagtcgtatagatcttcgcccagttttgcctggtcgattgccatgacctccatgctctccatgggcacacttggttcgtattggacttccaaaaagatacctggtgagtgtgggcctccacaagcagcagatttcgccaaggcgtctgcttcctcgttatagcctctaggtaaatgttcaaccgttatgccggtgaagcacttttccatagaccgaacggcctccaaatacctcttcattccttcttctattgccccaaaggatttgtcgacatggcctgccaccagcttgtagtcggtccggattagcaagcgccgaattcctaatgcttttgcctttcttaggcccagaagaatggcttcgtattctgccgcgttgttggttgtgtcgaactgcagccttgcggcataccgaatcggcacaccacttggcgaagtgagtactaacgcaatgcaggtgtccattcggccacgaagtcagctagcacttgagacttgactgcagtgcgggcaacaagatgcaagtcgaaaggggatagctctgctgtccacttgctaagccagccagtaacttccttgcctcggagtattttgcccaaagggtactgcgatgacactatgactttgtgggcctgtaagtaatgtttaagtttgcgcgaagccatcaccaaggcgtaagcgagctttcccatttcaatgtatcttgtcttcgctccttgcaatgcttcggagacgaaatagactggtttctgtcctgactctgtttcttggacgagggcagcactgactgccactggcaaagctgctgggtatagtagcagttcacttcctggtgctaggttgatcagagctggcgggctttgcagatattgcttcagctcgtcgaacactgcttggcattcgggtgtccaattgaattttcccgcgccccggagggtcttgaagaagggcaaacctctttcggctgccattgagaggaatcgactgagtgccgcaattcggcctgcgagcttttgtatctcatgtacgctcgtcaggggcttcatttgttgaatggcatcgattttctcagaactcgcctcgatgcctctttcagaaacaaggaaacccaacaacttgcctgcgcgaacaccaaaaacacacttctcaggtttcagtttcatacccgccgcgcaagttgtcgaaggtctcctgtggtcgaaagccttgcggctttttacgacgatatcgtcgacataagcttccatgtttcgccccagctgcttatcaaggaccttgtacaccagcctagcgaagtttgcttcggcattcctcaggccgaaaggcatcctgaggtgacaaaatgtgccaaatagtgtaatgaaagctgtattggggatatcggccgggctcatgtggatctggtgatagccggaatatgcatccaggaaactcatgagtttgcaaccagctgtcgaatccacgagctggtcgattcgcgacaaggggaaatcgtccttcgggcatgccttgttcaggtctgtgaaatcgacacacatgcgccatttgccgtttgatttctgcaccagcactcgattcgccagccactcaggatagtcgatctcttggatgaccccagtcttgagaaatttttggactttggctttagctgtttcttggcgatcagcggacatcttgcgcagcttctgtttcgttggcttggcatccggcttgactgccaggtgtggacccccgtttttataacaggaatcaatcgtgtaaacagtaccatttccctggatcaagtagtttggtacacacgaattcatagctgaaatatcaagtgcacatacacgagtgtctgatacgaattattacatcacaggcccgcaggcatagtcttaaatcatcggaccgagaggtccggaatacatccaaaagcagaaatagataaggcagcggaattcaggcagcggcatgccattgccacaggcaacgaccgtactaagacctactggacgctatcgtcttcatctccctcctgataataggcatagggatcctccgaggcttcatctcctacttctgataaattttatattcgcaaggatgagtaccaaccgtactcagcaagccaccacagcaacaatgcatatgaaagggggagttcaaaggatgcccatagttcttttgcgcaaagcaagttttgtaattcttttcacaagcctaagacctagcattgacttgatcaaatttagtacaagagtttgtatttaacaacgacggttctgtccaccatccattgtgatcccaaggatagcttcccgccattgattcgtcatggttttctgaggacgtccaccttcccgcctctcaggaagtggctccaacagcataaaattcatcatgcaataacccctcccacacaagttaagaatttagagtctagccaagtgtaatacatgtcccggtgctcaataaccgcgagcacggctattcgaatagatttggtttactcacactgcagtggatgtacactttacccgcactccgcgactgcccaacacatgagcctcgtcccaacacatgagacgcgtcacggcaaagcttttcgataacctcgcattggcagtacctgctccatgaacttaaatcctcatgcactctaggcgtccatgtttctagcagtgagaggagttctggcgctcccgggaaagagaagtctcacacacatattaaatttatggttcaagttaagttctctctcacacacactcatggt

SEQ ID NO: 7735 - DNA, 9721 bp, Oryza sativa
ctctttcaatcgggccaagaagtagaagcccagccaaaagtctagtttgcatccctgctacagtggcatcttcaatctccagccggctggagacagagcccgagccagccgcacagtacctgtatagccgcggttttcccctccaaatccggccttttatctcgtgtatttccaaaattagttgaggggaaatactcctcttatcctcctctatctttacccccaaaaatcggagctaatcgttgagtatcttgcccgaatcgaactcgttttcgagtttatctccaaaacggagtttttgatttcccggatcgatttcttgcgggaggagtccgatctcttcaatccaaggaccccctagtcctcctctttcgtttgccccctctcccgagctctctcgtcaaccgtagagccgccgccacgacgtcttagccgccgccgtcgccggccgacgaacagccgcctcgcgccgtcgttttggccgtcgccgccgcctcctctcgccgccgtcgggtgcgcgtggaagaggggaagctcggccgccccctccccaccgtcgccggtcaccggagagtcgccgccgccgacgaccgagtcgccgccgtcgcctcctctcgtcgccgaccgtcgtccgacgtcgttcgtcgcgttggtgagtatcgttgggttcgtctcgtcgtcctctgcgtgtaggtgtcctccaaatccgcagccggccgctctatctccggcgaggtcgccaccgtggttcggccgccatggatgatgtcagcatgacatcatcatcctttctttttcccttttttctaatagattaaatcttcggaaaatcataactaaataaccgtagatccgtttcaggtggttcaagttgctaaatttttctaaaatcaagatctacatgttaaaaatatccacatgtactgtttatgcttgtttttgtactgttttgttgatttttgtttaattgctttagtttccgacgttccggaggagagccttcccgttgaggaaggttccgaagcgtttgcggaagcccaaggcaagtcacacagatcccaaacaaccctttgagcatgttgaacccgtttaaagctattattttatttcaactatgcattatttttgaatgtcatcgggtggtgaacctttccccgttaattaatggccaaagatgatcttatttttcctatgggttataatttgattagcatgaaccttatatattggattggttcagctaaatgctatatgtaagtttgcttagccatgcttagaaacattagctaactaaaggggttaattataaactatattatattatatcattattatggttatatttaatggtcgctcacgatggttaatcgtgtgatgttaattaattgataattaaaatctggttaaggtgggttgtgagcatatggttttgatggttgtgctcatgacaattaaggaccggttcgcgagctactgtagtgaaacatttaccgtgccaaccacaagccagcgtgggcaacggctttaccttttgtatagcatgattcattacggagtgccagactgagaagcggcgagaagtccgcgggggtcgctggggagtccatgccttgtttataagggggtgattatgatccaggaaaggtgcgctgtaatgggttatgttgtgcaaggggtattgtcacaactcctttccgaggtaccgtggtggtattgaggcacatggtgacatgatgtggggttgtgtcttgtgggtacagtggtacacctctgattagagtttaatctattcgaatagccgtacccgcggttatgggtgagttgagcaatgtttttcgtgattagtctcacacctttcacaataattatggatgttataactggtaataatttgcttagctcctggtttggagttagatctgtacagccgggtatggttgttcaggatggttgggcctgtgcagcatgggtgtgctgttcagtgttgattaaaattgatgattaattactctactgttttacttatcttaaatctttgctaaatgctgcttttgcaaatgagcctatattatgccatcctttggaatccttgtgcacttgcatatttgctgtgtggcttgttgagtatgtcatatgctcattcttgcaataatcatcaaacctcacctgaagataaaggatccagaaggagaagacgtttggcttatacccagttgagctgcctgtgggagtggagctgaagccatcgctagaccgttaattccgctgctgttttcttttctttgtaagtatgtaacgttattattaagatggatttgtatattaaattgtcagtttgtgtacctcggctgattcctggacgaggattttatgtacaaattagttcggaaattactagtgaatttccgagcgtgacaatattgaatcccagtttataaaattattttgatttaaattattgcattatcgcttcatttaaattcccgcgttatcactgttttatttagccatgcctacttacctttgttatgaccttattattattgttattgttattattaccttgttcaccttagaataaacaataccccaactagtgggtactctatttatggttccactagtatgaatttaggtagatgtttcgctgattaattaggcaacattaggtggttttataactttagactttgggaattctcatatcatttggacagtatggaatggttggcttatgttggaattggacacacacctccccctcttttcaaaacccccaaaatggttttaggctgggctcgaggtgcgtggttgggttttgttagtcgtacctcgggtactataaggattaagctcgggcctctgttgcaaagcactaccgtacttccacatgtctagtgggtaaggcttagtttgtggctcagtctggttataaacaaaagtacacggatggagttggacgaagtcgggggtcgatggacatctctaggacaaatgaaggctacacaagctgcggcccggtagtcgagatgtcatggcacagggctggtgtcctaatgctaggggctcaatcctgcctgcctgtcccggaggttccggccgtaggtggggttgggtcggtactcttgtttatggctaggatgggttgggaactatgtcacgtctttcgtccgtatgccgtggtggtatgtggcacgtgattacacgtgaggaagacgtgtcttgtgggtaaagatgtacacctctgatcagagtataatctattcgaatagccgcgccctcggttatgggcaagcctagcaatgtacccaagttagtgttttaattcttaaaacctgcttaacaactaaaatgtggaatggttggtgtcgcgaccgagaaaattgccttatcctgaacgctagtgtattaatccccgtcccaggaaaagccggggtacaccaaacaaacatgatacaaagggaacatctttaatacatcgataatatttacattattacaaaggcacttcaggcctgacaatcaaaaataaatagcagcggactagcaggcctacggctccatcttcacaggcgctcaactggggtataagccaggactccacctaagacttcttctccaaagcttttcttactgaagggggggaaagatagagcaagaatgagtacaaccacagtactcagcaagccacaccgggagatgcatgattaatgcaagggggtacaaggggtaataataagggttaagttttgcagaaaacggcatttaaaagacacttagttactcaaagctattttgtaaacacgatcctagagctacacaatattattaatcaaggccgtggacccacacgaacctgccttaacccaaggcctacgatgattcagaccgaactggcaacccgacctgggtcccagctcgtcccaagccaacccaggccaaccattccatattttagttgttaagcaaattttaagaattaaaccactaacttgggtacattgctaggcttgcccatatccgagggcacggctattcgaatagatgtactctgatcagaggtgtacatctttacccacaagacacatccttactccgcattccatggccttggaacccgtcgtaaacatgtgacataacccttcacctatcctagccgtgaacaaaagtaccgacccaaccctgcctacggccggtatcccgggataggcaggccaggattgagcccctagcaacaagatctagaccgggtgcgccacacacataggggtgagaccacccgcgtactagtccagtgccatggcatctcgactaacgggcaccgacccgtgtagtcttcatttgcctagacatctcgattaccgagccgcagctcgtgtagccttcatttgcctcagagatatccatcgtcgcaacgacttcatccatctctatccgtgtccttttgttcaggactagactgagcaccgagttaagccttatccattagacatgtggttagtacggtagtgctttgcaacagaggcccgagcttaatccttatattggccggggtgctacttcccacatctggcatgcacccaaaccccaccggaaaacaggttttaggggttttgaaagaggaagaggggtatgtccaattccaccataagccaaccattccacagtgtccaaatgatatgagaattcccaaagtctaaagttataaaaccacctaatgttgcctaattagtcggcgaagcatctacctaaattcatactagtggaaccgttaatagagtacccactagttggggttttgtttatcctagggtgaacaaggtaataataaacaatagcaatgataaggacataacagggattaataggaagtgctaaataaaacagtgataacgcgggaatttaaataaagcggtaatgcaataatttaaaccaaaataattttataaactaggattcaatatgctcaagggtgatgtgacttgccttgctcagagagaacggccttccgaaccttcggcgacgaccgcgaaccacgcttcgagaaccttcggaacgacagaagctacgcgaagcacacaagcaaagctacaagcctataaagaagcaataacaatacataaaaagaaagcacacggttctttatgttataacaaacattaagagacttgaacgggtcgattcggagcccgtatgaccaagacatggtcatccgaagtttaatgctgttatatatggagatttgcggattattataattaggttttgcaactataaaacatgtgtaagcgctagcctggaaaagacaggaaggctgcgccgttgacatgcggaccccacatgtcaacctaaaggatcgcggtagaccgagaacacagagacggtccacgggtcgacggaagcgaaccccgtgtgtcaaccgaggcgagtggccgacaaacggactccactagacaccacacggcctgcacacgtggaaaccacgcggctaccgagcgggcacactgacacggtcaccacacgcacaagcgaacgactaccgcacaacgggcatgggcgacaccgaaaggacgaggacggggcagcgagaggacggacccttagcaccctgcgacgaggcgagggaacgacaacgacgaacgggcgcggcggagacggctcggggacgacggaggcgaacgacgagggaacgacttcggcggcgatccttgaacgaaggcgagacacggccggcatgaggcttgacgacgcggaggcgaggacgaagatgacgacggggctgcagcggctcgcttgacgaaccacgggcgacgaacgcgatcggcttgacggagggacgaacgccacgacgaccgggaacgacgggaggacgacgaggacagccggtagcggttgcacggagacgaggatggcgtggaacacgccgctgcgatgccgacgacggaggcggcgccgcgagacgacgagccggcgaggatgaacggtgaagacgatgacagacaccggcggtgttcggccgaaggggaagcgatgccgaggacgacgtcgcggctgtgatgccgaaggtggagacggcgacgtcggccggcgcacgggcacggcggaagaggctgccgaaggcgacgttgtcgaggaggaaggagaggccggcgcggcggcagcggtgttccggcgaaaccgaggagcagccggaggagaggacgacgctgcgacgtcgacggaggagacggcgacgtcggtcggcgtaccggcgacgaacagcagccggccagagacgatgtagtggcggcgacgccactggacgctggcgggggcgcgtctccggcaatttcccaacgaatcggaggcagcgccggcgaagaggaggcggctgcgacgccggggaaggcgacggcacagccggacggcgcttgggcgaggagggagaggcggctggaggcggccggcgcgggggaaagagaagggcaatagcggggaggggtggtgagtccacgggagaacgcggaaggggactaaacggcggatggggattccattttataggagaggggagggagccgggcatgggagaggacggaacggcgacgggaaacacggccggcggcaatggttggtggccgggaaaggcgcggccgttcccgacgattgggggcgccattcaagggggaaaacgggggaaatcaaagaggatggaaaggggattaaaagcccccacttaatttgaaaataagggaattgattcgtgcggatttgagggaggaagaaactagggttcacgggagagagagagaagctgggcgggaggaagacgacgacctggcgcgtggggcccacgcgggcgcgcggtcaacgcgtggcaacggcgtgctcgcgcacgtgcacggcacgggaaggaggcgcggttcggcctagaggggggggcgcggcttgggccgggcggccggcccaggaggagaggagggagaggcagcccgggagggagagggaggaggagggagtgggccggtagggggaggggaagaggtgggccgggaggaggaggagaggcccgggagaagagggaaagagagggagagggagactttgggctgggcttggcccaaaggaggaaggaggattatttttaagttttctttttaataaactttgatcatagttgttgttgcttaataaatatttccggtgctctgaaaattcaagtaaaatttgagggctcattttagaccaaggagaatttaacgaaaattctctgggctacattcgaaattttcttgtatgtattttagtgtttgccaatttctttttgaattttaattaattctattattccttttagaaaatgatttttatttcgggatgaatttatcaggacgtgacagttggcctgggttggcttgggacgagctaggactcagggtcgggttgccagttcggtctgaatcatcgtaggccttgggttaaggcaggttcgtgagggttcacggccttgattaataacactgtgtagctctaggattgtctttataaaatggctttgggcaactaagtgacttttaaaagttgtttactacaaaacttaacccctatattattaccccttgtacccccttgcattaatcatgcatctgccagagtggcttgctgagtactgtggttgtactcattcttgctcaatcttcccccccttcagtaagagaagctttggagaagaagtcttaggtggagtcctggcttataccccagttgagcgcctgttaagatggagccgtaggcccgctagtccactgctgtttatttttgattgtcaggccttaagtgcctttgtaataatgtaaatattatcgatataataaagatgtgccttttgtatcatgtttgtgtggtgtaccccggcttttcctgggacggggattaatacactagcgttcgggaaaatgcaaattttctcggtcgcgacaggttcaatcacgattgcgagcccttgcaaaggttaccaaggataaggaacgtgttgctcggcattacaagaagaaagtggtacccaaagatttttcggaaggtgaacttgtatggaaattgattttgccgattgggactcgtgatagtaaattcggcaagtggtcgccgaattgggaaggaccgttccaaatttataaggttgtgtctgagggagcatatatgttgcaagggcttgatggtgaagtctatggacgagcgctcaatggcaagtacttgaagaaatattacccaagtttttgggttaatgcatgatcggctagtattgccgatgcaagacagccgatgtgtttacatcgccttgagatggccgttatggttatatcacccttagttgttcttttcatggtataatcggttgtggtttgccgatgtataatgctcgatattgttatatcgcccttagttgtttttataattttatcaatgcttttgacattgtaaaattaggtgggcacatatgtatcaaaatgcaaaatttttataatgtgagcgaatttcaaagtcatcggcacaaaggattgtcaagatagtaaagtactagagcatcttagccgattacaaagatttctaagtcctattacacaaaagatattgagacaagtaccactggatagccaaaatagccctttgcctaatttgttctacttcttcaatagcttgggcatcttgagcatcagttctagaaatgaccttcagggacttggttaggtcagcaacattcttgatagccgatttgagccttgctttttgctgttctacagattttgggagatcggctagctttttgtgctccatatctagttcagcattgcattcttcaagttgtgccaagagattgatcttgcgggcttcaagccgatcaatattggatttgatcggaccttcggatagctgatcgagtttgactttttcttcatgcacaagctgccgattgacctggattgcggcttcaatctccttgtgctcacggcattcggataatcttagcttggctttctccagtttaaattgatgctgctcaagataagcagctggagttaggacatcggccagttcttcgggaattagagcttgaacttcgtgcaattgtgccctaatcgatccacagtccaccactaagctatctagagaagaggcctctagccgacgcgagatgtcttaaagtgttttctttgcattatcagataagggagctagagctttgcttgaagtatctttttctgcctcatcaagataatctctgatatcaaaatagaagagatcggctagaacctataggtataagttcagaaagtttgagagctaagccaatatagccgatctaaattcttgcatcaaaggaaaacttactgggatagcaggagcagctggttgttcttcttccacaatatgatgactccctacagccgatggagttcggtcactcaatgattgttgtacaggggaagaaggaggaggaggaagctgtaaaaagacaagtgttagacaaaatcggctagaattgactagtaaaattgagagtgtcttactagtggagctggtttgagaattggtgctgccgatgttttctttatagcagttttcttcttctataatcacaaagcctatgagtagtcggctgaaaaataataattataaaaagggtttgcaaggaaagatgttttactctgaagaagtgagtgggggcagaaggagttggagg

SEQ ID NO: 7736 - DNA, 12172 bp, Oryza sativa
gccccccccccccccccccccgccattccaagtccggccggtctgaggccgaggagacggcgaccgcggaggcccggaggcgggaagctgaccggcgagaagccgcggaccgcctccgggaagccgaggaggctacccaggaggccgtccgggttcgccaggctgaggaggccgctcgggaggaggccagactccgctgggccggggagtccgtccgggaggcagaggcggcgcgcgcacgtcaggcggcctgccaaacccccgacccgactccgcccgaggcgacgacgacttccgaggccacccacgatgaggccgcgggcgcgccgctcgggcccgacccctcgggcgacgcttgggacgagccagcttcgggggacgcccccgagtccggcacgtcgatcggtgggccgagccgcgtggcacccacaccgaggcggctctcccctcggccttccgctgccccactgagcgtggagcccctcctgcaggccttggccgccgtgaacagcatggtgctggacgggttaagtgcccatatggaggccgtgcaggcggagagggcggagctcgacgcggagtgggcgcgcgtcgaggaggggcggcgctcggtggaggccatggtggaggcgggccgcaaggcacaccgccggcacgcctcacagctcgaggcccgtcgtagggacctggcggagatcgccagggaggtggaggaggagcgggagactgccctcatcgccaccgccgtgctcgacgaggcgcgggacgacctccgcctccaatacgggagccgggctgcggagctagagcagaagctcgacgccgcccagggagtccttgacgccgccgctgcttgggaacggcgggcggcggagaacgaggcggcgtcccggcagcgcgaagaggcccttgaggctcgcgccacggcgccggatgagcgcgcccgcgccttggacgcgaaggagagagacctggcggaccgcgaggccgccgtcgccacccgggaggcaacactggcggcgcacgaggccgcctgcgccgaataggagtccgcactccgcctccgcgaggacgcgctcaccgagcgggggcgagctctcgaggaggccgagcccgcggcgcagcggctggcggacagcctgttcctccgcgaggcagcgcgggaggagcaggcgcgccgcaatctggaaggcgcccgcgccgagagggccgcactagatcagcgggccgctgagctcgaggcgcgggcgaaggagctggacgcgagagcgcacagcggcagggcggccgcgggccacggcgacctagccgcccgcctcgcagccaccgaacacaccatcgccgagctgcagggcgcgctggactcgtccgccggggaggtcgaggccctccgcttggcgagcgaggtagggtctggcatgcttcgggacgccgtctcccgtctagaccgcgccgggcggcaggcgggcctctgggcgggcggtacgcgaagtacgccgccaaccaggggggcctcgcccagcgcctctcagagatggccggggccctcgagcggctccccgaggagctcgaggagacgatcaagtcatcctcgagggacctcgcccggggggcggtggagctcgtactggcaagctaccaggccagggaccctgacttctccccgtgggcagcgctggaagagttccctcccggaaccgaggacggcgcgcgtgcgcaggtccgggacgccgccgaccacatcgtccacagcttcgagggtacggcccctcggctcgcgttcgcgctcgactccgacgaggagggcggtgacgacggtgcggatgacagcgacgatgaggccggcaacccgggcgcgtcggagtgagcccccaggctcccgccaatcttaataacttttccttcttcttccgaggcctttcgggcccccttcttgtatagactgatttaatctgcaatcaagtaaagaggaaatttctacgtcagttctgtttgttgtgtgtatgagatgaggatggtctgtgccgcggtccttctgtgtcttggcttgaacaagggctcgtgcccaggtcccagcctcaaacggcgtgggtcggggctagtgcctggggagatcctcgtgtcgagactggccaggccgggagcgcggtgaccgagggttatggatgacccgattgtgggcctttgccgattcccccccggagttcaccacgccccggggcacggctcggttctgggccccgtttggcgattttagccggcccgggccaccgagggcagggtcaagcacgagcgtgctaattcaagccaagattctacaaaaggaaacgatggtacagacacagtcctcaggaaatcgaaaatgcttttattgagatacggaagagaaaaaaggtaagtatatgcatatggtagcccccggccaaccctgcacgcccgggggggtgcggggttggcccgagcccgagacatgacactcgacccccactaggggtagaagcgacgaaggtgctcgatgttccacgggttaggcagctctgtgccgtcgcccgtgaccagccgaacggagcccggccgggggacgccgatcactcgatacggaccctcccacattggtgagagcttgctcagtccagcacgcatttggacgcggcgtaggacgaggtcgtcgacgcagagtgatcgggcccggacgtggcgctgatggtagcaccgcaggctctgctggtagcgcgcggctcggagggccgcgcgccgccttcgctcttccaaatagtcgaggtcgtctcggcgaagctgatcttgatcagcctcgcaatacatgctgacccgaggggacctcagggtgagctcagatgggaggaccgcctccgcgccgtagacgaggaagaaaggcgtttccccggttgctcggcttggcgtggttcggttcgcccagagcaccgctggcagctcctcgatccacaagtcgccgtgcttcttgaggatgttgaaggtcttggttttgaggcccttgaggatttccgcgttggcgcgctccacttggccattgcttctggggtgggcgggggaggcgaagcagagcttgatgcccatgtcttcgcagtagtcaccgaagagctcactagtgaactgggtgccgttatccgtaatgatacggttaggcaccccaaaccgagcagtgatgcccctgatgaatttaagcgcggagtgcttatcgatcttgatgaccggataagcctcgggccacttagtgaacttgtcgacagcgacatacagatactcgaacccgcccggggcccgcctgaacggacccaggatattgagcccccagacagcaaacagccacgaaagaggtatggtctgcagggcctgggccagctgatgggtttgcctggcgtggaactggcacgccctgcaccgccggaccaggtcgaccgcattgttgacagccgtcggccaatagaaaccctggcgaaaggccttgccaaccaaggtgcgtgaggcggagtgggctccgcactcgccttcatggacatcggcgagaagctcgacgccttgttcccgaggaatgcacttcaggaggactccgttagccgcgtgccgatagagggtcccttccaccaacacgtagcgcttggagatgcgccggacgcgttcactcccttcgcggtcctcgggtagagtcttatctgcgaggtacgcctggatctcagtgatccaagcaatcaatctaggggagctgggagcgctcccctcgggtcccgaggccaggactccgacgggcctcgggggccgtccaggcgcgtccgtctcccctagggggtcgggtcgcgccgacggctgggcaagcctttcttcaaaggcgcccggtggggtctgggctcgcgaggaagcgagccttgagagttcgtcggcgaccgcgttatcccgtctgggcacgtgccgaagctctatcccgtcgaaatggcgctccatacgccgcacctggcgcacgtaagcgtccatctgcgggtcagagcactggtactccttacagacctggttagcgaccaactgggagtcgcctaacaccaggaggcggcggatccccagtccagctgccactctgagtcccgcaaggagtccctcgtactccgccatattattggtcgcccgaaagtcaaggcggaccaggtatctaaggacgtctccgctcggcgaggtcaacgtgacccccgcaccggcgccctgaagagacagggagccgtcgaactgcatcacccagtaggcggtgtgaggcagctgcgaggggcccgagctggcctcgggggcggagacaggctcgggagctggggtccactccgccacaaagtcggcgagggcctggctcttgatcgcgtggcgtggttcaaagcgcaaatcgaattcagagagttcgattgcccatctcaccacccgtccagtaccctttcggttatgcaagatttggccgagggggtaagacgtaaccaccgtgacccgatgcgcctagaaataatggcgcaacttcctcgaagccatcagaatagcgtaaagcatcttctgggcctgaaggtatcgggtcttgacgtcccggagggcctcgctaacgaagtagacgggccgctgcacctttcggcggggccgatcctcttcgccaggggccgcatctccagggcgctcttcgtccgagaggccacgcggggcacactcggcttctgtgccgacgacctcggggtcagagggcgacaggcacagccttcccgcagtggccccggggccatcctgggggtcgggggcgcctggcaccgtcggacaagcaggcggagggccagctccggccgtcgggggcctcgggccgccgttcggctcgggggcctctcctccctgctctctcccgggtcgagtcgacacagggtggggatgcgcggagtgagggttgtcctcgtcgcgctccacgaccaacgccgcgctgaccacctgcggggttgccgccaggtagagtagcaacggctcatctggctccggggcgaccaggactgggggagaactgaggtacgccttcaactgagtgaaggcccgctcagcctcctccgtccaggtaaacggcccggagcgtttgaggagcttaaataggggtagtgccttctctcctagcctcgatatgaaccgacttagggcggccatgcagccggtgacgcactgcacatccctaagcttgctaggggggcgcatccgctctatagctcgtatcttctcggggttggcctcgatgcctcgggcagagaccaagaacccgggaagcttgcccgcaggcacgccgaacacgcacttatcggggttcagctttatgcaggcggagcggagactttcgaaagtttccgctagatccgagagtaaggtctcttggttgcgcgtcttcacaaccaattcatcaacataggcctcaacattgcgtcctatctggctacccaaagaaattcgagtagtacgttgaaaagtaggacctgcattctttaacccgaaaggcattgtcgtataacaataaattcctatgggggtaatgaatgcagttttttcctcatcctccctagccatgcgaatctgatgataaccagagtatgcatctagaaaacacaaaaggtcgcaccccgcggtggagtcgacaatctgatctatacgtggcagggggtaagggtccttaggacatgccttgttaaggtcggtgtagtcgatgcacatccgaagcttgccgttcgccttgggaacgacgaccgggttcgccagccactccggatggatgacctcacggatgaatccggcctccagaagttgcgccaccttctcgcggatgaaggcttgacgttccggggcctgccgccgcactttctgccggaccggccttgcgcccggccgcacggcgagacgatgctcaatcacctccctggggaccccgggcatgtccgccggtctccaagcgaagacgtcggcgtttgcccgcaggaaggagacgagcgcgtcttcctatttgtcgtccagaagaccaccgattcgtgtggtcttggacgggccgtcgcccagggcaacctccttgaccgggacctcgtcgcacgtgaccatccgctgccttggggcggccgggacggaggtgctgagcctctcgtcgccacccgtgggcttggacgccgcggcgaggtggtccgcgcgctgctccatacaagcaagcgcgactttgaggtcgccatggacggtgatggggccaccggggcccggcatcttcatctggagataggcgtagtggaccgccgccatgaacttcaccaacgcgggcctccccaggaccgcgttgtagggcagactgaggtccgccacatcgaagtccacccactccatgcggaagttggcggaaccaccgaaggtgaccgggaggtcgatatgacccagcggccaggtgttccccggcgtcacaccgatgatcggctgggacggccggagcaccatccccggggccttgatggcgtcaaaggctagaggggaaaggatgttgagggctgcacccccgtctatgaggacacgacccaacttcacattgcaaacggtgggggaaaccaccatcgcgatctgtcctccccgggcaacgcacggcgggtggtcggtctggtcaaaggtgagggcaacctccgaccaccgcgcccgccgcgtcgcctcatgggtaggggccgcggccagaagctctcgcttcatggccttgaggctccggcgagaagcgtgagcgcacgctcccccatcgacggtggcgacggtggcctcaggctcctggaaccccaggtcatcgtcgccatcgtcgatgtcctcggcggtggccttctgcttggcctcacctcgccggttgccggcgggagccgccggggtcttgccctcacagcgctcctgcctcttctcctcctcccacttcctcgtccgctcagccaaacttttgaccgcgcggcagtcagcgaggtcgtggagagaggtgttgtgcacggtacaccacttgccggtcgggcgctccctgctgggagcgccggcctccttctttttgtcgctcgcaggcctcccctttcggggggcccgcgaagcgccctcgacggcgaggacatgaccctcgtcgtcggaacgggccgaccccttcttcctcctcctgtcccgccgccctgaccgagcggcggacccaggggcggccggagctgccacaccagaaccggagaagttccaggtccaggcctcctccttgcgagccacacgttccgcgagctcaaaaagttgcgcggtggtctagggctccttggaggcgatcttctcgagcatgcggttgtgccgcacgccccccctgaacgcgtagatcaccgcgtgtgcggggatgcacggtatggtgttgcggacttgacagaaccgctgaatgtacgagcgaagagactcatcgtcccttcgctgtaccgcatgcaagtccgcctcttcgcctgggcgcggatatatgccctggaagttcgtggtgaactgctggcacaaatcctcccaagagtggaccgacgcgggtggcaagttcattagccaaccccgcgcctgacccttcagggccatggggaagaaattcgccatgaccctgtcgtcacccccggcagcctcgatcccggtcgtgtagatctggagaaacttggcggggttgacgcttccgtcgtatttttcggtgatggtgggccggaaccttgggagccaacggacgttccgaaggctcgccacaaaggctcgacagccggcaccgccaaccggggacacggggggccggcccccgtgcccggaccgaagtggcgctccggacgaggaagcgccctccgttgcgtgggcggcgcgacgagcgtcgcaccggcgctcgatatcgaggcgggcatccgttcccccacgcacatcttcttgggtcggaggcgttgacgagggaatggcggacgaacggcgggtaacggccgccgctcgccgcgtcctccgcctcgacgacatggagccggcggcggcagcgccagaggcctcggtggcggaggaccgcccgccggcgcctaggcgctgctgtgccgtcatgaccaagtcggccacgtcatccagccaacgtcgggctggagtctctggatcggggacgacgggcgggtgacgcaggagcgcgcccgcagcctggagcgtgccctggggcgtgccgccatcgccgtaggcgaggcggcgacgcgccccgtctcgccgtcctcccccgtcgcccgcgggcggcgaagtcgcggatcgttcgacctccccgagcgcctccccccgcccaagatttcggcgagagggggacggtggggtgcgagcccgacggcgcgggttctgctccccgtcgtcaccgctagcgttcggagagaggctgtgcgccactgcccgttcggccattgggctgagcgggagaagcttggcgcacacgaaagaggacgagggcttaggaagacacgcgcgccccgtacctggcgcgccagatgacggagcgtggggctcctcaccgggagaccgcgcaggcccccctttgccggttcggccggaggcgctaagtgaggttcttcgccctcgatctgaggaacgtcagcgggagaggaagtgcacaagacacgggcgacatagacaggttcgggccgctgagaagcgtaacaccctactcctgtgttctggtggatctgtgcgtgaaggaatacagagacccggagagcgagagtgagttcaggctctagaaccccttccccagagtcccaaccccctttctcctaggcctgggcctcctttttatctggtcaggggtcaccacatgggcctctagctgcctaagaagggaaacatgctttttacaatgagggctagtctacagccggaagtgacctctgacaagcagagcacacgcctcctgccccgctcgcccgctttcccggtggacgcccatttcaaccttcatttaatggccagcgacttccttgccatacttgcgctgaagcctggaatggatctgaccgggactgacataccaactccaggagttagcacgccggctccggctagggacgagagccaggaagctctcatcattccgacgggacggggcgaggcgtgtgacaggccgcctgttgccacctaacacgcgatctgaccggtctgtgaccggtcacacaccgcgaccggtcacggaccggataagcgtgcgctgcgccgcattaaatgcggcgtggcgcgctcgtccaacctgctataaatgcggttaggtgagccccgctgtgctcacctaacccacacacgtggcgccaaaaccacagggggtcggggcgccccagccctcggggccgaaacaggggcgccccagccctcggggccgaaacgggagtggcccgacccctcggggagacagagggaggggtggccacgtcaccctcgggaccgaccccccctacccccgagggggtcaggccacgtgggtgaccgcggctacccaagcctctagtcacgatacccccggccccatgtcaccgacagtagcccccggcgttacgccagggcgatcgccccctcgagggaagcgctcgggcgtgacgccactccttaggcccggtgacaggtggggccggtccctacaggcgggcagaaacccagcagtcacaaatcgcgcgcatcggcaagggaaaaacgaccgacgataatgagcggcctctttaagaccgctacattactcgagcagcgcgcgaatcgggacgagccggttcgtttcgcctggagacatgatgatggcgcttttcacggttagcgagcgtagttaatgcgcgcacgatctgccccatctcaaccgccatggccgcacatctgccgcgtgcgccgcaaacgggcgagtggggttagtggaggcgtgggcgcgagaaacgagggggcgaggtagtgggcgcgggaagcgaggagccgggcatagcgttggcaagggtgtaaagacgccgaggaagggattcgtttctttcctctcgccactcttccccttgccttcgccacttgcgctctaactcttcgtttcctgtgccctacccttgccgcactcgctcgctctcaagctcctcctccgccggcgtcatggcacggggctccgcaccgctcgatggtagcgtgctgccgccttcccgcatcgtgagcgagaggcaggccgggctaccgcgccgattcatgccggaatctgccaccggccgggaggtggtcgcgctgggcgagggacgcccggcgccacactacccggggcggtccgtcttcttcctctctttcgcaatggcggggctggtcccgccattctctatttttttcatggatattctggagttttatgatctccagatggcgcacctcacccccaacgcgataatgacgttggccatcttcgcgcacctgtgcgagatgtttatcggggtgcgcccatctctccggctggtcgggtggtgcttcaccgtacagccggtgtcgccgccgacggtagtcggtggctgcaacttccagccgcgggggcaggtgctgaaccgctacattccctgcgtcctccgcaaaaagtgggacgactggaagagcgattggttctacacccccctcgccgacgaagcgcgcctccgacttctgagccagcccccggcgcaggcctccagctggcgggcggcggtagatctgggagacggctacaacgccgttcttgaccgcctggcgggtctgcgatcccaggggctcacggggtccatggtgttcggcgactaccttcgtcgccgaatcgcgccgctccagcggcgcgcccggggcgcctaggagtacaccgggcccgaggactacgtgaggacccaccaggggcgcaaatgggactgggaccctgaggacttcaggatggtggtccaacgggtgctgaatctcagctccgtggaggcatccctcatcccccaaggggtcctccccctctgctacgatccagagcgcgccaagatcctggccatcatgcaggtggtcggggcgtcgggggagcgggccccccgaggccacgatggcgtgggcgggagccgcaggggggaacaatctaccccgggagggggtcgtgcttctgggccccgcgacgggggcccggggggcagccgccctgccgacgcccgggggaagaggaagcaggagggtacccctctcccatctcctccccgagggggcggggcggtgcatgccagcagcaggcgcccggagggtgccgtgccgacgccgcagcccgagggggagcgaaagaagaaacggccccgcaagacggggtggatcgtgccatgccgggggaacctcatctcgcccccgaggtggtcgtttagccgacttccccgcaggttcgtccccgcgcccaccgcggccgtattcattctcccatctcccaaggcgagttttcactcacccgtttctttttgtcttctggtttttcttctgcctcagcgagatcccgtcgcgccccccccccccaaccccctggacattccaagtccggccggtctgaggccgaggagacggcgaccgcggaggcccggaggcgggaagctgaccggcgagaagccgcggaccgcctccgggaagccgaggaggctacccaggaggccgtccgggttcgccaggctgaggaggccgctcgggaggaggccagactccgctgggccggggagtccgtccgggaggcagaggcggcgcgcgcacgtcaggcggcctgccaaacccccgacccgactccgcccgaggcgacgacgacttccgaggccacccacgatgaggccgcgggcgcgccgctcgggcccgacccctcgggcgacgcttgggacgagccagcttcgggggacgcccccgagtccggcacgtcgatcggtgggccgagccgcgtggcacccacaccgaggcggctctcccctcggccttccgctgccccactgagcgtggagcccctcctgcaggccttggccgccgtgaacagcatggtgctggacgggttaagtgcccatatggaggccgtgcaggcggagagggcggagctcgacgcggagtgggcgcgcgtcgaggaggggcggcgctctgtggaggccatggtggaggcgggccg

SEQ ID NO: 7737 - DNA, 6803 bp, Oryza sativa
ccgatgatcaaagatgttaaggttgaagttgcagcaatgacagccgatgattggaggtatgatgtgcatcaatatttgtatagtccgtctcaatcggcttctaggaaattaagatacaaggcattaaagtatacattgttggatgatgagctttattatcggacgattgatagagtgttacttaagtgtttgagtgtcgatcaggctaaagttgcaatcggcgaagttcatgaaggaatttgtggcactcatcaatcggctcataagatgaagtggttacttcggcgtgcagggtatttttggccgacaatgctggaggattgtttcagatattataagggaggtcaagattgtcagaagtttggggcaattcagcgagcgccggcgtcggctatgaatcctattattaagccatggccattcagaggttggggaattgatatgatcggtatgataaacccaccatcaagtaaaggacataagtttatattggtggcaactgattatttcaccaagtgggtagaggcgattcctttgaagaaagttgattctggggatgcgattcaattcgttcaagaacatataatctaccgatttggtattcctcttacaactgatcagggtttaatgttcgtgtctgacgagtttgttcagtttgccgatagcatgggtatcaaattattgaattcttcaccttattatgcacaagctaatgggcaagccgaggcatctaataaaagtttgatcaaattgattaagcggaaaatttctgattacccttggcaatggcatactcggttggctgaagcgttgtggtcttataggatggcttgtcatggatcgatccaagtccctccttacaaacttgtttatgggcatgaggtgttttgccgtgggaagttagaatcggctctcaaagaatggaattacaaaatgatttaacagccgatgagtattacaaccttatggctgatgagagggaggatctggttctgtcacgtaatgataaattcatcccgaaataaaaatcattctctaaaaggaataatagaattaattaaaattcgaaaagaaattggcaaacactaaaatacgtacaagaaaaattcgaaagtggtccggagaatttttgttaaattctccttggtcaaaaaggagccctcaaattttacttgaattttcagagcaccgaaaatatttattaagcaacaacacaattatcaaagtttattaaaaagaaaaagctaaaaataatccccctccttcctttgggccaagcctccctctctctctcggcccgcggccaaagtccttccctcctccctctctttttccttccctctctctctcttgggccgccctccctccttcccctcggcccagctccctcctcctccctcttcctcccgggctgcctctccctcctcttctcctgggccgcctcggcttcgcccggcccaagccgagccgcgcctcccacccgtgccactcagtgcgcgcgcgcacgcgcccgttgccacgcgctgaccacgccccgcgtgggtcccacccccgggtcgtcgtcgtcctcccgcccggcctccttcctttctctctcccgtgcaaaccctagtgccaatcctccccaaaattgacgcgattcaaaacgggggtttccgaaattgattagggggttttaatccccattgattccttatcaattccccctaatttcccccttgattcgtgccctctaacgcccgaaacggccgcgccattcccggccgccttccatggccgccggccacaaactccaccgccgttccccgctcatcccgtggacggctccctctcctcccctataaaatgcaaccccccctccgtgcgttctctcgttttagcctcttcctgagctcccccgtggccgcaccacctctccccgcctcctccttctctttcctcggcgccggccaccctccagctgcctgtgccgcctcgcccgtgcggcggctgacatcgccaccaccttcctcggcctcgcaggtgtcccctctcgccggcctgcactccgtttcgcacggggaccatcggagacgcgtcctcgctggtgtagagtggcgttgccgccactgtaccacctccagccgcctgtgccgctttgccggagcgtcggctttcgtcgtcgctgcctctctcggcacagcagcgccatcctcttccccggccaagccacggtgtcgctcgaatttcgccggaacaccgccgccgccgcgccggcctctccttcctcctcatcgatgtctccttcggccgcccgttccaccccgcttgtgcaccggccaacgttaccaccacctccggcatcgcagcggcaaggtcgccctcggcctcgcctcccctccacccgaacaccgccggtgtccgtcgtcgtcttcattgttcctcctcgccggctcgtcgtctcgcggcgctgcctccatcgtcggcatcgcagcggcgtgttccacgccgtcctcgtctccgtgcagctgccgccggctgccctcgttgcctcctcgccggccccggtcgttgtcctcatcgtcgtggcgttcgtccctccgtcaagccgttcgcgttcgtcgtccgcatccgtcaagcgagccgctgcagccccgtcgtcgtcttcatcctcggctccgcatcatcaagcctcgtgccggccgtgtctcgccttcgttcaaggatcgccgccgaagtcgtttgtcacgcccagaaattcccgaatagaattccaagcagaatgtgcattaaaatccccgtccaggaccggccggggtacacaaacgacaatgttgacattcagatccacgtcttacaaacatcataaaagtcttacataaatgcagcggaaaaacgaaagacaacaggagttaagccttgacttgaactgcagcgggaacaccactccacaggcatcctcgacgaagcctactcctcagagaaaccaccatctgacatatactcgtactctggggttggggaaaatagagcaagactgagtactacccactgtactcagcaagtcataccggaataggggtatgatgcagggaattatcaaaggagagatagagtggttcatttgcataaagcgagcatttatatgcagaagttgaaagaattaaacagttgtaataattaatcaatattaatcatccgctgtccaacgctataccacgttgcaagaggcctaaccatccacctatactatccaatttcattacactaaattagggtgaaactaatcacggtgaatctggttgaccgctcataaccacgggcacggctattcgaatagttttactctgattagaggtgtacaactgtacccacaagacacagccccacgacacgtttccgtgcgccgacatgccaccacgacataccggaaagaggccgtgacaggacccttcgcataaccccctctaaccaagcacaccacacctcaggtttcacccccactcctcgcaaggcagcgggcagtcccctctcgtgcctaggtaaatcgagaagcgacagaggccgtcgcagggcccgccccgctccatcacgcccacccttgcctggatgcgtcagctagaggaaagctacactacaagcccagccgttgcccacgctggcttgtggtaagtacgataagttcttctagggtttcccgcgaaccggtccttcattgccatttgtgcgactagcaaaaccatgcacccacagcccaccatgtgattcatttcaattaaccaacaccaaagcggtggcactaatccaacactaccattagaaccaacagcctaaacattaataggattttccccattgtgtactagttgaactaagcatggctaagcaattcctagtccaaagtctattcatgttataacccaagctaacaaaggaacatggtacaacaatagcatggctatgaccataggtaaacatcccatagtaacattgtaaaacaatgcaatatttgacgaaaaacaatagagcatttgcaatataggatcaacatgttcaagtgacaagcatgacttgccttgctctgctgctggaggaacctcagcgactatttcgaaatacaccggagcgtcagaagaaccggaatctaagcgacatacaaagcaaacaatacaaacaggctataagactattgaaatagagaacaaaaccatttttaatggattctacaaatttttcttgatttactgagacttgaatgggcttaaacggagcacggatgaattagttatgaattttagaagattcactgcgtttattactataacaaaaatccttaaatcatttattgcgcaataaatcccagtgctgacgtcatcaaaaggggggtggcgccgacaggcggggcccgcatgtcagtggctcaaggggagataggggcgccggcaagtggggcccccgggtcagcggccgaaggctgccggtccaccgtggaccgggaccacgcgggtggtccaccgccggtccacggaaccgacggcccagatcgccccggggctgatcggacgggcggtggcgacccggctcagctcggctcaaggccggccgaccggccgcggcgatggcgacggcgcggtgcggcggcgagtctagcggcggctagcggctgccggagtagcgggagcggcggcggcgggtggttgcacggcgcgggagcgatggggagcacgagggagttcggtgaaatggggaaaaagagagagggggcgacggcggagcttaaataggggaggggaatcctggacgtggccggtgggggcgggattccgccggccaacgcggggagtgggggaggagagagaggcgggattcgaaaatcgaatcccggccatctcaggcgcgggcgcgggcgggagagaaggggagtgggcgctgtaggtgcggcgcatgcgcgggcgtggccgacgtggcccggaggaggcggatgcgtgggcgcggcggcggttgcagtctcagcgcgctgctcgaggtgggagacgggtccgataggtgggccccacctgtcggtgacccgggtgagaggatgcggtcagccggcccgccccggctaactgggccttggcgtttcggccggcccagcgggaggggaggaaggaaggaaaatggcccaacggccctttcaaaaaaaaaaaaaagggaaaaaaaaggaaaaaaaaaaaaatttttcctaaggattacatattgcttatgctcaattttaattggttaaaattatttaaagagctcttggaaattccactaaaaatcttgttagcgaatttcgacatgtagaactcaaaaaaaattcacatgccaattccgattattaatttgcattaatttattaaggtttacttttgctttacataggtattttcttgagaccatttataacttcaatttaggcttgggaaggaacttcggggtgtgacatcgttccctcgccgtttgcttccgtcgttcccaagccgtctccgttcccacgcctcgtcgcgtggtggtaaggatccctctccctcactgccccgtcctcgtcctttcggtgtcgcccgtgcctgttgtgcggttgtcgaccctggtacccatgtaccggtgtcggtagtcgttcgtgtgtgcgtgtggcgactgtgtttgtgtgcgcgctcggtagccgcgtggtttccacgtgtgcaggccgtgtggtgtctagtggagtccgtttattggccactcgcctcggttgacacacgggatccgcttccgtcgacccgtggaccatttctgtgtactcggtctactgtggtcccttaggttgacatgtggggtccacatgtcaacggcgcagccttcctgtcttttccaggctagcgcttatacatgttttataattgcaaaacctaatcacaataatccgtaaatctccatgtaacagcattaaacttcggatgatcatatcttggtcatacgaaccccgaatcgacccgttcaagtctcctaatgtttgttataacctaaagaaccatgtgctttctttttatgtattggtattgcttctttataggcttgtagctttgcttgtgtgcttcgcgtagcttctgtcgttccggaggttcccaaagcgtggttcgcggtcgtcgccgaaggttcggaaggctgttctctctgagcaagaaaagtcacataatccttgaacatatttgtcacatcctgatttttgtttcaggatttataaaattatttaataaattattatcagaatttatattaaatgttcattaatttacaagtgaagttaaatgtgggaaataaaattttctaaatataaagcatggatggatttaatttttattaaattctccatggttaattatactctctggaatattcttggatttttcggagctcaattcctaatttttaatcatacaaagagcagttcagcaattatttaaatattaaattaatcattaaatggtctgattataattttgttaagtattttgagtgtccaagtattttcaggatttttcttgaaattatttgagcattggaagtatttttaacaattcaaagatcatttcagtgattaatttaattgggaaagtaattaaaattcaccttttccttttcgggccgaattaggaaaagtcctctcattctcggcccagtctcctctcagcctgcagcccttttcctctctttcccgaagtctgctttgtgtccctctttcaatcgggccaagaagtagaagcccagccaaaagtctagtttgcatccctgctacagtggcatcttcaatctccagccgg

SEQ ID NO: 7738 - DNA, 2687 bp, Oryza sativa
ttaattagggttaattcttattccatcgcaatgaaatataattgatccccatatggtcgcgataatattttatttattactatccacacctaatctttatttttaatttatatttattttaccaatttgtttttaaggtttatttctaattaattattctttactcacgattaataatcctcgagatcaactccagataaaatagacgaataagatcggcatgatgcaattagtttaaaaagttgttgaaaatccgtatttttagagtttttgttttgtcggtcgaattttcagggtgttacaccaggtgatgcatgatgagatctgtcgaaacacctcccacctgatcagggccacaggcgaagatatcactgtttttcttgagtactctaggatgttcgcagcctcttcttcgcccatgtcgccccccagcgatacgagctttgtggggtcgacgtcatcaatctgcatcttgattatcttgtcgtgaggggcaggctttggcgcgtgcttcacccggtcatgttgttcggcctcaacattatgcactgctctattgattacggccagatcgccttttgaagcggccgaaggctgaagccccttcaccacgatcactcccaccgggccgggtatcttgagattgagataattgtggtgggagatagcttcgaacttgttcaaggtcgcacggccgaagatggcattgtagttgtatgggatgtcgacaacgtcgaacaatactcccttatcgactcccccggcctctggcgaatgccgagtagatgctgctacgtcttccgctcctcataggtgcctcgaaagttaagtacaaagacatcgcgcaattgctcccatgagtaaatgctattggcaggcaaattaaaataccaagaacgagcgatgtcgtctagagcaagatgtattaccttggccttggtattttcatcaccatgagccgcttcgatcgcggacttgtaaatagagaggaattcctttgggtcagtttcgactaagtagcgtgggacgggggggaacttgaattggggtgggattggacgggtcttgattccccactcagcggtagcccctttttgccccctgccgtgttcacggcaccttgctgtgggtacggcgtggcgaaaggagaaatcacggcttgcgcatgaggttgggccatgacattcggctgcccggctccgattggtgatgcttgctgacctgccatggatgagttgaacgttggctgggaccatgccatggcgacttggtttggtgcttggtttgctccgaagcctagcgttggtgcttgcggccgaacggttggtgcttgagcagtattgatgaagtcaaactgcggtccttgactccaaggcgaagcccccagacctggctgattcaacggcaaccaactaggcgcaccttgacttgtattcccctccaggtgggccgaaggggctgtacctgaaatgctgtggggttggctgagttgctgaaggaaagcttggagctgcacctgcagagccggttgagggtgtacttgggcaacgaccggctgagcttgcagttgcgcgtgaggggctggatgcaccgctgcgatcgagggctgcccggcgaagtatactggcgcttgcgtgacttgtggcggaatgtcgcgcccagaagttcttttccgtagcaaaactcaattaataaatggttggaagaaattatttgtttaaaggcaagagagaaaccctaaattaataaatgcaaataataatcggaatcggcatgtggaatttttcttgggttctacatgtcaaaatacgctaacaggatttttagtggaattttcagagcattggaaataattttaaccaattaaaaatgagcttgtgcaatatataaatcactggaaaatcctttcttctttttctttttcctccttttttctctcttcttgggccgtcggcccagtccgttcgcctcccgcgcgctcgccctcctctcagctgggccggcccactccctccctcctctctccgggtcaccgacaggtggggcccacctgtcggccccttcttcctcctccagccgacggcaccgccgccgccgaaaccgccaccgacgccgccggtttccccgtttcccgcgcccactccgccggtaccgcacgcccacgtcgccgcccaccttccccgtacctcccgccagctcgcgcgcccgcaaacggcgggggatttgaaatttcccccactctctctctcctcctccacttcccccacgtcgccggccaaatcggccacctttccggcctcgtccgcccctcccgagcccatataaacaatccctccactcccctccactttttcctctttccaccgctccctcccgtgccctctatcgcttccgcgccgctatacccgccgccgccgccttttccactcctccggccgccgctcgccgccgctggagccgctgccaagccaatccgccgccgttgttagcttcgccgccgccaaagctaccccggccgccgcatccccatccaatcccgccgtcggggcccgcttctccccgcgcgccggtgagtaccaccatagccgccgccgtcggccatggctctcgctcgtcgtggacaccttctctccatctaacctctctcacttcctctcttagggtgtcccggagcccgtccgcccgtc

SEQ ID NO: 7739 - DNA, 10564 bp, Oryza sativa
tatcctcccgcgccggccgaaccccggtgagaactccctccccttctcttcctctcacgcgcgccgccgctccccgcatgcgcgtcgccgcgaagcgccgtcgcccgcatcgccggccgccgccgtcggtggccgcttgccgccgccgccctcgccataaccggccggccggcttgaagccgagccggaccgaccgggcgcctcgccgcttcccccccttgtgacgctgcccagtgggcccacctgccagccgccccctctccctctcttagtgccgctgaccagtggggcccgcatgtcggcgccgccccacctcttgctgacgtcagccctggggcaatattgcgcaataaattgattaaggcttttcttttatagtaataaacacagataatcttctaaaaatcataactaattcatccgagctccgattaagtccattcaagtctcagtaaattcataaaaatgtatagaatccattaaaaatggttttgcttcctgtttcagtagtcttatagcatgttttgcttgtgtgctttgtttgtcgcgtagaattcggccgtttcgtcgattcgcggattctcgaagacgttgccgtggtctcatcagtgcgagagcaaggcaagtcatgcaatacaattgatcatattgtacccattttacaaatatcccgcatttctattaaatattgcattgttttacaatatcatgtgggataggtcctattactcagccatatattgtttaccttatgccattgataacgtgggtattcaaatgactagatgttggtttaggagatgcttagccatgcttagttcaactagtgcacaaagggggatcacattaaagcatagacttgattattggcatagctttgatttagtgccaccgtaatggtgttggttaattaaaatacacgtcatggtgggctgtgggtgcatggtcttgctagtcgcacccatggcatttaaggaccggttcgcgggatgccctggggggatcttatcgtacttaccacaagccagcgtgggcaacggctgggcttgtagtgtagcttttttctagccgacgtacccaggcgagggtgggcgtgatggagttgggtcggccggggtgtccggttgatcggcttccggattcaccgcggcacgaaaggggggctgcccgttgcctgctggggacgggggcgaaccctaaggtgtggtgcgatcggttagagggggttatgcgaagggtcctgtcacggcctcttccggtatgtcgtggtggcatgtcggcgcacgggaacgtgtcgtggggctgtgtcttgtgggtacagttgtacacctctgatcagagtaaaactattcgaatagccgtgcccgcggttatgggcggtcgaccagattcaccgtgattagtcccatcttaataaatcgactcaatacactgtagttcaggtgggttggttgggcctgttcaacgtggtgtagcgttgatcagtggagattcaatattactttaattactcaacagttttactgttttgctcaataaaatgttttacaaccgcctttatgcaaatagccacaaaccctccttgtatccccttgcacgtctgcatcgttggtgtggcttgctgagtacggtggttgtactcagtcttgctattattcccccttttcagaagtgtagtgcttctgagctgaagatggagttagaggaccaaggctcagaccccagttgagttttgcctgtggagtggagctgaagccccgctaggatcgcctttttccgctgctgctgcttttgtttcggtgtgaggactaagtgcctcttctgtaagtattttacgctttatttacgtttggaactgtttattacttgtcgttttgtgtaccctggctggtcctggacagggatttaatacacaaaatagtctggaaatttgggctaaatttctgggcgtgacacggaaggggctagatcggtgcttgtggatagacttggggtgggacgtagcctgccgaatactggaggattgaggccgaagcgaccttggaccgcctcgctgactcgtacgcctgctgttgttcttgcatctgacgaagcatgtcttggagtcatgtcatgttatgtcgcatggcttccatgtcggctttggtttgtgtttcggggtcagggttcacttgtacagcggcgagcgcagtcgaggccgctgccggctgcgacggagtggcttggggcaccagcagttggcttgtcgaaaggatctccgccctggtctagagtgcccttgccgtcgcggctgccttcgccatgtcaactatgttcggcacctacgcagaggcggcaggagccgaaggcggtactgatggcgcaggtgtggaggcagacagcgctcctccatcttcggcgatgggcgccgaaggctctctgctccctcttcggcggacatctcccccccggcttcgctttcctttcgccttgtaaccttctccttcacgaccctcttcggtggcattcgctctcagtggtttcgcttggaggtccccacggtcggcgccagctgttgtcgaaaggacaacggcatacgtcgaaagacgtggccactcaacagtagttggaaaagaagtaaagtgtataaaattgagaatttttcttcggatcccccattacatgaccctatgggaacatttatagccctcattactggttcttactactagggttttggttatacatgggaaattacatggttgcccttatgaaagggacatttatatgggtacatagtgtaatcgagattcatgggcccctgatgggccgtcgggcgatcatcggcccaatagcccctaggcttgatgggctggaaagacttcttcggtccttgcgggggcgaacttgctacggcgaagtcgtctcccttcggcatatactcttcgccctgcatccttcgcccaagaggccttatggcttggcaaggtacccatgtgattccccgcctcttgccgtcgttattccatagtcttcgccatggggggtcttcgccctgactaaccttgatgtctcgggcttgaatccccactgttcgcatggcttcggcaggtttggtcgaagggcctcatgccctatgggactatttatagccctcattgccataccgccaacaagcccctcacgggcaagggtgagattggagcttcggccgagaccgtgcaaaccatgtggtatggtatgtggcgccccctttcgaccgatgctcatgccgaaacctacattgttcctgcaaataaagtttattgtctatgtgacaggtattgttttgccgctcttcgcctcctgcggacgcgcgggcaggtgaagcttgcccctaggaagcggagggttcttgcttcctccgattccgatgacgtggacgacgtcgaagagtgtgatggcgaggaggaaggggaggaagaagaggaggcggaggccatggctgaaaaggccgcggacgaggcggtcgaaaaccgcgtcgacacccctagctacactcctactccaagtccgggacataacgagactggggtggaatcgaacagctccccccttcagaccgaggaaggatttggagggggcgaaggcgctagttgccttctcggcaggcaaggcggtgttaatgaccaaatttggtaatatcatcatcggaagtgaagatgagatcgaagcgcaatcagagataaggattgctgtgggaacagagtaagaatcggctgagtccagatcggctacgaccagaatcggctaaatccgaatcagactgggttaggtgatgcagccgattccgataatacgacttggtgtacaacatcgggttgagttgatatgcttcaagatgattgccgcacgtggatagagtcctgagaaggcaattgtatctattaattaggatattttatgtaatttccttagagatatgcttgggcaaaagtctgccgcaaagacttatggtatcttagagtttgttagagataatagtcgtgtccgttatggacatatcttgtaattctcgggtataaatagacccgagccctatgtaaaacacacacacacgttcaatacaatttcggcgcatcgccacctttttgctttagttttatttcgacgagttcttgcttttgggttgagctgcatcggttttgatcttcaacaagaggtaaaacttgttatgatggattgtgttctcgggattagtgcttccatctttacgacactctaatcttatttatgtaattcgtcaagttatcatatatcttacataatcttcgacaatatcgtcatctaacctacaatcggctaacatttgtcgacagaaggcagccgattaggttaaatagcgacgttgacctagattatataagatatctaccactttatgaaacatccggtggcttgattgtctagatattgttcttcctttcatacttaatgttgcgtcagttaagttcgatctattaagtcgtgcttagaatttcaatctctagcctgccttctggttgccgattagggtagtatcagagttttagccgatcttatctgatttaaccatatttgatctatatgcttcagtgacatgttaaatctgccctttatgtcaagatcttattgcattcaagtatattaacttttgtttggtatattatgcttgttttgatatctttatatagagtagtatcgaagtattagccgatacatgctagatcaatctgatcggctatgctataaacatatataatcctgttatttatatatatttcgatctaagtgatttatactatctcggcatggtgaccgatatatcccaatcacttgatttaagtatatattaatataagaactatatatcgttaatatctacagccgattggatagatttagttccttattgtctatttataaccgccgatcgattcacatatgacatcggctcaaagataaatgatatgtcatcggcacctagccgatcggctatcatttatagatttaaccacgaattctttgtctctatttcttgttgattacaggatcgaatcaactggcacgctcatacattcgaaggcgagctttggacttgcactggagttaagcagatctcccaggcctcgtgttttctatcaacacacttttggcacgcccggtgggaccatcaccacctcatggccgagaaaccaccaccacaaccatccccagctagcccaggctctgtcaaggaaaagatgcagaagttaggattgactgacgtcaatgaaggaaacgtcgtgccgatcgatccagaagaattcacacctgagcagaagaaagagtttgaagcaatgttgcagcaagcacgggatcagttcttgaactcattcatgcagacccgcaaggggacacttgttcagaagtacaaaataaaagtggttgctgatgatcctgggaccagttcttctaagaatggagacaggaaacaagcgccagacggctcggctcaaccgagtgacaaaggtgctaccgacggttctctaggaaatcagggtgacaattctcaaggagtccatgaagtgcaaggtaacggggtgcatggagttcaaggtgatggtgctcaggggttgcagggaggaaatcttaatcagaatagtgaggcggcacaagattttttcaataatttccaagaccgggttgactacgctgtgcatcatgctttgatcaatcagtatggggtgttagtcaataccttatcaaacatgatgaagtcaatagccgatagttcaatagctgagcatcaggctgcaggctcggtttatttgcaaggaggtgtctttccaaattgctgaccgatgttcagccatctattcaggcgattcccttcgttgcaccaacagctcagccaacggcaccggcatcaactcccctacctgctccgtcagcaatggcgccaggctagccggtgaaccctcggttgttaatgagagagcagccacagcatagtgggtaggttgcgaatcggctgacccaggatcaggttgctgccacgtttctgccacctcaacctgtttttgatccaatacaacatcagccgattcaacagacccccccaatccaacaggtcatgcaactagttcagcaaacaccaccaaggcagcagcctctgcagccgattcagcagatgccgttaagacagcaaatcgttcagccgattcagcaccaaggttcaataagcgcatcggcacaatttttaaatcaaattgtcacagaacacttggttcaccatgtacagccggatggcacagtaatgcctcaagttgttcttgaacacttagtacgccgaaccttcataattaccaagggggcaacttgaattatcaatatcagcctccttccccgcaagcccaatatcagccagggggactgactcaacctcagtttgcacctcaatacggttagttcgagcccttgcaacaacagtcacagggagcagctcagcaatgaccatgggccgatgtgattgctgatgtaatgagggaacagtttgggcttaaaccaaaagagactggaagcttgtatcggcaaccttaccctgactggtttgagaggattcctcttcccaatcggttcaaagttttagatttctccaagttttcggaacaagatggtgtgtcaacttatgagcacattagtcgattcttagctcagtgtggtgaagcatcggttgtagatgctctgaaggttagattgttccggttatctttgtctggatcggcttttacttggttttcttctttgctgtatgggtcgttcaatagttgggccgatttggagaagcaattccacagctatttctatagtggggttcatgagatgaaattatctgacttgaccgcaattaagcagcgtcatgatgaacctgtgcatgagtatattcagagattcagggagatgaggaacaaatgcttcagcttgagtttaactgatgcccagttagccgatctggcctttcagggtatgattgctccgatcagggagaaattctcgtctgaagactttgatagcttgtcacatctgatacataaggtaaccttggatgagcataggtctgcggaagttaggaaaaactataagaaggttaatcatgtttgtccgtacatgtatgggtcggatgatgatgaggatgattctgaaatagctgcagccgaatgggtgaggagtaaaaaggtcataccatgccaatgggtaaaaagttctggaaaagaggagaagtatgattttgtactaaagctgacaagatctttgatctgctactccgagagaagcaaattcaacttcctgctggtcatacaatcccatcagccgaggaattaggcaagaagaggtattgcaaatggcataattctggatcccattctactaatgattgcaaggtttttagacagcagattcaggtggtcattgagggaggcaagattaggtttgatgatttcaaaaagccgatgaaggtcgatggtaaccctttttctgttaatatggtacatacagctggccaaacagccgatagggtccgtgcaaagggttttcaggtgaatttggctaagattattaacaaatatcagatgaagtatgacaagcagcaggagaagcatcatgaagaatacgattatggttttgatcctcattggggttgtgagttctttagattctgctggaatgagggtatgagactgccatctattgaaaactgccctgggtgcagtgacatcatcgagagctcaagccgatcatataataggggcaatcggctaaggcagacaagagtttctgttcaccaaagattgggtccagtgaatcaagatcatggccatcaggacaatgtaatcagaaagaatcaatggtgtccttctggtattttcacgaagaatcaaaagagaagggttcaaagattgaggaacaaggagcgccttcaggaggtcgaacaagaaattaatcatcggctgaagaaagaaaagccgagacaggagtggcgtgttaagaatcaggttcctgtagccgatgatgttgcagccgatgaggcaaagaggttggcaaaagggaagagtgttgtgacggcaccggttaacatggtctttaccctgccagctgaattcgggatcgatcaagccgatgtcgacgaggtggaagaggaatcagctaagttggttctatcaccagaacaggcagtgttcgagaaacctaaggggacggagaatcggcatcttaaaccattgtatataaacggctatgtcaatgggaagctgatgtctaaaatgatggttgatgttggggccgcggtgaatttgatgccttttgctatgttcaggaagttgggtagaaatgccgagggtctcatcaagacaaatatggtgctcaaagattttggtggcaatccatcggaaaccaaaggtattctaaatgtggagctgacagtcggcagtaagactattcctaccacgttttttgtcaccgatgggaagggttcttacagcttgttgcttagaagggattggattcacgccaattgttgcattccttcaactatgcatcaatgtttgattcaatggcaaggcgacaagatagagatcgtgccagccgacaggtcagttaatgttgccagtgctgatttagctctttgggagatggatggccttgattgtttgtccggaaaagtttgggatggagattttctaaaagtgtccgattctgatatacagccaattgaagatggagaacccaagctattattttgagggcgtcgtagagggttcatgtctacactaaggacaccgtagatgatctcgatgacaagcaaggtcaaggtttcatgttggctgatgatttggaagaaatagatataggtccaggcgatcggccaaggccgacatttattagtaagaacttaactccagaatttagaactaagttgatagagctcttgaaggagtttagagatagcttcgcttgggagtattataagatgcctggactcagccaatcaattgtagaacatcggctacctatcaaaccaggggttaagccgcaccagcagcctccgagaagatgcaaagccgatatgcttcaacctgtcaaggctgagattaagcgtttatatgatgctggttttattcgtccttgccgatatgctgagtgggtttctagcatagttcctgttatcaagaagaacggcaagttgagggcatgcattgattttagagatctgaacaaagctacaccgaaggacgaatatccgatgctagtggccaatcagttggttgatgctgcgtcagggaacaaaattttaagttttatggctgaagaagatatccataaaacaacttttagatgtcctggtgcaatcggcttatttgagtgggttgttatgactttcggcttgaagagtgctagagctacatataaaagggccatgaattatatttatcatgatctgattggctggctggttgaggtctatattgatgatgtggttgttaaatctaaggaaataaaagaccacatagccgatttaagaaaagttttcgagaggaccaggaaatatggcttgaagatgaatctgacaaagtgtgcctttgttgtatcggctggccagttcttgggatttcttgtccatgagaggggaattgagataacttagagaagtatcaatgcgatcaaaaagattaagcccccggaaaacaagaccgaattgcaggagatgatcggcaagattaattttgttcgaaggtttatttctaatttgtccggaaagttagaaccttttacaccattgttgagattgaaggccgatcagcagtttacttgggggggcagaacaacaaaaagctttagataatatcaaagaatatcttagctctcctcctgttttgattcctccacagaaaggggtgccttttagattgtatctgtcggccggtgagaagtcaatcggctcagtcttgattctggagttggatggaaaagaacgagttgtattttatctcagttgtcggctcttggatgctgaaactaggtattcccctgtggagaagttatgcttgtgtttgtatttttcatgcacaagattgaggcattatctactatccaatgagtgtactgttatatgcaaggccgatgttgtcaaatacatgctatcggctccaatattgaaaggaagggttggaaagtggatattttccttaaccgagtttgatcttcggtatgagtcgccgaaggcgattaagggacaagctatagccgattttattgtgtgaacatcgtgatgattcaatcggctcggttgaaatagtgccatggactttattctttgatggatcggtgtgtactcatggtagtggtatcggcctagttataatttccctaggggggcatgtttcgagtttgcttatactattaaaccttatgcgactaataatcaagttgagtgtgaggcagtgctcaaagggttgcaattactcaaggaagttgaatccgatgctattcaaatcatgggggatcctatagagtccccctgcaggca

SEQ ID NO: 7740 - DNA, 7354 bp, Oryza sativa
ctgttggattagtgccaccgctttggtgttggttaattaaaataaatcacatggtgggctgtgggtgcatggttttgctggtcgcaccatggcagttaaggaccggttcgcgagatgccctggaagaacttatcgtacttaccacaagccagcgtgggcaacggctgggcttgtagtgtagctttcctctagccgacgcatccaggcaagggtgggcatgatggagtttggatgggccctgcgacggcctatgcggcttccggattcacctaggcacgagaggggactgcccgctgccttgcgaggagtgggggtgaaacctgaggtgtggtgtgcttggttagagggggttatgcgaacggtcctgtcacggcctctttccggtatgtcgtggtggcatgtcggcgcacggaaacgtgtcgtggggctgtgtcttgtgggtacagttgtacacctctgatcagagtaaaactattcgagtagccgtgcccgcggttatgggcggtcaaccagattcaccgggattagtctcaccctagtgtaatcttttgaatttggataggttaggtggatggttgggcctgtcgcaacgtgggatagcgttggacagtggttagttaataataattaattattacaactgtttaaatctttcaacttctgtgtataaatgctcgctttatgcaaatgaaccactctagctctcctttgataattccctgcatcatacccctattccgatatgacttgctgagtacagtgggtagtactcagtcttgctctattttttttcccaaccccagagttcgggtatgtgtcagatggaggtttctccgaggagtaggcttcgtccgtgccatcgagggtgcctgtggagtggtgttcccgctgcagttctagtcaaggcttagctcctgttgtcttcctttttccgctgcatttatgtaagacttttatgatgtttgtaagacgtggatctgaatgtcaacattgtcgtttgtgtaccccggccggtcctggacggggattttaatgcacattctgcttggaattctattcgggaatttctgggcgtgacatcataccaggtggttcagatgaggagcagcaatatgttagcgtgcaggtggagcacgtggatgatcaggaaactgaaattgttagtaatgatgttaatgatactgttcagcactcacctcctgttttgcagccacaagatcaacctattgcacatcgcagaacaaaaaggagttgtggagctccaattcgccttattgaggaatgtgatatggtttattatgcttttagttgtgttgaacaagtggagaatactcttgagccagccacatacactgaagctgttgtttctggagaccgtgagaactggatctcagctatgcaggaggagatgcagtctcttgagaagaatggcacatggaagcttgtgcacttgccaaaacagaagaaacctgttcattgtaaatggatcttcaagagaaaggagggtttatctcctagcgagcctccgaggtttaaggcaaggttagtagcaaaaggtttcagtcaaattgctggtgttgattataatgatgtgttctctccagttgtaaagcatagttcaattcgcacattcttcagtattgttgctatggatgatcttgagcttaagcagttagatgtgaagacaacatttttacatggagagcttgaggacgagatatacatggaccagccagaagggttcatagtacctggtaaggaggattatgtttgcaagttgaaaagatctttgtatggtttgaaacagtctcctcgtcaatggtataaaaggtttgattcatttatgttgtcacatggctttaagtggtctgaatttgatagctgtgtgtatattaaatttgttaatggatcacctatatacttgctattatatgttgatgatatgctgattgctgccaagagcaaggaacaaatcactacattgaagaaacagttgagtagtgagtttgatatgaaggatcttggtgctgctaagaaaattctaggtatggaaatcactagagacataaattttggtttgttatttcttagtcagcaaagctacattaagaaggttcttgagcattttaacatgcatgatgcaaagcctattagtactcctattgcagctcattttaaattatcagctttacaatgtgctagtactgatgaggatgtaggatacatgtctagagttccatattctagtgctgttggttctttgatgtatgccatgatttgctcccgtcccgatttatctcatgctatgagtttagttagtagatacatggctaatcctggtaaagaacactggaaagctgttcagtggtttttcaggtacctcagaggcacaactgatgcttgctcgaagtttggcaggactgataaggggcttgttggatatgtggattctgattttgctgcaaatttggataagagaaggtcattcacaggttatgtgtttaccattggtagttgtgctatgagttggaaggcaacattatagcctgttgttgcccagtctaccactgaagcagaatacatggctattgttgaagcatgtgaagaatcagtttggttgaaaggattgtttgctgagttttgtggagttgattcttgcattaacttgttttgtgacagtcaaagtgctatatgccttactaaagatcagatgttttatgaggacaaagtacattgatatcaagtaccattatgttcgcgatgtagtcgcgcaaggtaagccaaaggtatgtaagataagtactcatgataatcctgctgatatgatgataaaatctgttcatgttgctaagtttgagctttgctcaagcttagatggtatagtggtttaggccaagaggctatttggcgccgaaagtgtttttttgtctttgttgtgttcagggtgaaggattgtttcatactacaagaaggaatttgtctcaaggtggagtttgttgagttgtgatccaaattcatttgcacttaataaaggccagcttctgccgtagtggagcggaggcccgtcgccgggaggcttgggccggagcatagcagggacgcttggggtgcgggggcggagccaccgcgaaacggatcatcatcccttttagggttccaccatatatatatatatacctcttgtaagccgccgtgcggcgttgtaatctcactccagatatagtgaagatattttgctggctggtgcccgtggttttttctctcctgttttaggagggtgttccacgttaaatctcgtgtcttctgtgattgatctattattttttatcgtttgttcgctcatcgtttcctaacaaaactgattcatccttgcggcatgcagcgacgatccaacgacgattggtcgccatttcgatcgatcgatcggctggtgatgtatatgaaaggcgttcgttaattataattaagttgggcgcctagcttagcattgggtcctgcacatgcagcggcgacggaatcccctgcagtcgtcgccgcccatgcagatgtggtcgcagttggcttgtatcatgcacatcccgctgaacttgctgctttccgtctcgcattccctcgcctgcgctggcgccatctctgatcgatatgatcatcacaaaaaatatatatatattccatacattaattaacaccactgaattaatttcccaatattgatggttgatctctttgtccgctatcgaaaataactgcctgaatatcacaccgtccggtgttggtcgttaaaaaaggaaataactgcttgaatactaactagatcccacgcacatagtacagatgataaaaaagagagtaaactttactttggactatgttttattaccgaagttttgctagcttttataccacctttaactaaggaaaaatattggataaaggatgatacaaagtgaaatgtacattggtaataaaagatagcccaaagacaattctactcagaataaatcattatgtatatattaattgtctcctattgtacctgtgttgataacaagcaggaggaggacagcaatggccgggaagaacttgcgtgatgactccattgtttgttgttttttttctttttgtgttgaactgttgattcttgtctctagtttttctgttactgatgattgttgtctggaggcagaagtgtcatgcttatatatgcagatcactgcaggctgcgtcatgcgagcgataatgaccataggaatttttccaactctaataaaatagaactggctaatattagtcgatggctactattgctttgcattgtaatgagtaatgctagagactgtcgctcccaaaatatcgcagccattgttaattagttaacatataaaataaacaaatagatactcaaagcaatcggattggttaattggaattatttttaggataatgcatttcttgtattccagtaaattcaaagcttatcgaaatttaaatatatttttgaagtgaaataaatcatggtgcacatataatttggcaaggatcatttcagagctttccctaattcatgcataacaaattagtatatgaaaccaaagaaactggtaaccctgaaaattactgtattaagttctatataaaattcaagactcaccagatatatatcaacttttagttataatgtatgctacttaaaaaaactccatctcataatataaggcacaacatatttcatgaaaatttttaattttatttaggctaatataaattaaatttcatttgaagaaaataaaattgttgaattggcatttgaatttattttaactaaatgttaaagataagtggtagacaccatgacggagcgtggggctcctcaccgggagaccgcgcaggcccccctttgccgtttcggccgggggcgctaagttaggttcttcgccctcgatctgaggaacgtcaacgggagaggaagtgcacaagacacgggcgacgtagacaggttcgggccgctgagaagcgtaacaccctactcctgtgttctggtggatctgtgcgtgaaggaatacagagacccggagagcgagagtgagttcaggctctagaaccccttccccagagtcccaaccccctttctcctaggcctgggcctcctttttatctggtcaggggtcaccacatgggcctctagctgcctaagaagggaaacatgctttttacaatgagggctagtctacagccggaagtgacctctgacaagcagagcacacgcctcctgccccgctcgcccgctttcccggtggacgcccatttcaaccttcatttaatggccagcgacttccttgccatacttgcgctgaagcctggaatggatctgaccgggactgacataccaactccaggagttagcacgccggctccggctagggacgagagccaggaagctctcatcattccgacgggacggggcgaggcgtgtgacaggccgcctgttgccacctaacccgcgatctgaccggtctgtgaccggtcacacaccgcgaccggtcacggaccggataagcgtgcgctgcgcagcattaaatgcggcgtggcgcgctcgtccaacctgctataaatgcggttaggtgagccccgctgtgctcacctaacccacacacgtggcgccaaaaccacagggggtcggggcgccccagccctcggggccgaaacgggggcgccccagccctcggggccgaaacgggagtggcccgacccctcggggagacagagggaggggtggccacgtcaccctcgggaccgaccccccctacccccgagggggtcaggccacgtgggtgaccgcggctacccaagcctctagtcacgatacccccggccccatgtcaccgacagtagcccccggcgttacgccagggcgatcgccccctcgagggaagcgctcgggcgtgacgccactccttaggcccggtgacaggtggggccggtccctacaggcgggcagaaacccagcagtcacaaatcgcgcgcatcggcaagggaaaaacgaccgacgataatgagcggcctctttaagaccgctacattactcgagcagcgcgcgaatcgggacgagccggttcgtttcgcctggagacatgatgatggcgcttttcacggttagcgagcgtagttaatgcgcgcacgatctgccccatctcaaccgccatggccgcacatctgccgcgtgcgccgcaaacgggcgagtggggttagtggaggcgtgggcgcgagaaacgagggggcgaggtagtgggcgcgggaagcgaggagccgggcatagcgttggcaagggtgtaaagacgccgaggaagggattcgtttctttcctctcgccactcttccccttgccttcgccacttgcgctctaactcttcgtttcctgtgccctacccttgccgcactcgctcgctctcaagctcctcctccgccggcgtcatggcacggggctccgcaccgctcgatggtagcgtgctgccgccttcccgcatcgtgagcgagaggcaggccgggctaccgcgccgattcatgccggaatctgccaccggccgggaggtggtcgcgctgggcgagggacgcccggcgccacactacccggggcggtccgtcttcttcctctctttcgcaatggcggggctggtcccgccattctctatttttttcatggatattctggagttttatgatctccagatggcgcacctcacccccaacgcgataatgacgttggccatcttcgcgcacctgtgcgagatgtttatcggggtgcgcccatctctccggctgttccggtggttcttcaccgtacagccggtgtcgccgccgacggtagtcggtggctgcaacttccagccgcgggggcaggtgctgaaccgctacattccctgcgtcctccgcaaaaagtgggacgactggaagagcgattggttctacacccccctcgccgacgaagcgcgcctccgacttctgagccagcccccggcgcaggcctccagctggcgggcggcggtagatctgggagacggctacaacgccgttcttgaccgcctggcgggtctgcgatcccaggggctcacggggtccatggtgttcggcgactaccttcgtcgccgaatcgcgccgctccagcggcgcgcccggggcgcctaggagtacaccgggcccgaggactacgtgaggacccaccaggggcgcaaatgggactgggaccctgaggacttcaggatggtggtccaacgggtgctgaatctcagctccggggaggcatccctcatcccccaaggggtcctccccctctgctacgatccagagcgcgccaaga

SEQ ID NO: 7741 - DNA, 2729 bp, Oryza sativa
atagtaaagatatttttgttggctggcgcccgtggttttttctctcctgttatggaggggtgtttcacgtcaaatctcgtgtcttctatgattgatctattgttctttatcgtttgttcgcttatcgtttcctaacaagtggtatcagagcttgttctcagattagggtttcgcgatggcgtcgatgaagtatgatctatcgctgcttgactacaagacaagattctcgctgtggcaagtcaagatgcgggctgttctgatgcaacttaggatcttgatggggcgctggaaaccttcgggaagaagaaaacgactggctagaccgctgaggagaagcggaaagatcgtaaggctctgtcgctaatccaacttcatctatctaatgatattttgcaagaagtgttgcaggaaaagactgctgcagaactttggctcaaactagaatcgatctgcatgtctaaagatctaaccagtaagatgcatatcaagatgaagttgttctcgcacaagtttcaggagagtggttctgtgttgaaccacatatcggtcttcaaggagatcgttgccgacctaatgtcgatggaggtacagtttgatgatgaagatttaggtcttttactgttatgctcattgcctagttcatatacaaatttttgtgacaccatacttttaagccgtgatgaagtaaccctagcggaagtttatgaggcgctccaaaacagggagaagatgaaaggtatggttcagtctgatgcatcgtcctctaagggcgaagcattgctggtcaaaggcagatctgagcagagaacctacaacgatagcaatgatcgtgacaagagtcagagtagaggccgttctaaatccagaggtaaaaagttttgtaagtattgcaaaaagaaaaatcacttcattgaagaatgttggaagctgcagaataaggacaataggaaatcagatggtaaggcctctgttgttaccagtgctgaaaactctaattcaggagattgtcttgttgtttttgctggttgtgttgctagtcatgatgaatggatacttgatactgcatgttcttttcatatctgcattaacagagattggtttagttcttacaagtctgtgcagaatggagatgttgtgtgcatgggagatgataacccacgtgagattgtaggcattggctccgtttagatcaagactcatgatggcatgacacgcacgctgaaagatgtgagacacataccagggatggcgagaaatctcatctccctcagcacacttgatgcagaaggatacaaatactccggttcaggtggagttgtaaaggtatcgaaaggttctcttgtttacatgattggtgatatgaattctgcaaacttatatgtccttagaggaagtacattacatggttctgttaccgctgctgctgtttctaaagatgaacctagtaagactaacctgtggcacatgcgtcttggacatatgagtgaacttggtatggcagaattgatgaagaggaacctgctagatggctgcactcagggtaacatgaagttctgtgagcactgtgtttttggtaagcacaagagggtaaaattcaatacctcagttcatcgcaccaaaggtatacttgattatgtacatgctgatttatgggggccctctcgtaagccctctcttggtggtgctcgttatatgcttaccattattgatgattactctagaaaagtgtggccttatttcctgaaacattaagatgatacatttgctgcttttaaagagtggaaagtcatgatagaaaggcaaactgaaaaggaggtaaaagtacttcgcactgacaatggtggtaaattctgttcggatgcttttgatgattattgtaggaaggaaggcatcgttaggcatcacaccatcccgtacactccacagcagaatggtgtggctgagcgcatgaacagaaccatcatctccaaggctcgttgtatgctgtccaacacgcgcatgaacaagcgtttttgggcagaggctgctaacaccgcctactacttaatcaacaggtcgccttctatctaacttaataagaaaactcccattgaggtatggattggtatgcctgctgattattcacaattgagagtttttggatgcactgcttatgctcatgttgataatggaaaattagagcctagagctattaggtgtctgtttcttggttatggttcaggagtaaaaggatataagttatggaatcctgaaactaataagaccttcatgagcaggagtgttgttttcaatgaatctgttatgtttaatgacagcttgcccacagatgtcatatgtcacaccccgaagttctcctcccaagcctaaaatttaatttataaatgaccctaagaaaatgccggtgcaaatcatgagaaaaccctaaggaagtaatacaaataataatcgaatctgacatgtggaatttttcttgagttctacatgtcgaaattcattaacaggatttttagtggaattttcagagccctagaaataattttgaccaattaaaattgagcacaagcaatatttaaatccctgaaaattcctttcttcctttttcttttttttctttttccttttcccttagtgggccgccggcccacttcccctcctctctcctcgcgccttgctgggccggccgcaggccatgccccagctcagcccgcgccccctcctctctcccgggg

SEQ ID NO: 7742 - DNA, 15715 bp, Oryza sativa
ccgcgcgctagcctccaaggggcagaggcagagagcccctctccctctgccgagtcgccctgctccctcctccttttcccaaatcggcaaaggggcgagccccctttctctccctccttttcctctttttctcccctttttcccctctcgccggcgtcacctcctgtcgccgctttggacgctagccggagcgccagctcgccggcttgaccgcccatgtcggttcccctctctcaaaccgacattgccgcccatttaaacccgtcttccccctcccttcctttcctcccccattcgcctcctcaccgttgccgccactcccgtgctctgcctcgcctccgccgtccatcgccaagcgccgggagagccggtgcgttcgtggacgcggaaggggactccgggcgcgccctcttcttcctcttcctcggcccgaggccggagagatcactcccgcgccgttggcctctcgtcacagcgcccctcctcaccacggtagtgcctctctccgttcctcctcctcgctccatctcctccccctagctttcggtagtagcttgagtagcctccccgtagttagtcggcgccgccccgaccgttgccgtcgctcgccgtgtgctcgccgccgtcgccgcccgagctccgtagcacccgctcgtcgccggcctcgctcggcgtagttccgcccaatccgacgctagcgtcgagttcccgaagccgcgtagatgctctcaccgccgggaattgacctctcgtgacctcgtcgccatttccctcttctcccgccaccggttgccaccgccgcaatcctccgccgtcgagcaacctccggcgaatccgagccgttggctcgcctccccttgtcacgtgcaaccgcccggtgtgctcgctgttgcccgtatcgccgtggttcgctccgccgctcgccgccgccgcccgccgtccattcgcggccgggtcgtcgtctacctcccgccggcccgcgtggcagccacgtaggcgccacgtcggcgccagctcagccagaccgggtcgggccgaccccggtcggtccctccgcgtgcgcgcgatccaccgcgagccgtgaggctgcgcgtgggcccgccgcacctgcgtccaccgcggaccgcgcgcatgcaccgcgtcccttctccgcccgcgcgcgtgcgtcgcgtgctccttccgcacggtgagccgagccgctgacaagcgggtcccacccgggaccgcgtgtggtgagcccggtccaccggactctctgtcctccctcccgcgcgcgcgcgcgcttgggccgtcttgggccggccggcccgttaagatcggccggtccgctccatttcccttgggccgcgccctagccgcccgagagaagtctacttctcctccctcttccttttctttctcaaaatggatttaatttaatccttttaactttagaccaaaaatccaataatcttagaaattcaatatcttcccaaccgtaaatccgtttgactccgttcaacttccaaaattccccaaatctcgagatctatctaatggcacgcttagaggtcattaatagggctttattttcgccgtttgttgagttgtcccatttcgcgtgtagtttcgaagcccgaagacccgcagtgcgaggatttcgaggatcaagctccagatctcgagcaaggcaagccacctttgaacatcttgagcctatatttgaaatttaattatattgcttgcaaaatattatgcattgataggatcgcacttaatcttttgtcccatctgcaaggcagattggcggacctaccagacttgttgcatttgatccttccattgttaattgctatactatgtccctttgtaaccacccagttgcgcctcgataatcgtgcactctgtgcgagaatcgacggtcgccttcaaacttaaaatctgagtaacaacttgggtaaaactggagttttacaaaagacttggaaaaaacccgacacctgggtcggtgcttgtgaactaaatgaattcccaaaaccgcggaccggggaacgtaccgggtgtacgattacccgctcttgcacctaaggaccgtttccttggaatttcatccgaacataagacaagtacgaccacatgggtggaatgggacacccttggctgagtaactagcttatcaggggagccttgatgccgagagacatgtggattcgccggggtggtgtcggggaggacccctgggcttcctggcacagtatggtctgggacctaacctgttgttggtctgggacccctctcgtcggcatatggtaaacctgtgtcggctttcgaaatgccttgtcatgaaagcttggaggtctcccgacgtggctgatccccacgggctggatgatccgggttagtaatgtcatgtgggtaaagtgtaccccctctgcagaggttaacaaactgttcgaacagccgtgcccacggtcatgggcggatgtgaggtgattcctagcgtagttttgtttgactactgctcgtgaaattgctgttgtgaaaatgggttcgatgtttgaaaaatcagcagctgacgggatcagctaggcccgggtggccgtttggaaagttgttggcccgggtggccgtttgaaaagttgttggctcgggtggccgtttaaaaagctgttggtcgggtgccaaccttgtttcaagatctaaagactgacacattgcacatactccgaccggacgagacgcactgtctcatccgtgtcgtttgagaagcactcacttagttgcttttagaaaagagttcaaataaaatcaattgctaaaacaatagcctttccttgaagcctgcattaaacacttatttcccctggcttgctgagtactcccgtattcacccttgctctatataaataactcccccccagttgctgaagaagatgaagcggatcctgctgatgaggagttcttccaggagcaagctggctacgatgagttttagggtttcggcctagttcccaagtcgcgcctgtgttgattggtccaagtcctggcttccgttttccttttgtaatgcagttgtgagctcgggatctgtccgcagcccaacatgactgtactcctactctataataaagagacttctgttgctgtgatattctgtcttcctgtgataccagcactgtttcctgggactggtatcgattaacaggttaatttggagcgtcactgtaacatacccgaaattttaggacttaaaatttcttgtcaaaatagttagaggttaacttctccaattttgagagagagccaaaaatttccattttaatttaggtgaagatcaacttaaaccattgcatgattaaaatttgagaacaaaataaaatcttttcattcccaacattagactagaaatgtcaccaagcatacatgtacataatgcatgcctaggctcgagttctttgtgcatttggagttttggtcttgcattccataatagatcccatgagcataatctaaaagaattacttcactaaacaaacctatagttaatctgttaatcttgggtgataacatgtggacttaatattaaactcaaatatcatcttcttagtctaaaagaaatttaatgtaatccctataataatattagatgcaattatgaagtgggaatacatatacaaacaaaggtcatcctaattctctaaaatattttgtgcaagataaaatcatggaaaaatttatgtggacagtgattagcacaaacttatcctctgtaattttggtaacatgttaacactcaagttgaaatctcaaattaatcggtcgaagcagacaactaaaagaaatcaaattaaatttaatcggctaaaaccatatttcatccaaaagtacatttaactgcacataagtgaacatgggaaataatttattcaaatattagattagttatcatgaataaatgtaatttttctagatttttcctcctctgtttaagcctcctaaaaattcaatctagctttctaatagcccatctttgtttaatttctgtgagcagtccacccattatttttgagtgcaaccaaagaaaatggaatctaggtgtaatcatctaccaccagtaaaatctacactaattcttctggtctacacattaagttatgtagttacaaagttagaggagaaaataattccgaaaattaatctaaaaatcaagtttaccagtcttctacccatatctctctccctggcctagtttccatcgagttggccccacttgtcagtgccttaggctaggttcagccctgtccaacacttcctccttctacacctctctcttgcctagtgggaccccattgtcagcctcacatccctctccacacgggcccacgactcagaccccgcgcgccacgcgtgtgagcacgcgttgagcgcggaagagggcgagctcctcctccccatctccgccggcgaccgtacttaacccgaccggccgaccaactcactctctctcgcccctgtctcgtttcgcggaagaaccgaggtaccccgcctcggattcgccgggaacgggggtgccaactccggcgccggtgagagaagtcctcgacgccgtcgcaatccggtgagctccatttccgttcaataagcgttctgtatttccctctcaatgccgtctctaacgccaccaagaacgcctcttttggtgcagccaatctccgggaacgcgaccgcatcaactcggaacaccgtcgcgctctggacgccgctgcttcgcctttgctcgtcgcccagcttccacggttcgtgacaagctgagccacttcgccacgagcttcatcaacctctgtagatcaagaatcccgaaggaatcgacgcgaggtggaccacggtgggagatcctcttctttttcttccaactctggccgccgacgccattcctttctttctccttctctggtgagcttcggcgcaatctttttcgcctagagctaccttgtgctgatctaaaccgaagcatgcaccctctatatgcagtagaagcccgggagtacaccgtcgacgacgaccgtagcagttgcgccgtcgccgaaccagtacaccgtcgccaagacttcgccgagccgcgtttgattcttggtgagcctcctagtagtccctagagtccttatcgtacgcatgcacgattaaatcgagcctcaaaacccacatgcatgtgcaagccgagctgagccaccgcctctaacaccctaacagccgctatagagcaccaaatcttgccagaaagccaccaataggttcgcacggttgttctctacactttttgttttgggagcttaagctgaatcgccgttgttcgccactggtgatgctgtgaagctcgcggctgtgctgctgctctgctctgtccagagcaagggcatggcttttgaaatttaaagactcccagggatgtattaacaactggaacagtcacttacaagtaggaccagtaataatctgtaaataaactaaaactcaagcatcgttttgcatacaaacctaaaactaggggactgcaggatctatttcccgagaaaccaggggtttttgcgcaaaatgttagtaactgacatatgggcctaggactgcgggttgattcctagaaaactcaagggcctttgtgcatattggtccctcacagccatgtagacccatcctttaaaatctgaagaaaaattaggaaaatgcccaaacaaatatatgtttaacagaaaaatgcacaaagttgtaaaatctatataaaatcaaatatagctcattttgaagtgattccagttgctgtagattcttgaagttatgaactttattccaggaatataaaacttgacactcactgtacaaataatgtctctaagatttatctaagataagtcatgcataaaacatgtacaaacttataaaatacatagaaaattcatttcaactcattttgaaacaaactcaaaaactgcagattcatcatcagacacactctgattaggttaaataaaagtaatgacttactttgcatcaaatggctctaaaactattatctctataatgattagttttagataagctaaactttagaaattcatgtagaacccaatttagcttcaatttgaataaacttaagttatgtaggatcactaaaacatgtatttccaagttatgaaataagattatatacttgctgtgtagtaaaagtctctaaatattcatataaggatttactaacatagagcagccattaatttgtaaaacttgtagaaaatttatttttagtccaaatgaaatgaacaaagtttctatagaaccagcaaatagttatcttcaacatagtaaaataaaatttgtcaccttttgtagagaacattgatcaaaaccttaacttagtgaaataagaatttaaacacatagggttgtttaagtaatacataaacatgtataagtatatatatacactttaggtctaattaaacctaaataaaaacttgattgaccagtgaagccatagttccattcccatccactaaaattagaagaacttagctcatataacaatttctaggttaatataatatattgctagtttagattagagcatctctagtttataaaatatgaaccatagtagtaaagaccataaacatgtgaactaaaaatgttttagttaagcgaattattccttttattcaacttaaacaggaagtagcatgttctgaacctataactcaaaagtcatgaacatataaaacactatatgcctaaaacacgttgtaacttgtaaaatctataagaaaatcattataattccaaaaattgtaaaaccaaatgtgttagtcttagaaaacacatctccacacccctgtgaagtctaatctaataaaaatcactttacaaaagtatttcataacactacctaagactatactattgtaaaccgataaaacttctaaaattcataactcctaaatggaataaaataaaataggaattatttcacctaaattcattttagatcatttccaacccactgtgcataaatcatgcattttagagcattttggattttcagctctttcggtgtttaattgcatatcgtgtcctttatctagataattgcataatcggtgaagaagtggattaggtgctaacaattctctgatcaaggcaagttttctcctcccatcctttgaacacattgaatcccatgatttgaggaatgaaaatatttgtttgcaaagttgcatgtgaacttagactatatcggtatttgaaattgggttaaggtagttatgacctatttgctgcatattccaccttgaataattgatcctcttgctgtttgaacccctagaaatgattagagtacattcattgtactcaaatgggtttatatatgctctatgtgcaactacttgcttagccatgcttagaaatatgcaaatgctcattccatctataattaaaatgtgaattttgatacatgaacccttgctggaataaaatgaatatgatgggtatttgcgaactaaaatgtgtaaaatgtgattttatacttgggcggcaagtggtgtgcatatggtgttagttgcataccgataggggaagtgtttgcccaagcccataaggaccgaacttgtgtcacccatttaaagttatccgtacatccacatgtgctagtatgggatggcctaagctgattaatctatttaggactagccttgcattctggtaggccggtgtgtatgagttagtcgataattctgaggaattagtcgatgattcagaggaacttcctatttgccccgacgtggtagtttatgtgactaagtctgtccaatacaacggtattgtgccacgtggtgggttcccatcgtgtccgccaccacggcgttaagtttaaggcgtgggcccgccacttaacggttctaggtatattccaagtatgcctaggatggaggaacacgtatcgtactggtgcaaggctaggctctaagtagtgtaaaggcttcgttatgacctctagatcacattcaacatgaagagtgtggtggagtcttgcaaactcaaaacaaactagagagttcatatcatgtgggtaaacctgtacaaactctgcagagttctttaaactaatcgattagccgtgctcacggtcatgagcgctttggtgatgtgtcatgagtatagactatgttttaaaaatgtgatcatgtgacattggtttgaaattgataaatgtgttgagttgtgtatgtggtgatacattatgacttattgttaagtatggcaataagagattgtttatgatggaattatgaagaagttaataatgaaacttaaaacttgtctttgttaattgaagcatcaactcctttacaaaagaattgcaaaacaaaacttgctttatgctgaaattgaactacatattgccttcctttgaatatatgccttacatgtagtatagtaggattgacttgtgcttgccagtacattaacttgtttaatgtactgactcttgctgttgatataaccttttgtttgcaggtttagtcttagtctttgagtgatgcgggttccgattgcttcttctaggatgagaacttaatggggtatacccctagtcggtgtgcttgtgtttgggtagtcaagcttccgctgttctctaataagtctatttggccggtcggcctatgtaattattaagttgttgtaagtcttaagtttctttcatcttagttgtgtttgctatgtgtaatcatgcttaagatgaaagtgtgaatctagtgcacatcctgggaactagattcacatgagtatgagttaggaatatttgagaggttgtagatctttagccatttttgtcaagtctcctgaatgtgtaacacatctggtcgccgccttcgagtggtttgacgggcacatctcaggctgaagttgactggcaggctaagggcccagcaatgtctccaatattcctctctcgaggtgtcggatgtttcattatgcttgtttgatgacttgaattattcacttcatctctcaaatataatggaaggtccggagagcctacgacagtcacgggctagttccagtcggggctagctcggggcgtgacacctaccatcccgccgccacccttctgccactgctaccttcaacagaggccgcctcccgccgcctgccacctccgcacgccgctactaccggtgggtcgccgtcaggtcggttgagaggaagaaggggagatgaatgaggaggaagagaaacagagaagaagagatgagaacgagaggaaaagaaagagagaagaagagataagaacgagagagaggtgggtggtgggccccaccggctcgactggttttttttaaaaaccgacacctataataaatttttattataggtgtcggtttgaaaaatcaacaactatattataggtgttggttttttttatagaactgacacctataatcactgaaatgcgctggtttttgtattttcggaccgtggagttgagaaaaggtctaaagataccggttttaacactttccggtacctatagtggtgacacctatttgatgttttacgtagtgaaaacacgtgttggcagacatattgataaggagctggggagggaaaaagaccttgctgcataagtgcagagtgcagactttgctgccgccctgccggaggacgagccacagcggtggcttccatcacccgccgcggcctgcatcgacccttcatctcgaccaggcagacatggaagagagcaggaagaaagactaggaagaggaacaaccaaacatcagcgctacaagtgcgctctactccagatcgatggagcagtggaaacgtcgatttccccctcggcctgcttctctggcccatgtcacgtgtgacgtgttgttgtttagcatttgattgggccaggaccaggggtccaatacaatttcctaggggtgtcccacgttgtatacatacacaggctatacttggagcgtgggttataagctctcgagcggacattccctcatcggcttcttgtctattgcatattatctaaatagtcataaaaaatatgaaaaaatttatgaagatagattaatatgtgatatatcactacacaaacatacaaattaaaatatgacttctacaatccataacaaaaataacaaattaaattgtgaatagtatacacatactcacaatcatatatttgttatttttgctatggattatagaagtcatattttaactttcatgttttttatgactatttggatagcatgcaatagacgaggggacgtcccctcgagagtttaaaacagtttccgctatacttgccttgatcctgttggttcgatggccagaaattaaagtctcttttggccttccctttttagccaaatttagtatccaacagcagagtgcttctccaataccatctaccaagagacaccacttaataagtattcaactagttttaaagtaacagacaagatggtgttaggaattaatataccacatgcatgttgagaaccacttccattccaccttcgatcggacttatttcgcaaaactataaaaaacttgtaatgatcccgtactatcaagaatatatatacttaaatgtacaacggcagatccagaaattagttcgttggtgtcataacgtgcctattggtatcatagtatactaattgtacttaatcatagtgttataatatatagacaagcagtttaaccataggttttaccgaatatcatcggtgacgtctgacaccggtgtttacactgtagatccacccctgaatgcacacacatctcatataaaatttctaattaatcaaatccattttaaaaaaactggaataaagtttgcatgaaattttccataccgtcagtatagagcagctcacgttaatcattaattgatacggtacatctatctatactaatataaaaaggagttgcccccgtccaatcctacaggccaaatcacccacatcaatctctaccgtccatctgcatatcttgtgatccgtaccgtccatctgaatatcctctagaaacgtacagtctacgcgggcgaagaccacgcgcgatgactacgcgccggtgcgagtgtgacacgcgctcctcttttctcatcctcctcctcgcgtgtgctgccgccgccgcctcgcaccaccactgtccccaccggcgcatctcgctcctcctcctccaccaccacgtgccgctcctcctccaccaccacgacgtgccgctcctcctcagtactcctccttgcatgtgctgttgctaccgcctcgtgcgaccgttgccctcgccggagccgagttcttccccttccgctgccgccgtcggagccaaggtcgtccccttccgccgccgccgtcggagccgaggtcatccccttccaccgccaagctgaggtcttccccatcagctgttgtcgccgcactccacatcaatatgagtgtacacgtagggtcttgacccatcacgcacgcgcaatccccaccgccgcggcaaatcctcctcactgacgcgctctccccaccacaacgcatcgatacatccgcacaaaccctaccgcgacgcaatcctcgccaagacccctcctccgatgacaacgctgctgtgccgctgctttgcctacatgccgaggttgttcctgcaaaagtcctcggctgtccacgaccgtacctattctgtcacgcctccagtgttctcggtgacaacggcagtaagcggaggcgttcggctctacttgctggatggcaggggaggggagatggtgtccgtgcgtactgtcctccatgtggtgctcaacttcgccttccttccgcggacctccctccgacgtggtgcgcgtgcttgccgcatcgtcgtcccccatcacaagagggtggcgatcaacctcaccgccctccttggacctctcgccagcatggtgcgtggactcgctcgccaaccaccccagctctccctaagccgtggaattgcagtctctccaccacgcctgacgattccacggcctccctttgtcgcgcgaagggaagtctgtgagggacttcccagtcatcgagggacctccttgtctagcatttggaaacatcggttcgttcaatctctcctctccagttcaccccttttcttggttcaatttgaacaatcaaccaatgaagtaaactattttctgtatgtacgtgaagaatctatcggtgtattgtgccctgtaggtgttcgatgaattgctgttgaggaagggataatcagttcacacccattaatttggttgttcacttgctttcagatgacataaaactatcgacattgtggcctacttgcatgtcccatttttcaggtatttagaattcaccacaaatggaatgtattcaaggggacatcacgaatacgagcgatatgctcttcttccatggatagatcttaaattatcccgctgaagttggagatggatatgttcttgacatggaaggcagcaaaataggcctatcattttcaagatcaagggcagctactgttaggactctctaggatcacctaggtttagatctagtcgggtggttctatttgggttgatgtttgaacaacaatggatgagggagagggtttagagagaccgaccggttgaggtgttggaggatgaagatgtgccgaacatcgtcgttgtcgtcgcgggcttgatgtggacggcggcgacggtggtcgtgacggtgacggcggtcgtggcagtggcggttgcacgcgatcccggcgaggtcgtggcgctgcagtggcgtttcccgtcactggttgcgcccccttgatcggattagggtttgtggggtggagtggcggtagcgacgaaccttgtgttgtgagccgccccggcctccaccccttttatatggcgcagtgtgacgggggccaaccagccattgggctgggcgcccccaatcagggcgagggtcaaggcccccttgtgccgttgggctcaaggggagggagatccatctaacattctcccccttgatcttactatttcttttagcctttttctattccatcacagatttacacatagagcatgcttcatcgtcacagtgaatcaccgatggattcgacagccactatacacatatctattcagaaatagatactttaacttttcggccctatagtccaggattcataaggcttcccttaaacccatgccggctacatgttccttgaacacgttgggcggtaggcctttcatgagcaaatccgcgagcatcatttctgttctaatgtgctcgagactgattgtttgatctcggactttgtccttcacaacatagtaatttatgtcaatgtgtttggcagcaccacttgactgattgttgtgacattacattaccacgggttcgttatcacagtataactttagtggtttctcaatactgttaaccacctttaaatccggtatgaacttctttagcaagttcacctgccccgtggcctcatagcatgctataaactcggcatacatagtagaccctgcagtgatagcctgttttgagcttttccatgaaagagctcctcctgccagggtaaacacgtatcccgatattgactttgtattatcttttgcaaagtcagaatctgaatacccactatctggagcgattctgacagcatgaggccttttgttccttgcaaataatgcaagactttctttaccaatttctaatgctctgggcctggattactctgaaatctgccaagtaacccggtaacaaatgccaagtcagggcgtgtgcacaacagcgcgtactgtaggcttcccacagctgacgcatacggctttttttttcatttcgttgagctcatactgatttgtgggactttgccatgccccatacctttcccctttaactatacgagcaggtgaagcactgcatctgtacatgttgaatttcttcaacacattttctatatatgccttttgagaaagtcccaatgcatactttgttctatcttggtgaatctctatgcccaaaacatatgaagcctcaccgaggtctttcatgtcaaagtttgaggacaagaatttctttgtttcctgcagtagactgacattaatactagccagtagaatgtcatccacatacaaaattaggaaaataaatctcccattcttaaactttgaataaatacagttgtcctcaatattctcttaaaacccaaatttctttattgttccatcaaacttcaagtaccactatctcaaagcttgctttaattcataaatggatctctttagacggtatcccatattttcgtttcctttcatgacaaaacctttcagttgcacaatgcatgctttttcctccaaatctccattttgaaatgctgtttttacatccatctgatgtaattccaagtcataatgtgccaccagtgccattattatcctgaaggaaactttacaagagactagagaaaatgtctcattgtaatcaatcccttctcgttgcgtgaagccttttgccacaagtcgcgccttaaacttttctatattccctctggagtcatatttggttttaaagacccatttacagcctactgttttggctccttttgggaatttcttctaaatcccagaaatcgtttagtttcattgatttcatttcatctttcatggtttccaaccattcagatgagcgtgcgcttctcatggcctcttcatatgaggtgggatcatcctccatatgcgactcttctatattataaacttgatagtcatcatggatagccgatcttctgactctttcagacctctaggggcctccacatttggcacgttctgtacctgaggctcttgttgagtctcctgtactggcacattatctgtctaaggctgttgcagctcctcctctggtgtggcaataatttatgttgaatcctgtagaacaggttcctcactttcattcattgttgccacaggaggggtaacaacaggtgctggtaccgcaacgtcatgcattgtaggcacaacatcaacaggtagagagaagaaaggctcctgagtcgacagagcgggtacagacccccgccactcctcaagatcaatttctcgaaataccgagctccccctaatcatttcgtcttccaggaagacggcgtgtctcgtttctacaaactttgtataactgtttggacagtagaaacgataaccatttgatctttcaggatagccaataaaatggcagctgattgtcttggggtctgttatcgaaaggacaacggcataagtcgaaagacgtggtcactcaacagtagttggaaaaaaagtaaagtgtataaaattgagaatttttcttcggatcccccattacatgaccctatgggactatttatagccctcattactggttcttactactagggttgtggttatataggggaatttacatagttgcccttatgaaagggacatttatatgggtacatagtgtaatcgagattcatgggcccctgatgggccgtcgggcgatcatcggcccaatagcccttaggcttgatgggctggaaagcttcttcggtccttgcgggggcgaacttgttacggggaagtcgtctcccttcggcatatactcttcgccctgcatccttcgcccaagagccttctggcttggcaaggtacccgtgtggttcg

SEQ ID NO: 7743 - DNA, 15742 bp, Oryza sativa
ccccccccccccccccccgagggggtcaggccacgtgggtgaccgcggctacccaagcctctagtcacgatacccccggccccatgtcaccgacacaccgcgtatggtttaatgacttacaacatgggatggagggagtcgtggaatctaatatttaaaatttagctctggttctgtaacgtacctgaattctaggattaaggaatttccatcaaaactagttgaaagggaagttcttcaattttataaaccaaaaatttctattttaaacctaggtggagttgatccaactcttgcaagaataaaatttgagaacaaattaaagactttttcacctttaacctaggacttggatgcaacccaagtgaaagcatgcatacttgcataaatcatattttgacttgagtccttcatatgcatttggattttcgatttgcatttcataataggtctcatgaatataattgcaatctagacaaacaactaaaccattagggcctagtgctaactaatggaaaataatacacagaaaccatacaccttaaaaaaaatcaacatggctaatgtcaagcctcacaaaactaatttggacatccatctgaagacatgtcatgaacatgaaagtgaacaaataaattatatcatatagggtatattctatcttaatcatctctataagcattctcttaatttaatactaaagtaaacttatgcataaatagggaaggagcttatgacatgtgtaaggtaaactgtaattctaacatatcaacatcacctcatgttaatgagagtccaaatataacttttataaacattttcatgcatttaggaaagggaaacacatataagacataagtcctgcgaattatctaaaataattcatgcaagataaaatcatgggaaaattcatgtaggctctactcaacacatacaactcactgtaattttggtataatttaataactaaatttggtacctcaaataaattagtcaaactaataaaaactagattaactgtagttcttaatcggctaaaaccatactttgtctaaaagtgcatttcattgcataaaagtgtataagtaaaataatttattcaaatactaggtaatttatcatgaataaaaataatttttccagaatttatcttctctgtttaggtctcctaaaaattcgaactagtttccaaagaacccatattcctctaatttctgtgagtaatctatccataatttttgagtgcaaccaaagaaaatggaatctaggtatcttcatctaccttgagaaaaatccacactaaattattctacccacaaattaaataattgaaatactaaagtgggagagagaaataatccttaaaatcattcaaaccttttgttcacccacgtttctgcccaaccctctcaccctagcttagtttgccacgacctggacccacttggcagccactctggctcgtcctcaccctgtgcaaatcttccagccggaccaaagacagccgagagagagagattggcgccgactgtgtacgacgcgtggcctcgacgtggcagcgccgaaccgaggcttcacctccacccagctgcgtcgccattcttcacccaccatcccagtgccgatccaaccgagggaggaagctccagctctccctctccacctctctttcgtcgccggccgccaagaagagggacatcgccaaccgttgtcgagccctcttcatctctaactcatactcgttccattctcatctcaccatgacgaacaactttggttttgatcccattccatttcatcttctacagcagcgggaacgcggccatgtcatggtcgctctagagcgcgctctgtgcaccgccgcagcgacatcatcgccgttcccgcttatctggaccaagccgggccaagctgtcgcgccagcgtcttcgcctcgacctcctctccatttcccctcaagaatctcgaaggatggtgctacgagtgtggagatcgtccaccatcttctccacctccagtcaccgtcgccgttgccgaatccaccccctccggtgagtaccaacctaattccatgcatcagtagcatctatggggcctctctaacctcatggacacacatgcatgatagttcttggagctgattgagccatcgccgttcacccggaggttcttgccgccgccgagccgttacacgagccaccgtcataaacctagctaccccagccatgtctaccatctcggtgagcacccttcagcctatagaacatacatgcatgcacccaattaaccaatacatgattgtagaagcacatgcatcaccacccgaaaacatcctcctttcggactcgccgccggcgttactccgatgtccactgaccgagaaaagtagaggaatggaatcgcaataacatgatcttcattttgtattttggttgcacccccaaacgagccatcgtttgtcgccggtgagctcgagatcgagctcagccatggctgttctgcctctgtgcgtgagaaaagaagtcagggaccttgtttcgagaatttaaacaactataaggtttaatgtgcaacttttcaactcactgacatatgaggctaggtctgcgtgttgattcttagaaacctcagggatctttttgtatattgatctttcactgacagtggaccccttggaaacaaaaatctgaaattataaaaggaaagtacctaaaacttgtaaaatccatataaaattaaatatagctcattttaagatgatacaaatttctgtcaactcaccaaattgtgaactttagtgttatggaataaaaacttgcactcacagtacaaatttagcctctaaaatttatccaagttaaatcacacataaagcatgcacaaatttataaaatgcatacaaaattcatttcaactcatcttggagcaaactcagtttctacagatccaccaacttatgttctactataaagcaaaatgaaatagtatacatactatacatcgaatgcctctaaaactattacctttaaaatgactagttttacataagctgaactttagaagtttatataaaattcatcttagatcctttttgagtaaacccaaattcagtagaatcatagggttgtgcacttcaatgttataaaataaaaagacatacttacagtataatgaaaacccctaagtatttaagtaaggaataagcaacatggagcataccttaaattgtaacatttgtagaaaattcatctatagtctaaatgaagtgaaccaaattttctatagaaccagcaagtaatatacttcaacctaatagagtgaattatagcaccctcttacagaccatggctctgaaccttaatttggtagaataggtactaaacacatagtaatggttaaacaatacatatgaaaaagtatatatatgcttggtagctccaaataaatccaaataaaacttgttgaaccagtgaaggcatagatccatccccttccaccaaaacttagtatccttaacttatataataatctccagattgatatgttaagtttctaacatagaacatcccctagcttataaaatgtgaagtaaagtaatttgaacactaaaattttataaactaagattagattagttaactaaaatactcattttatacaacactagcaagttagagcaagttctggacctaaatctcgaaagccatgtacacatagggaatatatgcctagaacacgttaaaacttgtaaaatacataaataattcatattaactctaaaaattatgaaaccaaatgtgttagtcttagaaaacaaatatcttcaccccagcaaacataaacttaataagaatcaccttacaacagcatttcacaatagtaactaagtaaatcctacactataccgacgaaacttctaaaattcataactcccaaataaaatgagataaaatagaaattctttcacctaaattaattttagaccagtacctattcactgtgcacaaatcatccattttagagcattttggatttttcgcatatttcggtgtttaattgcataacgtgtactttgtatagatgattgcttaatcggtgaagaagtgatttaggtgctgacattttccagttgcaaggcaagtcccacctccctctctttgatcactttgaacctatcttttggaggttattgaaaatgtttgcaaatcttgcatgtcgattgtacactaataaattaaaattttgttaaacttgttagataaactcctattatttgcattatcaccttaactccacatatatccatattcctcattcctaaccttaggaacaatatggctataccactttatatatgagttttggtgacactaggttactataaagcatagccatgcttagaatggtcttccttgtcattatgggctcatttcaaacatgaaaattgatttttaattaatctggacagaactttaatacttgtgattttgataaataaaatggtggaaagcatagattttaggtttgggcctcaagtggtgtacatatggtgattagttgtgtaccgatagggggagagtgcgcccaaaccgacctaaggacttcactcaatgtcagttcatttcgtatacagtacaaccacatgtgctagtatgggatagtccaagcttagtaaattatttatggtttagccttacattctggtaggccggtgtgtatgagttcggataactcagaggaacttcctatttaccccgacgtggtagtttaggtgactaagtctgtccaatacaacggtattgtgccacgtgggtgggttcccgttgtgtccgccaccacggcgttaagttcaaggcgtgggcccgccacttaacggttctaggtcatatttccagtatgactaggatggaggaacacgtatcgtgctggtgtaaggctaaatcatgaattttggaaaagctttgttgcgggtaataaatcgggtacttatgtatcgcgtgccatgctcttgcatgattattatttcgcatcatgtgggtaaagtgtacaaactctacagagttaaaactaatcgattagccgtgctcgcggtcatgagcggcgtgtggatatgtattgagtatagacttgtgtttattctcctaaatgctgaaatttaccttcaaattctgatgagatttgaaaatgatctccttgctgccatggatggcaatgaggtgaatatttatacatgattaatgcctactttgatgcccatatgctaagtactagcttgctgaaattttatttgaaagcaaatccgttttgaatgtgttttatgcaaataaaacttgctttatgctaaaaagaaccatactatgccttccttgattatataccttgcaagtagggtgttaggcttgtcttggtgcttgccagtacattatttctaataatgtactgactcttgctgttgaattaacttttgcttgcaggatttagacttagtctttgagtgatgcgggttatcgactgcttcttctaggacttgaacataatgggtaaacccctagtcggtgtgcttgtggattgggtagacaagtttccgctgttctattatttatttggccggtcggccaatgtaactaaagtagatgtagtttataatcgctttcatcttatttgtgtttgctatgtataatcatgcttgagatgaaagtgtgaatctagtgcacatcctgggaactagattcacatgagtatgagttaggaatatttgagatgttgtagaactttagccatttttgtcaagtctcctgaatgtgtaacacatctggtcgccgccttcgagtggtttgacgggcacgtctcaggctgaagttgactggcaggctaaaggcctagcaatatctccaatattcctctctcgaggcgtcggatatttcattatgcttgtttgatgacttgaattattcacttcatctctcaattataatggaaggtccggagagcctacgacaggttctttcactgccatcctcccaaaatgacagtgctcaaatgccactcccccaaaatttcattctcaaatgccactcggcccacatgtcagcctcttttctcattcaaacaaaagtgatgtgggcccgggtgatgtgtaaggctgacatgtgggctaatcaggtgacatttggaattaaatttttaaagagtggcattttgagcactactattttaagaggatggcaaaaagtaaattctatgtatagctcctggtcatagcagtgtttacagggtgagacggactgaaattgatggggatcatgaaaaacatatctcaattactggctgaaaatgtccatttggactgatttcttctacatgatcgtggagtggagatgctagtccgcccatctgctgtagtacgtgctatataatatcggttgagctatttcctatattttgttttcataacagagacgagagctagatggattccaaattattgtgaagtgtatttaaggaaggcggcaaaacaaagctggctacaagaaacaacccatcacaaacacaataaaaagggacaaggttcctttttattgttagaaaaatttatttccctagatcaacatgggttagaaaaatttgttctttcccttgaaaatcatcttggtcgatgtgccgctgagcaagaatcacttcagtcggagagtcgataaaggttgttgggctgcttaaattgaagcaaagctggtttgtgcatgctgttgaggctatattcagttgcactaatggagatggggctgtttggttggctcctaaaggttgccatgccaaaccttaggcatgcaacaattttttagtatagtgtttggttggctgttataattgtgtgatgcctcacattactagtcattggacctacacgtcatagactcaaattcttgccaaacttagccacatttatggctaacaaattgctagcctcactttgtgtggcatgacatatttgtggcaaacaaccccttaagtattgacatgcaaaacgagaagtcatttgcccttacgtatataagacagcctagagactaaggataggaccaagcaatagctggcattcaattcttctatacatctgcagctccaagaaaagaattaaaaaaaaaccgcacctttgcactaagagccagcctatagtacaatttgtaagggcgctaagccttttgtctaagatgaaagtagggctctttttctcacacaaccaggaataagaatataatccgaaagtcgctagattaggaaagcttatgatcgaagtctttcacagccagcttaacattctctgaagtgtgatgttgtcttcaatatctctaagactaggattaattgagacttattattttaaacttaaaaaataaatttatctaatatttaaaccgctcctctatctcctctctttcccatctttgagcaggccactaagcggcacctgaagcgacgggtggcgggaataagggaggccaagcaaccaaacccaccccccccccctcaccccaccccgaatcccacaacgtgaaacctccgtgaagccaagaagaatttcagtgccctaatccatggtcgtcgacgtgctcgtcgtggcagcgtaggcgggtgctacaaagccagctgatcgatcgtgaacgtgctgtggaacacatagcctgtgatggcccacgccatgacatgaaagctgtcgaggccaaccaggctgtcgtcggccatcgcggacacgtactgcagcgcctggcccgagcaagagccaaccaggctgtctacgccatcaactacctgcacatcgaccaagagcatccacatcagccatggtgtgattagtccaccgcagatgttgtaagaaaaaaaaattaaatacagtaatatcaacaaaaagggtaaattcgtacaaacatgggaatgaaagacataattaccctaaactcatgaaaccatgtgacaccagatcaagaataaactcaaaggtgaatcaccacaaaaggtcggttaatctcaatgcgaacatatttggatgaatggaatagagatggcagatcagacagacaaggggagaaaaagagatggttcttgctgcttgggaggcagtggcggacgcaggatttcagtgatgggggtacgatgttaaaagaaaatatcgctcaacataaatgatggaggcctatgtaaaaaagaactaacatggacatagttaaaagtaaagtgattttagtgtatagtaaattactaaaattaaacaaaattaagttataattgatcagaatttttttggaaataggatatgatgtctttgtcacgaacatgtagaaaaagttgtttcttaagaatgtaaccaagcaattatttaagtatttttttatgttcccgatatttcttaatttatttgtatagaataatcaattgcaatgtttgtgggaaaaaatttaaatagcccttgggcaagtcgatagagttttgaaggttcaacaaactaatattttcatcgattttgattatttgaacgctccacaaacaaaaatattcataaaatatcctatgaattttttgttggccagtagtcatctcagctagccatcgacaagtatgtatatatagcctacagagtaggaaggattgagattaactgaactggaatgccaatctaagtgcaaatataacccttttaacccaattacacatatgtaatacaccataatatgtagtgttctttttgcaaaaattttgggggtacagctgtacccccatgtccctatactgcgtccctatactgtagtttgagatgagcttgccaactatcagtgaggagcggttgagtggtagaatgagggtagagcggacaaaaggactgcgcgaggctgtgagttggaggcgaggcaagctgatgtcttcgttatgtggccttgggacgcccacctcaactgtgctgctccaaaagcctgtgcgtcgaggccaatggcggcaagaggcccagtggtcgacaaaattagactagctgcgggactagaagggccatcgcccgtgccactcgggagggagcagtcgaggcggctactcgaggtcggtgacgcccctgcccagcttctctcttgttgcccagtgacagatggggaagagaggggagagaagaaggatggcggttcattgacatgtgagcccctataatgccttgggagctcaggtagatcaatattcgatgtcaacatgaaggacctgagtgcttagcatatgagcatggggaagttgaggaacgtgttatgtcttgtgtacggttcaaggacacaattcaaattcgatgtcaacatgaaggacctagtgtgaacttattctctgaaataaaagatctacgtggtatgtgggctgggctaaatgattcaaggttcttgaaaggaatccagccatttgcgttgttatcactactagaaaaaaaagtttttccaggtggtcaaaacacattttcgcaggcggcaaaaccttccgcctgtatccaaatgacggtaaaaatccccagtttttgcaggcagacctcatttttgcaggcagccgttccaatcttcccaggagcctcaagtgctacactaaccctgccttcaaaaataccctcggcgccaaaaaaaaattcccgccagccccacccctccctagggtttcaaatcacaaatcacaaattctcacaaatctcatccaagaaataaaatccaatcacagacattgtatacttgcaacacaaaagcattagattcaaattcacaacaagttaacatcaatgaacttgtaaactaaaaaaaacacgtcgtcgtcgtcagcgaactcctctattgcatggggtggccgccaccacctccctccctccttcggtcagatctgggaggggagggccagtgacgcggctggcactattcgtcatcatcatgcggtagggccgtcgttgtctggtagtcttcgtcgtcgtggccgacgccctctgcccaagccgtcgccgacccatccgccttgcgccgccgccgacacccatcccctccatcggatctgggtggggaagggtcgaggggaggggcagtgacgcggccgactgtagtcgtcgtcgttgctcgtaggtgccatagctggccccttccgcccgggcctccaccggccccctctgcccgcgctaacgccacccgcccgtgcctctgccggccccctctggccagatctgggagggagggagggaggggccgcgccgcctgccgctggtagctgccgctgcctccggccggtggctggggagaagaggggaggggaggtgaggggaggatagggggaaggggagggaccgagggacgtgggagaggagtggtgagggagaagatgatagaaaaaaattgcccctacgtaggtggtatttatattccgagtctattttcacaggcggactagtccgcctgtaaaaataaagggtatttttgcaggcggacctgtaaaaatgaagagtatttttgcaggcggaccgcttaaggcgtccgcttgcgaaaatgaatttttgcaggcggacaacgagctttaccccggtttacatttttgtaggcggctatgtggttccgagggccatgtccgcggtccgcctacgaaaataaatacccaacatcggtgaaaatgctttttctagtgtattaattagaatctgaagcactatgtacagtattaacatgtgaaatcctataaacgtacctcaacatcaggtcctatggacttcgggaacatcgaccatgcctactctacgtaaggctctcagtagtgagtgtaactctcaaaatgagagtcgtattgatgagaatatgagtgtggttgagtgcttcatgaagacgctatgttggtgatattattgtctagtgctaccgacgccgaatggaagattttcacacctaaagcaggtttcacatactcgacatggtgtgtgtgtttacgggattttgcttttcctgtgtgctcaagcagtctctaggacaccatggaagacatcatggaaacagacgccatcaaaaccactctgagaacacaatatacagcactgaggagatcattgatacattgtaggagtgagacatgaatgtgttttcatgaagtacaatgcatggaaaaagagtcacaacattatatcaaaattaatcaatcatattaattgaacaattaccaaacattcacaacaaaatactaatacaaatacacacccaatattacacaaccacatatccgacaataattaatggttatgacttctccttacaatggaaaacaacatacatgtaagtaaaaaacagagagaaacacatatgcatgcttgactctgttgtacaattaattagtcgagctagcaagaaaacgccatgcattaagcgagctggtgttttattctagctgaatttgccatgcatgcagaatcgtacatctgcttgcaaaaaaaaaaagaaaagaaagaaagtaaaaaaagaaagaaattaatagctccatgcagacccttgtttgcatggtcaattaattagttgccaagtgaccacatgagataatgatggacaaccttagcatggcttgatgcagatacagtttcgcacgaaggtgctgcacctgccgtcgacgaacccctccgtccgacacacgtttgcgcaattatcttccaccatgcaaaacccctcgaatcggaggctcttcgtctcgcacggcctgactgatgattgcgctggcgccaacgcctctgccaacaactcacacataatattagtccttacggtcgcaaaaataatcggtttagacttttcggatcgaagtataaaacataaatgtaagaagatggttttttttttgcataaacctaaaaaatatagtagttacacgtgtaataatataatgaatgttcatgttccctttgctaccaactcaagcatagtattactcgttatagttggtttagacttttcggatcaaataataagacagaaatgtaaaaactggtttttttttcataaacttaaaaaagatagcagtttaacaagtgtaatataatgaaagtgcatgttataacaaacttagctaagtcattttaatatataaaaaaaacctatcgtcaaacaataaataatatatgatgatcaaggagaacacacataccagtggcaacaacaagaagtaggaggacggcgattgctgggaagaatttacgcattgtctccattacaattattatgttagtactaaccacacacttctcagaaaattaatatatattttcaaattattcagtcttttgtttgggagggaagggatggcaccctgcttatatatgcaaggggcagcggcatgcacgggattaactagaaccacatatgccctcgttggctaggagtacaaacaggaaaatgtccctgccatatatagccactggctaatattgcaggcactctactggccacaaaatgcttgcgcgcgtccttccagtcgcaccaactggttccaatttgattcatcccacgtttcccacctactcaatgcctcatctatctattacgagttcattctcaatcctgcaatccttcagatccactatcacgtgggacccacctgtgatcgcccaaagaaacctcatcgtgggcagaccacttcgcgcacgaaaaaacaacgaaaaaaaagaacgccaaaaaaaaggcgcatctaacctccgcccctcagccatccccacgccgctacttccgcccgcccgcgcgcccttccctccccacgccgcaccggcgaccctgaccttgacgcggccaaggtctccctcggcgccatctcccaggtcactctcgcgttgcagccgctatttaagctgtcggttgcgtttgtgaaccgcaacgactcggacatcgccgagatggtcgccatgtggggcggcctccacgagttcggcgacgtggcgtcgctgccgcggcggcgcatggtcgtgtaccgcgagcacggccgcgccgccgaccacgcgggcttcctcgacgccgtcgaccctttcctgaatctcttttttttttactgaatcacccacatacgaatcaatttagagatttacctccattgttgcatccattaactgatgagttaggagatttactaaatctgatttctgcctgttcagtagataaggctccaagagagacatatgctggctattactcggtgcggtgaattatacaatgttagtatcaagtattagtttaattagcgagattaacaaaccacgctaccagctcaacattgttcctcaatcattgtctgttgtcactgccttatcgacttggcaatgggaaacaatatatcaaaagtattttgagttgtacatattttcttaatcgttatagattatgaattaccaggacttacatatatattctagacctaggtcatatttacacaatacacgtaaataaacagattcttgtacttataatatgctcaatttaatttatattgatcataacgtgtactacacgtgcacgattgctagtttactatcaatagaagcagctattctagaaattaaccgttcactctcagcattttttggatcttaccaaaccgagcggcgccaggatgggctcctcgacgtcgacggcaaccgccggccagccggccaccgcgacctcctcagcgtcaacaccgtacaccagcaacgggaggactgctgcgagcctgcagatcagcaggcgtcaggcggcgtcgcgacaagcatcagccaccagcagataagctagcagagcaggctaccgagatactgtctggtgagtcactgagtatctgaaattgaatgttagtcttgctgcctatattggctatctctcttcattgactgcaaattattaatctgtaacctattgaatgagtaattgagaatatccaagactttagcctcatgttttatagttctgaattattcgtagatttgcaatggataagaaaacaaaatttttaaattatttaccttccatttgtcaccgattttgatatatttatttattgtatgaccaaaataaaagttttagatcttgatgagttattcaactttgttgttgataatttttcagttgaaatcatttagtatttgaaaatattgtttgaagttgtcatattttcaaattcaaattcaaactgttcaaaaaatgttatatagaaaaatgaccaaaataaaagttatagatgttgatgagttatacaactttgttgttgatgacttttccatttgatatcatttactacgcgtaaaattgatttgactcataaattgaattactatactgcaagttaattattttgctatagttcaacatacaaatataaacatttcatatgtaaaatggaaaaatgctcatcggtgacgggctttagttaatgcccaatagagattaagtcatgtcaaccggggattaatatatagtccgtcattgatgagtcatctatgacgggcctcaagttggtgtacgtcacggatgatggtcatctgtgacgggccccaacttaaggcccgtttgagatatggaatgttatctcaattgggtctaaagttggtgcccgtcacggatgatggtcatctgtgacgggccctaacttcaggcccgtttgagatatggaatattatctcaatcggacctaaactacggcccgtcactgataggtgtcatctgtgacgggcttaagttttactgtaacgaaatctatctactaatagaaggtgtaatttgtttactgtaacgaaatctatctactaatagaaggtgtaatttgtttactgtaacgaaatctatctactaataaaaggggagggagagttatgcaagtaattttgttactacaaacgtaatccatcgaataatatgagtgaatgggagtagttataatttatttacaacagcttatctagacaagtgaagcgcagtaaatgtaatattttactacatcttaatctgtctatctagagaacgggggatgagcctgggaccgtggggaaaaaggggtaataattttactgtgtccacgggagcggggacaacgggaaaaaaaaacattgagtaattcttttaaggattaatttgtgcagggagccagaaaaacagggaaataagtggaacagatagcaaaggggaacggaaaaaaggagcgtgggagccaaacagaaaactaaattcaggggtaacggaaaaacggaaaattcggggggagggggtggcgcagtaggggctaactgcggcgtgcggattacaattccgagcgcagggagtggattagcgctaccataattttatggtatttttctagaatttaattcactaatagtagtctaacttgtaaagttatatatgatttacttaattatggatcacactcttgtttaattccacgggtacaagtcttaagtagaccggtcgctatcatgttggacgctatactagcctaatatttgaaatttcgtgaattctaaagaaaacttatattggtttctatcacattctcccacattacatactacctccgttttttaatagatgacgccgttgactttttctcatatgtttgaccattcgtcttattcaaaaaatttacgtaattataatttattttgttatgagttgttttatcactcatagtactttaagtgtgatttatatcttatacatttgcataaaatttttgaataagacgaatggtcacacatgtg

SEQ ID NO: 7744 - DNA, 22828 bp, Oryza sativa
  unsure (1)..(22828): unsure at all n locations
ccggaaaccacgcgggcgcgcgcgcgagcaacggcgcgcggggccggcttttcgagcggggagctcgctcgagaggagggggcgctcggtgcggctctcgcacgcgcgagcagcgagcgggggggggggaaacgcgccggggtggggagggagcgagagagagagagagagagagggagacgcccgggagagagagggccggggaagagatgggccgagcggaattcggcccatcgaacccggggaggcaaactagacttttgcagagggattcgatttggaaggaattggattcggaaaagaactcgatgatagatcggggattgagatcttgagatggcacggacactagacaacaatcaaagaaacaaatttcgcaattagggtttttcggagataattttcccgctaggcgccacgacggaacgggcgctacataccaacccccctaacaagaatctcgaccccgagattcagcacctaagggaacagctccggaaactcggcgcggagaagatcttctcgttcccaggttgcctcatcttcagaatgattgctccattggactttgtagaacttgatggtcttccttcgagtctgatgttctgcctcttcaagaaccttgatcggtctttccttgtaggtcagattcttttccagctcgatattacccaggggaacttgctcttctggaactcgaagacatttctttaactgggatacgtggaacacgttgtgcacatctgcgagaccttcaggtagctcaagctgataagccacttcgccacgtctggccgttatgaggtaggggccgatgtagcggggtgctaacttgccggacatcccaaaccttctcataccacggaggggtgatacccgcaggtacacatgatctcctttttcgaactcaaggtcacgcctccgattgtcagcgtaattcttctaacggttctgtgctgtcttcaaacgttctcgtatcagcttaacttgttcttctgctgacttgagtatgtcaggaccgaataccagtgcttcgcccacctcattccagcacaagggggtgcggcactttcttccgaacattgcctcattcggcgacatctgaatgctggcctgataactgttgttgtatgagaactcggcatacggcaaacaacgatcccaagtgccttcgaaatccaaggcacacgcacgtagcatgtcttctaggatttggtttaccctttcggtctgaccatcggtctacggatggtaggctgtactaaaattcagatcagttccgagggcttcatgcaactgcttccagaaccttgaggtgaactgagtgcctcggtctgacacaattttcttgggacagccaaatctacatgacatgggtcatgtagagttctgctagtttctttccatcataggtggttttcactggcacgaaatgagctgatttcgtgagtcggtccacgattacccaaatggagtcgtacccgttgggggttcttggcaaaccggtgatgaaatccattccgatctcttcccatttccactcgggaatcggtaggggttgcagcataccagctggcctctgatgctctgccttgactctttggcaaatgtcacacaaggctacatattctgcgacatctcgcttcattccagcccaccaaaagtatgccttgatatcttggtacatcttcgtacttcctggatgaatggagtaagcggactcatgagcttcctttaggatgagatctcttaactccttcttggccggtacacagatgcgtggaccgcaccaaactgtgccttgatcgtctatggagaaattggtgtctttcttctcctgtattctttttattaactcttttatcccttcgtcatctttctgagcctcccggatttgcgattctagggtaggctgtactgtcaagctggcagggactcctgactgtaccacggtcagccttaacttctccaattctctgcacaaatgctcttggtcaggccgtatttgagctacattgcaataggccttgcgacttagcgcatcagcgaccacgttggctttaccaggatgatagtggattccaagatcgtaatccttgattagttccaaccatcttctctgcctcatatttaactcggtctgtgtgaagatatatttaagacttttgtgatcggtgtatacttcacatctgttcccgattaaataatgcctccagatcttaagagcatgaaccacggctgccaattcgagatcatgggtgggataattgacttcatgaggcctgagctgcctggatgcataggccacaacctttcgttcttgcattaggacacatcctaagccttgtcttgatgcgtcacagaagatctcgaaatcttttcggatatctggcaaggtgagaactggtgcagtggtcaaccttttcttcatttcttgaaagctgtcttcacaggctgcagaccattgaaatttcttttccttctttaacagttcggtcataggtctggctagcttagagaatccttcaatgaatcttcgataatatcccgctaagccaaggaagctgcggatttctgacacgttcttgggcgggttccaagcaagtacagcttcaaccttgctgggatctacttcgacaccgttggaggaaatcacgtgtccaagaaatgctactcggtccaaccagaattcgcatttcgagaatttagcgaatagttgatgatctctgagcttttccattatcagcctcaggtgttcagtatgttcttcctcgttcttggagtatatcaggatgtcatcgatgaacaccacgacaaactggtccaggtattccaagaagatttggttcattaagttcatgaagaatgctggagcattggtgagtccgaaggacataactgtgaactcatatagaccataacgcgttgagaaagcggtcttcgggatatcttcagatctgattttcagttggtggtaacctgacctcaagtcaatttttgagaaaactcttgctcctttaagttgatcgaataaatcgtcaatccgtggcaacgggtacttgttctttatagttacttcattcagggctctatagtcgattaccattctctcagagccatcctttttcttaaccagaagcactagggctccccaaggagatgagctaggtcgcacataacctttactctccaactcttcgatttgtcttttgacttctgctaactcattagctgccattcggtagggtctttttgcaattggagctgtgcctggtgccagttctatggcgaactcaatctctcggtctggtggcatactcgttaattcttctggaaatacgtcgggatattcacagactatgggcaccgactccaaggaggtgacttgtaaacaggttaggatagaccgacttgcggtaggggtgttaggggtaaagcggacttgctttcctccaggtccttgcaaagtgatggacttttcggcacaatctatctgtcctttgtgcttagccaaccaatccatccctaggatgatgtccaagctttgcgagtctaggattatcggtttggctagaaagtcaacttcctcaattctaaggttaacttccgggcatatttgagttgcccttatattcctcccaggggaatgtactatcattggtacacgcaaattttgggttttccaaccatttcttttcacaaaagcttgtgatatgaaagaatgggaagctcctgaatcaaatagaactattgcgggtacggagttgacagagaacatacccatcacaacgtctggagcatcctgagcggtttcagcttgaatgtgattcacacgtcctcgaccaaagtggttggaagcacgagaaccttatccacttgcctgagagctaggacgagactgagctgccgctggagtaggagttctggcggtgctgccattagcatgccctgagttggtgttggtaggattctgagggcactgtctagcatagtgacccatctggttgcaccggaaacactgaactgctgacggtccctgtggtgacttgaaggaggtaacactgtttggcgcagtgttgccactaggggcacgctgctgtggcggaggtgccggacggttcatctgagggcgaggtgtcacatcctgatttttgtttcaggattcataaattatttaataaattattattagaatttatattaaatgttcattaatttacaagtgaagttaaatgtgggaaataaaatttcctaaatataaagcatggatggatttaatttttattaaattctccatggttaattatactctctggaattttctcggatttttcggagctcaattcctaattttaatcatacaaagagcatttcagtaattacccacatattaaattaatcattaaatggtctaattataattttgttaagtactttgagtgtccaagtattttcaagatttttcttggaattatttgagcattggaagtatttttaacaattcaaagatcatttccgtgattaatttagttggaaaagtatttaaaatccccttctccttttcgggccgaaataggaaaagttcagcttcactcctccgcccattctcccttcctttcggctggccttatccctcctccaaagtccatttgtggtccctccttcaatcgggcctagcataggaaaccacacagaaaagtctaattcgcgtccccgcgttactgttcttcttcaagctccagccgcccgtgctgagctctgtgctgccgcttcctccgttgaatccgccgcatcccgtgcttcgtttgcaaaattagttgaggggaaatattcctcttatcctcctctatcctttcccccaagaatcggagcaaatggttgagtatcttatccgaatcgaactcgtttttgagtttatctccaaaaccgagtttttgatttcccggatcgatttctagcgggaggagtccgatctcttcaatccaaggctataaataggaccccctagtcctcctctttcgtttgccccctttcccgtcctctcccgtgcaccgtagctcgccgtcgacgccgcatagtccgccgccgccgccggccgggttgcagccgcgccgagccgccgcctccgccgtcgctgccgcttgccgccatcgcctttagatgcgccaagccgtggggaagctcggccacccgtcccctttcgtcgccggccaccggagctccatctccggcgaggtccgagccgccgccgccgttcatctcgtcgccggccgtcgtcgttcgtcgtttggttcgagggtgagtaccgttgggttcgtctcgtcgtcctctacgtgtacatgtcctccaaagtcgcagccgaccatccaatctccggcgaggtcgtcatgttggttcggccgccattgatgacgtcatcatgacatcatcggtttttctttttcccgtttttctaatagattaaatcttcggaaaatcataactaaataaccgtagatccgtttcaggtggttcaagttgctaaatttttctaaaatcaagatctacatgttaaaaatattcacatgtactgtttatgcttgtttttgtactgttttgttgatttttgttctttcgctttagtttccgacgttccggaggagagcgttctcgttgagcaaggttcggaagtgtttgcggaagctcaaggcaagtcacacagatcccaaataaccctttgagcatgttgaacccgtttaaagctattattttatttcaactatgcattattttcgaatgtcatcgggtggtgaacctttcccaattaattaatggccgaagatgatcttattttcctatgggttataatttgattagcgtgaaccttatatattggattggttcagctaaatgctatatgtaagtttgcttagccatgcttagaaacattagctaactaaagggattaattataaactatgttacattattatttttatggttacattaaatggtagctcacgatggttaatcgtgtggtgttaattaattgataattaaaacctggttaaggtgggttgtgagcatatggttttgatggttgtgctcatgacaattaaggaccggttcgcgagctactgttgtgaaacatttatcatgccaaccacaagccagcgtgggcaacggctttatcttttgtatagcgtgattcattatagtgcgccagactgagaagtggcgagaagttcacgggggtcgctggggagtccatgccttatttataagggggtgattatgatccaggaaaggtgcgctgtaatgggttatgttgtgcaaggggtattgtcacaactcctttccgaggtaccgtggtggtattgaggcacatcgtgacatgatgtggggttgtgtcttgtgggtacagtggtacacctctgatcagagtttaatctattcgaatagccgtgcccgcggttatgggcgagttgagcaatgtttttcgtgattagtctcacacctctcacaataattatggatgttaatatctggtaataatttgcttagctcctggtttggagttagatctgtacagccgggtatggttgttcaggatggttgggcctgtacagcatgggtgtgctgttcagtgttgattaaaatttctgattaattactctactgttttactactcttaactctttgctaaatgctgctttcgcaaatgagcctatattatgccatcctttggtatccttgtgtacttgcatatttgctgtgtggcttgttgagtatgtcatatgctcattcttgcaataatcatcaaacctcagttgaagataaaggatccagaaggagaagacgtttggcttataccccagttgagctgcctgtgggagtggagctgaagccatcgttagaccgttaattccgctgctgtttttcttttcttttgtaagtatgtaacgttattattatgatgggtttgtatattaaaattgtcagtttgtgtacctcggctgattcctggacgaggattttatgcacaaataagttcggaaattactagtgaatttccgggcgtgacacgaggggcgtagcctggctgtcggttagcctgagtgaccgactggtggtattgcatgggttgaccgtagcgagggcgaggtgcgcctcgggaagaatttccctgatggttagacttgcgacttgcgtttcttgtattcttcggtagcctcttttctggcatcctcaagcagaagtgccttgttgatcatatgttgaaaagtggggaagtcatgagcaagcaactggagtctcattccaactgcgattcccttcaagaatttcctgatcttcttcttatctgtgtctacttcctcaggggcgtaccgagccaacttgttgaactgacttaggtactcattgacactgctgttgccttgcttaagtctgttgaattcttctttcttcatgtcaatagtgctttcaggcacatgagctgcatggaaagccatagcaaactcatcccaagcaatgttagtgggttcaggatgtgcattgcagtaattctcccaccaatctgcagcaggtcctcttagctggtgagaggcgtagagcgtcttctcaacaggagtacactggagtctcattccaactggagtctcattccaactggattgaactgacttggagtctcattccaagtggggaagtcatgagcaagcaactggagtctcattccaactgcgattcccttcaagaatttcctgatcttcttcttatctgtgtctacttcctcaggggcgtaccgagccaacttgttgaactgacttaggtactcattgacactgctgttgccttgcttaagtctgttgaattcttctttcttcatgtcaatagtgctttcaggcacatgagctgcatggaaagccatagcaaactcatcccaagcaatgttagtgggttcaggatgtgcattgcagtaattctcccaccaatctgcagcaggtcctcttagctggtgagaggcgtagagcgtcttctcaacaggagtacactgcactaagttgagttttctatcaacatctttcaaccaatcgtcagcctcgacgggctcgacggtctgagagaactctggcggacgtgacctcagaaagtctgtgagcttggatctattgttgcccacgtgagggtggccatttccatgcgcattatgctgaaaaccggctatggctgtggttattccttgcaagatttgtgtctgaactgccattatgtgttgcatgttgttttccacatgaggtggggaagggaggcgttcttctccagaattgtgactggcagtgtggtgagagcggtgagactgttccatctctgcattacggaaaactatgcgatgcgagcggttgctgcggcggggttgctcaacctctgcgttgcgggaaacagtacggtgcgaacggttgctgtggtgagactgctcattagctgattcatgatttgcttctgcttcaactctaccatcttcaaaaccaaagcgggctggtgcacgagctgcacggcgggggcggctagccatctaaactcccagaaaagggcggggtaagagtcagataagcacttaggagggcaaggagcaaagcaaatagcaacacagatagcacacactaggcataaactggatttttcaaatcataaaaacacctgatacaacgggtgtggacaagtcacagagctacgccgagcttgactgtgcgcacaccacctaggagaaccagactaccaaacaacacccacaacaaacccacgcacgcactacctcgccacgactccaaaagagttggcggcggaacaaaagagcctatcacacggacggctgctgaagactgcctcctctactcctcgtcggcctggctgcctcctgtagtcggctcctcagtcgaagaaacgtcgatcggctgacgcgaagggaccggcggaacctgtcgagggccggcagcagcacgggccgctggcggtgggggagctgggtagtggaaacggaacacggtggaagaaccaacaacacgcttccgcgcggtgcggataaagcgtgggccacggcgggaggaagcaactggggtgtgtccaggggtgtaggaagggctaactgggtgtgggtagggggagtacactggtgagtacggcgcacgcgagctgggggagcgcgggccactgggagtgcgagcagagccgcgggagctgtgggaggacaggtggctggcgtggcagaggcggcctgagtcccaagagatagtgtcaactaaggtgacaccctcctcggccagacgggcctccaaagcggcgtagcggcgggcaagggagcggtaagcctcaaggagtatgtcgtgctgagtggcctgagcctccgaaagctcaaccatgcgagtcagcactggctgagactcgctgtacggacaagggtacctggcgtctgagtggccagaaggaaggcgtggaagctgccggaaggcggaacctccgagacggtggttgtagtcgtgggccaggcgacgaagtgcagtccaggagaggtcctggtacgcgatctggagagtgggcctggccacagtgaagtggtgggggcgaaggccagctccgtgtatacctccacgggggtaaaggtacacagagagctcacagtgagggggaacacggtccacggagtaccccgtgtactcaggacacgagaagccaaggaaacgggcgaggtcacgaagctgagcgacgtggtgaccctcactaaaaccgtgggaactgaagctggcgttcactgccatctacaattttgaaagagggagaaagatcagtaaccattttagaaacaaactattgaaaataaagaaaacaaaagagaccttagcttttcgcaagtagttttgaacttagtatccttagggtcgtcctaagcgtcgggtttcgccctagggccaagcctgtgctatgataccatctcttgtcacgccccgagctagccccgactggaactagcccgtgacactccaaattaacctgttaatcgataccagtcccaggaaacagtgctggtatcacaggaagacagaatatcacagcaacagaagtctctttattatagagtaggagtacagtcatgttgggctgcggacagatcccgagctcacaactgcattacaaaaggaaaacggaagccaggacttggaccaatcaacacaggcgcgacttgggaactaggccgaaaccctaaaactcatcgtagccggcttgctcctggaagaactcctcatcagcaggatccgcttcatcttcttcagcaactggggaggagttatttatatagagcaagggtgagtatgggagtactcagcaagccaggggaaataagtgtttaatgcaggcttcaaggaaaggctgttgttttagcaattgattttatttgaactcttttctaaaagcaactaagtgagtgcttctcaaacgacacggatgagacagtgcgtctcgtccggtcggagtatgtgcaatgtgtcagtctttagatcttgaaacaaggttggcacccgaccaacagctttttaaacggccacccgagccaacaacttttcaaacggccacccgggccaacaactttccaaacggccacccgggcctagctgatcccgtcagctgctgatttttcaaacatcgaacccattttcacaacagcaatttcacgagcagtagtcaaacaaaactacgctaggaatcacctcacatccgcccatgaccgtgggcacggctgttcgaacagtttgttaacctctgcagagggggtacactttacccacatgacattactaacccggatcatccagcccgtggggatcagccacgtcgggagacctccaagctttcatgacaaggcatttcgaaagccgacacaggtttaccatatgccgacgagaggggtcccagaccaacaacaggttaggtcccagaccatactgtgccaggaagcccaggggtcctccccgacaccaccccggcgaatccacatgtctctcggcatcaaggctcccctgataagctagttactcagccaagggtgtcccattccacccatgtggtcatacttgtcttatgttcggatgaaattccaaggaaacggtccttaggtgcaagagcgggtaatcgtacacccggtacgttccccggtccgcggttttgggaattcatttagttcacaagcaccgacccaggtgtcgggttttttccaagtcttttgtaaaactccagttttacccaagttgttactcagattttaagtttgaaggcgaccgtcgattctcgcacagagtgcacgattatcgaggcgcaactgggtggttacaaagggacatagtatagcaattaacaatggaaggatcaaatgcaacaagtctggtaggtccgccaatctgccttgcagatgggacaaaagattaagtgcgatcctatcaatgcataatattttgcaagcaatataattaaatttcaaatataggctcaagatgttcaaaggtggcttgccttgctcgagatctggagcttgatcctcgaaatcctcgcactgcgggtcttcgggcttcgaaactacacgcgaaacgggacaactcaacaaacggcgaaaataaagccctattaatgacctctaagcgtgccattagatagatctcgagatttggggaattttggaagttgaacggagtcaaacggatttacggttgggaagatattgaatttctaagattattggatttttggtctaaagttaaaaggattaaattaaatcctttttgagaaagaaaaggaagagggaggagaagtagacttctctcaggcggctagggcgcggcccaagggaaatggagcggaccggccgatcttaacgggccggccggcccaagacggcccaagcgcgcgcgcgcgcgggagggaggacagagagtccggtggaccgggctcaccacacgcggtcccgggtgggacctgcttgtcagcggctcggctcaccgtgcggaaggagcacgcgacgcacgcgcgcgggcggagaagggacgcggtgcatgcgcgcggtccgcggtggacgcaggtgcggcgggcccacgcgcagcctcacggctcgcggtggatcgcgcgcacgcggagggaccgaccggggtcggcccgacccggtctggctgagctggcgccgacgtggcgcctacgtggctgccacgcgggccggcgggaggtagacgacgacccggccgcgaatggacggcgggcggcggcggcgagcggcggagcgaaccacggcgatacgggcaacagcgagcacaccgggcggttgcacgtgacaaggggaggcgagccaacggctcggattcgccggaggttgctcgacggcggaggattgcggcggtggcaaccggtggcgggagaagagggaaacggcgacgaggtcacgagaggtcgattcccggcggtgagagcatctacgcggcttcgggaactcgacgctagcgtcggattgggcggaactacgccgagcgaggccggcgacgagcgggtgctacggagctcgggcggcgacggcggcgagcacacggcgagcgacggcaacggtcggggcggcgccggctaactatggggaggctactcaagctactaccgaaagctagggggaggagatggagcgaggaggaggaacggagagaggcactaccgtggtgaggaggggcgctgtgacgagaggccgacggcgcgggagtgatctctccggcctcgggcagaggaagaggaagaagagggcgcgcccggagcccccttccgcgtccacgaacgcaccggctctcccggcgcttggcgatggacggcggaggcgaggcagagcacgggagtggcggcaacggtgaggaggcgaatgggagaggaaaggaagggagggggaagacgggtttaaatgggcggcaatgtcggtttgagagaggggaaccgacatgggcggtcaagccggcgagctggcgctccggctagcgtccaaagcggcgacaggaggtgacgccggcgagaggggaaaaaggggagaaaaagaggaaaaggagggagagaaagggggctcgcccctttgccgattcgggaaaaggaggagggagcggggcgactcggcagagggagaggggctctctgcctccgccccttggacgctagcgcgcggagtggcgggggccgagcgatgacgacggcgatgacggtgggatggtttggagcggctcgacgacacgggcgacaggcgcgggctggcgcggcagagggtgagggcggcggcgaccaggcggtcggccactcggcacgcgcgcgcgggaagcaacgggcggcgcggctgggcagcggggccgggcgacgcggatggcgcagacgacgcggctcgggcgggaaaccacgcgggcgcgcgcgcgagcaacggcgcgcggggccggctttgcgagcggggagctcgcgcgagaggagggggcgctcggtgcggctctcgcacgcgcgagcagcgagcgtgggggggggaaacgccccggggtggggagggagcgagagagagagagagagagagagagacagagagggagacgcccgggagagagagggccggggaagagatgggccgagcggaattcggcccatcgaacccgggggaggcaaactagacttttgcggagggattcgatttggaaggaattggattcggaaaagaactcgatgatagatcggggattgagatcttgagatggcacggacactagacaacaatcaaagaaacaaatttcgcaattagggtttttcggagataattttcccgctaggtgccacgacggaacgggcgctacagtaggctgcggcgccctccggtgaaggcggcagcagcgaccgcacgctcccctccaccagatcccggggggaggggaggcggtgacccggcggcggcggccgtgggtagccgtgtcggcagtggtggtggagactggcgcaggcgaggtggcggccaatggcagccgccggatccggcgacaacggtggcgctacttgtggaggaggctggcccgggcgaggcggcgaccggtcgacaagagacttgttgagttatttctttcttttctcctcctccatttccaacctgttgagttcttgagttgtttgatacttagttttggatggggatgatgtgatctgggatggtggtggtggagaagacggaaaaaatttggggtggtgatctaggatggggatgatgtgatagatgtgttcttggatttggggtgttgatggatgtgttcttaggtgattgggagctcctcggtgcatcggctcgaatcgagccgatgcgtctagctgtttctatttggctcgtggaaacatcttaggtaccggttgggaacccctcaacctgcacctatatttgttataggtgtccgtttacaaccggcactgatgagttccctgatctgtgccgccttcatggtgccggttgggaaaaccggcaccgaaggaggtttcccaaccgacgctatttaggtattctgtagtagtgttttctccttccctaattctgttttcctggtagataagtgcttgtcttgccaaatgtaaaattatatattgcatataggaactatataatgcccgctatgactgctaagtacaattggaagatgtttttttggccatgataattgtgaagacatatttacacaattgcactggtgatacacttgagggattgtgttatttgctatatttgagaaaaaataattgatgaaaattaccaacaatgcagtattttgtcagttagagaccttaaagaccatcttgaaatgtaaattttcaaaatcttattgtagatacatatttacgtgacctttttactaagtgatttgcaatcttttctaagaaaatcaatttaggcaagatgtggttttggaggttaattttggcctttctagtttatattttgataaacatttcattggcacatctttataactaggcaaaatttgctaatggacatttaaaaaagtgtaattggctgggaaatatcgtaaaaacatgacacggctgatggtcattacaaaaattatataattggctatagggcaccagtcacattattttagatgtgagaatttttcaaaataacgagattgtccctggcgccatcttccctcacccgaaatcacagaagttttgtagctattggcaaggtagctggcgcagaagcggacctggttggggagggacaggaggtggaggagcacgagctagcgactgctcgaagctccaccgtaggcggctccttgtcacaagctcccgtcgtggccgttgcctgcttgcctccacgtccggtccctgctcgcgcgctgccgtgtggagcagccgcctgcacgtgcgctgcactgcgacaccgcctccttctcccaatctcgcatgctgccgcccgagtcgctacatactccgctccgccgtacaccacctccgcctgctgctgctcgatgggcgctcctctctgcctcgcgcagcgcaggcgtcggttgcttgctgctcgccatgctggcctgcctcgccccaccgcgcctccgaggtcgccgtgccattcccggcgaagtcaatgggaaggggaaaagaaataaagagaaggagaaaaagaagcaaagagaagggacaatccggacatttagaaaaatatctcaccttttttatccggaaataataaaataatacaattggtgtcctatggccaattatacgttttttagagtccatcagtcgtgttacgtttttgcggtgtctcccagccaattacatattttttgcgtgtcctgtggcaaagtttgcattataactatttttattatgtggcatattagatactcactccgtctcataatataatcatttttttatttcaacacaatttttgatatgatactttacctaacaatatctataaacttaatatgctttaaataaaaatatatgcatatcatgatagtttgtttcatgataaatatagtaacataattgatcttttctattttttttgttatcagtagtaacattaataaaaagatatgcgctattttataaatgcttatattttgatacagagtgagtattaatgttgcttggtttctagaactatgatacccataggaccccgggtcattgacgtgtataggcctcatcacagcccataggacccagggtcattgacgtgtataggcctcatcacagatgagtggtcagtgataataaaatcttatctctgatggtgaacacctatcacaaatgagtcgtcttataatgaatattcggacatgtaagctatctcaaatgaaaatagtgtatttcggaaaatattagaacaaacgtgtaaaagttcaactttttaaccgttgttcaaataggcgatcaggaaccgtggatgcatagagctcgctgagtattgcaaaatagactataagtttgtggtataatcagagtcccgaggtatttccggtgatcgaattaatgtgggccgttcgattttctttaacctctctctatataaacaacagaaaaaaaagaaaaaaaggaacaggagagatcgataccttgaagccctagccactgctactcttgcgcccctgccgccgctgctgccgttactatcactgtcgccgccgcttctgcgtcaccaccaccgccccgactgttgccggttgctgcagccatcatcctccttcgttatcggtggtttcttactattctgctcctttccggtgagttcttgctgctgtcaatctgatctgttgccgctgtgtgatttgctcgctactgctgctatcaacgttcctagctgctgctgctgctactgggtggtctgttgctgctgctgctacaacgatcagcgaggaaatggttcagagggcagagaaagcaggaggggaaaagaaggaaaaagggaagagaggcaaagttggggatttttctgggattccataaattcacctcaaatatgatttttatcctctgcaagggtaacttctcttagtccatggaagttcaatttttatcctctgcaagggtaacttctcttagcctgttgtgtgtttttttagttgttgtttatgggtcgaaagtaatattttccaatctggtattaaacaatcgggattcaagttagttgtcctaaataaagtttgtagtcatcgtcaagatctttttaacgccactggtttctctcgattccgataaacggtttaggagaaacaacagaaacagaggcttaattagttttttatggaggcttaatctgggacaacaatttgttttccttaatctgggattcacagaggcttaatctgattttgctcccaacatgaaaattgtagaaaattttgtttggatgtcctgagttctattacttgcaaaattttgttatgcggttggtgagttacgcataaaacaataatgaaactgctatagattgtttaatattaatcgataaaatatatattttaggtgtttattttagtaaatgtcctttgtaactatagttagtcaaatatagatgtttagttgtagctttactccacatgtgtgtagagatctggtgtggagagtgttgcctcgagttaccgtcaaggttaaaggcaagtgcacgacaaactaattatgtgattcatggattgtttgctctatctatttattttcattattttctatgtgatatgtgactcttatgttcatgcgattgttcatgccatttagatttcaagtttatctaatgtttacaacgttattcttgttttcaatatttcagattctgattctggttaaataatttaagttccatgcttgctgttggcggctgttaaatgtcgattctataccgccaacatatgcataaagttcagataataaaacaaccaacatagtgataggtgcttaatctcacatatttcacaagtgttggtgtatatttgtatgcagatgataaaccctgacgttgggaggaaatctagactaaagtgaggagaattatgtatccatacaaggaggggttgtgaacttcataaaaacatcagcgaatcaatccaaaactccgagaaatggatagaggagagcctagggagtccgcagtccgaaggccaggccaggagagcccatcataggttcgcccgaaccccctggatcggccgaacccccctggtcgctgttgatcctggggtttggcgtggacgctccagatgctctcccaatgatggttgcggggcagttcggacatttccccttctcacaaccgtcataactgccctataaaaggacatcactccctcacttcacacacacagttccaagcttgagctgaattataagagactctattgtactatattgtatactagaataggaagagagtagagtagaaggagttggaagaattctggagttgttggtaatcttctcctatttcttttattctgtttattactctgaattcaatataatattcttcttgagtaatttagatttatcttgtgagaattaactcttggttagttcctaagtagcatacaggattattgttcactataatcaactaaaatatagtggttgctttgttgagttataaacactaaagtagatagtaattgcttagacgtggtgttttggtgattattatccagtaattgctgtgtagcccacagtacgtttgaggtgggtgtagaggtggtgacagccctcgagatcactgaagtcctccctgtccgggtacgtagtagggagacactgtttctcactagtaaatcctctctatcctggcctatcatttgcttggtgtccttggataaactggaggaagatctgatcacacacgttcccttggattcgatacccttggaatactccgtattggaagtgctacctcggtatatccgtgcgcttgcagattttatctgtgaccgtaagaaataccaacacttgccatggatgtgcaatatgatttcaatttggttctttgtttcctaattattcatgttccatgcgagtcatggatatgctgtctgttttttcattcatgttcctgtatgtaagcgctgatcacgcttactctgctttgccgggaaatgctaggatgtatttacaattgtctgggacggaaaactactatgtcaattcatgtttgcccaggatgggaactactattttctttaacttggtgtttgaaaatgtttttcttttcaaagaaagaaagttatctatttaggctttattgccaatgatgtgtatatgtgttttcttgttccatattgtagttgctgagtatttctgtactcactcttgtgtttatttggttttagatacacattgagatcaacatgtatgggcaggaagtaggacccttatttacacatctatctgcacactatcaaactatatcaaactatattgcttaggaggaccacttcaagaaatatgaccttctgtgacgaattcctcgtgatgttggagcaattcgtcactagcacattccattttatgacgattagtatgagatggggtggcttagtgacgaaaaaaaggtgttcatcgttaataccaactagaaatcgtaataaagtatttcaatgggacatcgtgacgaatattaatttatcataaggggcacaaagcaaacgtcataaatttatataatgcatttatagaaaaatatattaaaacttaaagcaatttcatcaagtgaattaatgaggaaactaaaattttcctttataaatcatggccggaaatatttttgtaatattctacgtggtctaaataattcttgtgaattttcggtgctcaagaactaattttaataccacaaagtttatttaacctattaaaataaatggaaaataaattaaaattcctctctctgtctttgggctttttcgacccaagtattactctatcccttcctcagcccgcagcttgtctttgggcctatgctgattcatgatgagatggttgtagtgttttggttggtgcgactttgacatgtgacttgttcaggttagtgaatttgaatgattatttggacatgtgactttgttttggacggtgattgagttgtgactcgattagtacnnnnnnnnnnnnnnnnnnnnnattttgctattcaggacctgatgtaactggacatgtgatgtaatttttggtcagtgaagctgtcatgtaattgaacttgtttagataatgagcctatgatgtattttaatttggtcagcgattgtggttgtatttggacatgtggctgggttggcccacgtgttaattcatactgctgtagatgtcagatgtgtggatgttaattgggttttatattggattttaacttggaatctgtttgatatatgggcctcttgagtatgcatggcccagatgcaatttcattgtaatgcttgagcttactgggccatttgaatatatagagcccactcaatatttaattcaatatagatggatatagtataattgggctgaatttattaaaatctaattagacttccaataggcctagcccataaatagatttctcactacatgggccttaacaaggcctagcccaaaaataggttgctcactacatgggccttaaaaggcacatgatattttatgacattttttagctagataatgacgaatatgtgcgtcacaaagttataacgacagaaggatcatcactagattaatgacgaaaaattaaggtttcgtgatagaacgcccttagagatgcatgataggtgacgaatgaattttcgccacacgagcgtcacagattacgaaacgtgacgaaaaattcaacgattgtgacgtaaatggagcgtcatctattataagatctcttgtagtgccataatgacacttgaattatatcctagtttggtcttgtaataatcttttagctgtctattagtttctttcgatggattatatggatggatagcactgtgggaattatattatcattagtttaatcctataactgtatattgtagatgtccatatttataggggatactctgccaaaatttctaataattttgagagttaatggttttgagtatatttaggtgtggcattctaagtacatgtttacctggcgtgttacaatctgtgacgtgtggcaattacgacctgtgatagatacgggatcacatcaccacttatgtgtgacggttcataccactacactcatcatagatggcatgcaatttatgaagggacatggttgtgaccctgttgacgtgaaattcgtcatctacacgaaggccaaggagatttgcttagctctagtataggtactatcaatcaggctttggttgggccagttagtttgatcttgcaactaacaaggacgacagaaagaattgaaccaacgaaccaatcggcctgatatagtgtggaggatgtagatctgatggttaaagcatacatcgtctattaatccgacgcaagtagattcacgtgtatatcggctagttagccgatacatctgatagctaaagctcataataatgatagctcatcagctagaactccaataaaacattacataaaaacatatcgcttactagaattaaacttattagtagcaatctaatgaatgggaccttaccgagacattataagattgaagataataagaaaaacttacttagctgatagatctacgcaaacatgtttgatataataaatctatctaaaattgcaatatgattagattagaaagataccatcctagttagaatatcagacttaaatgataaagtcctaacttaagctgatacgattctaaatagtgatgcagttaaagataaattcaatatatctgataggcaacacttgcatcaacctaaatagaatatcagacctaactaagaaagttctagctatgccgatacaagcgaagttgatagaacttactttcttgccggagatcaaaaccgatgcagtctaattcgaaactaggaactcgctagaataaaagggggtgatgcacagaaagtaattgtattaatctatgaaagatagtttacaaagactgcaggtgtacataaatataccctcaggttggtacaagtcttgatcaaacacgagataagactccaaacaagaaaatgagaatatataactaatcctacctatttaagatttatactaaaaatatgaaactgcctctgccgtggtcttcgcgatttctctttaaattcagcttgatctggataaaacatctatctactaattggcttctttccttaaccgaattcaccaaagaatcgtaccaaattttagcattaacagaccttcatatttgtaataggttacaattacaacccgttacagataacctcacatctatgacaagtcgtgctgacccgtcagagatgatttgtggttggatctgtagtacatatatagtgatagatcaacaaatggtagatgatcgatagggctgcgataatttggaaaagaaacaaaaggggtgatcaaactagctatgttaaggagtagaagatcctaatgaatgtactaacatcttttaggccactcatgaataacaaaacaaaaaatatactacctccgttttttaatagatgacgccgttgactttttatcacatgtttgaccattcgtcttattcaaaaattttatgcaaatgtataagatataaatcacacttaaagtactatgagtgataaaacaactcataacaaaataaattataattacgtaaattttttgaataagacg

SEQ ID NO: 7745 - DNA, 813 bp, Oryza sativa
gccggtcggtgaagacgtagacgcccaacaacggcggcataaaggccagccgtgcaggcggaaacaccagtcggcagcggcggtcgaggcggccggtcggtgaagacgtagacgcccaacaacggcggcataaaggccagccgtgccggcgaaaacaccagtcggcggcggcgaaggcaagccggtcggtgaagacgtagacgcccaacaacggcggcataaaggccagccgtgcaggcggaaacaccagtcggcagcggcgaaggcaagccggtcggtgaagacgtagacgcccaacaacggcggcataaaggccagccgtgcaggcggaagcaccagtcggcggcggacgaggcggccggtcggtgaagacgtagacgcccaacaacggcagcataaaggccagccgtgcaggcggaaacaccagtcggcagcggcgaaggcaagccggtcggtgaagacgtagacgcccaacaacggcggcataaaggccagccgtgcaggcggaaacaccagtcggcagcggcggtcgaggcggccggtcggtgaagacgtagacgcccaacaacggcggcataaaggccagccgtgcaggcgaaaacaccagtcggcggcggcgaaggcaagccggtcggtgaagacgtagacgcccaacaacggcggcataaaggccagccgtgcaggcggaaacaccagtcggcagcggcgaaggcaagccggtcggggctgcaggaatcgcccaacaacggcggcataaaggccagccgtgcatgcggaaacaccaatctgtagcggcgaaagcaagccgttcgg

SEQ ID NO: 7746 - DNA, 5945 bp, Oryza sativa
cccgtcccattggacgacggcgccagccactctggcgccccaaaaaggaccatttctgggataagtttttctaagggtctatttgtgaaataagtttttcaaaaggaccaaaatgtgaaaaatccgcggaaaaacataggaataggaaaaacgtaggaattggagtggcatattttcctaatcctacaggaatggaaaacacaggaaatatgaagagagtccctttgatagcaccataggaaacaaacaaaataaaggatagtttccaagaggttgaacctcttgcttattttcctatgaaattgagctataggaatgcaatcctaaggaaaatttcctatactttcctatgaatcaaagggtttcataggaaaaaatccttaggaaattaaatcctccaaaattcctatgacaatcctctaattcaaaggggcccttatatctcattacgcctaccgtcggctgcaaaccgaggaattttgctttgataccccttacctatctatacaccaacactacttttatattaattatggtatagagagggttgcattggctattctttggttttgattttgtgcctattcataaattaaaatcattcaaaatcatcttccatatcgggatatgtatttttgtccataaaaattttattgctggattctatgaaatcaaacaccacatgtatatctctgtctatgttgtgtataacaataataaatttgttatgaaagccaacaaaataagcgtatatatctattcgccatggtactattgtaggtctatctgcatatctcttctagaattaaataagcatatctcctgtcttatcttctagtgtgtgatttggtttgaatttattctataattttcaatacagttctattgctacatatcgcagttaaatgatgattaggatgacaaccaaccatgtcataaataagagctagtagtgctaaaaccaaacgaccaataatacatagcttttgtcacgaacgagcattgtcctaccaattttacttcttgattctaaataaactagctcacataacaaaacttgaaattatatacaccaaactgaagaggtgccaagaacaatgtatatgtgtatctgctctttttttttatcaagagcaagttttatattgtttgtttgtatatatcccctccttattgttgtctcactcctaacttttactatagtctttttgttaatggagctagcattgctgtatatatgttgattgccgcttttttcctcctcttttagcgcatgtgtacttcgccggaagggtgaggcttgcatgcgaggaacatcccgtctaatagtagccaggagattgtgagggcaagtaattaattaatggagatgctctgcagtaactaccttcctagatcaccaccaagggttgaactatggatgctgcacagcacgatgggcagattttgatcgatcggagaaattggtatatgtacgttcttatcaagatgttacttagcgcatatgggtcttgtcgaaacatgatttcggcaataataaaaggggtagcgcacgagacctaaaagtggatggatgcggagacaaaggatttagacaggttcaggccctctcaatgagaggtaataccctactcctgtttggggatttgaatccgccgagtgtgtattgatctgacgatcaggttgtctcatctgccccctagagggcctcctgcccaccttatataggacggggagcaggattacaagatagaaaccttaaccaatacggtatcggtttcctaaatctactttacaatattatcaaaccaggactttaggccgttccgtaatatacaaggaaacataacacccaagtcatgatctgttacatattacatagatataagttatcccctataactagtcggataaccatgccgtgtgggtatggggtacccataatctccacagtagcccctgagaccttcgcagtcgaaaagataatcttctctcgaaccagattactccaaagccgagtgcttcaatcatctttgtcatggtctcccgagtacttttaccaaatctgaagactgtggagggctggaaaataaagtcaggtgcaccgactagatgcacctaataggtgtagcccccgacaatgtggttaattgaacaaaccaagcatatagtcaaggaataaataatccaaccaaccgagtggttttgataatcgtaatcaaccaagtgacttgatatcaatatatagcatatgcggtgtgaaccctccaaataacatgatccgagtgatataccaactgctttgtaaaatatgatgcgtacaacctaaagttgacaacatctttgaaagttcacatagcaaaacaactataaagaagcttgaatgctgtgaataaagaaatctccaaagtattgggcatacgccatgcgcacactgcttcaacagatgtgcttaagtccctaaaagacacatggtttcaccacacctggaaatatatggcatatgtggtataacatccgagtaagtaaactcataaaggatttaccaaccgcctgaaaaatgaccataatatataatcagcctaagtcataatattggtcaataaaaatgcacacttacgtggcaaaaagcaatgatattgtatccaatcaattgcttgataaatccaaacagcaccttgactatataaaaaagtcagcgggacagctatataaagctttactgtttgacaccttttaagatgcattgtaccaactcctaaaaagttaagtaactgcggtataaaaggattttaaggtattgggcacttgatcacgcgcactttggcctaagcaaaaagtgcctaagtccctaaaagaacgtgacaggccacacctgaaaatatgggctgcagacatattaggcctaggccaaaaaatatgccttcgacaccctttaaaggatgacgcatgtaacatgctcccgagtaataaatcttctaggtaatatagaccaagtgtagctcatatgaatagcttctgatctgatagattatcccttatgagatactccaaaatatatataataattgaatcccgactggcgcaagtattcggttgatagcccttacggggaataataattggtccagtctttgagcatagaaaatagactcatgactatgaatccatgtggaatgtatccggaacaagtccaaattggagatataatcctcacgcttgagttgatgagcccctgagcatatagcttgtccttctgtcatagtcaaaattgtccattgatggtagctgacgcagttggcatagagacaagacgaccaacatagagataatattgcccaccagaggtggcaaaaatattggtggtagtgaagataatgataccaatcaaaagtgatgaagttgcacagccgtggaggcgaagaaaccagtcggcagtagtcaggtcagccatcaatgaagatgaaagagcccagcgataaagttgtgtagccatggcagcgaaataatcagtcggtgacagacgaggcaaatcaaaggcgatgacaaaatccaccaatcatggagatgaagaaaatagtcggcgacgacaaatgcaactgacatgatgaagatgacgatgtcggtgatccagtcaatagcagcgtcacaaccaatgataatgacgaagacgctcatcagcatttgcatagtaggtcaaccgtcaaggtgaaataataagtcggcgaaaacataatcatccattagcaacagcggagatgtcagggccgatgaagcggaggtgctggtgatgatgtcagtgacaataatccatcaaattagtgttataactgttgtagatgcttcacttggaggagagttgatgttgttgcccaactcgtctaaaccgaaatatttaaagtttgttgaagtagaatgtctgctccgaatcaaagatgaagataatgactcctggagttgactcgttggttgatgaattgatttcttcagcctgacataaaatttgtcaaattttgagccttatatttgtgtagcccccgactctttggttagttgggaaacaactgaacatagagtcgagaattatagcttcttgtcgtcgagtagtcattgcttgattgaagatatgtgttgaagatgtccaagtagaaatcctgaatattggagagcctcttgttgtagtgaaataacatggcatcgtatgccgagatgtcgaggctaacaaagacgtcgtggttggtgaagtagcaaaacttgcgaagtagcagcaatagagtttgccagtgctgaagataataaagatgaagtcgctctatcatgatgacaaagttgcattgccgtgatgaagtgaacacgagtcggcggcaacagaagcaaactggtagtgaagacgcgcagttgtgaagataaaagcaccagtcagcgacagcataaccagtcggcgacggaaaacgatgatgtttatcagtagtggtagctgtctaaaccagacgtagaggtgagggcactagtcagcagtagacgtagacagcttgcgttgaagatgatgatgcctattagcggtgacggtgatgtagccagccgtgaagaagatagcatcagttggcgtcataacaggccagccgtgcaggcggtgacaccagtcggcggcggacgaggcggccggtcggtgaagacgtagacgcccaacaacggcggcataacaggccagccgtgcaggcggaaacaccagtcgacggcggtcgaggcggccggtcggtgaagacgtagacgcccaacaacggcggcataaaggccagcagtgcaggcggaaacaccagtcagcggcggacaaggcggccggtcagtgaagacgtagacgcccaacaacggcggcataataggccagccgtgcaggcggaaacaccagtcggcagcggcgaaggcaagccggtcagtgaagacgtagacgcccaacaacggcggcataaaggccagccgtgcaggcggaaacaccagtcggcagcggcggaggcaagccggtcggtgaagacgtagacgcccaacaacggcggcataaaggccagccgtgcaggcggaaacaccagtcggcggcggcgaaggcaagccggtcggtgaagacgtagacgcccaacaacggcggcataaaggccagccgtgcaggcggaaacaccagtcggcggcggacgaggcggccggtcggtgaagacgtagacgcccaacaacggcggcataaaggccagccgtgcaggcggaaacaccagtcggcagcggcgaaggcaagccggtcggtgaagacgtagacgcccaacaacggcggcataaaggccagccgtgcaggcggaaacaccagtcgcagcggcggtcgaggcggccggtcggtgaagacgtagacgcccaacaacggcggcataaaggccagccgtgcaggcggaaacaccagtcggcagcggcggtcgaggcggccggtcggtgaagacgtagacgcccaacaacggcggcataaaggccagcccgtgccggcgaaaacaccagtcggcggcggcgaaggcaagccggtcggtgaagacgtagacgcccaacaacggcggcataaaggccagccgtgcaggcggaaacaccagtcggcagcggcgaaggcaagccggtcggtgaagacgtagacgcccaacaacggcggcataaaggccacccgtgcaggcggaagcaccaaacggcggcggacgatgcggccggtcggtgaagacgtaaacccccaacaacggcagcataaaggccagccgtgcaggcggaaacaccattccgcagcggcgaaagcaagccggtcggtgaagacctatacgcccaacaacggcggcataaatgccagccgtgcatgcggaaacaccattctgcaagcgcggtcgatgccgccggtcggtgaatacgtatacccccaacaacgg

SEQ ID NO: 7747 - DNA, 20710 bp, Oryza sativa
cctttggataaatcattatatgtcaactgaattcagggcaaaatatgtagtacaaactgtattatgtaatagaaacttagaaactatcgttacataaaaaatagatgtctaaaatggtgttcacgtcatcaaaaataaaacttttacttccagatttaatcatgagaaaaagttttactcttgttaacatggacaaatatcaaacatcaatttttggatccaacgatagttttcaggtttacaccagatgtgtggtttgcactgtatgttttctagaatttcagttagatgcccattacaccatcgcctgtgataagttctcagagtatagcattgctacaagcatgtattcggtaatcccttttaagcatacatgatatatttgagtagctacactgttcttttgattatacccttatatgagaaacaagagggacactgcctacatacagtataatttcaggaaaaaaacagttaatagattaagaaaaactattacctaaccttgaggtcttaacagattattcgcgttgatcagaagaggttgcaaaacagcaatataaacaacataatacatgatagcatgatggggaaaaccataatgatacagaatctgtaatatatatatataccataacgtgatgaactaaacatgaagacatatcaaggtatatatatatgaaacattattaattattcatggtaaacaacaacaagatggataacaccgactataatctataattctatactatacttctataagacaatagtggtcataatatcaatataacttgtgagtgctataacagcttttatcatgtactggtggagtggtgttgtagtaatagtcattagttgcgcgcttttgctgcaataaggttctttaattttcttgccatcacgattaagaaaacttacaaactttttaggttttcattgcagtttaaaatgagatagacaacacaatttattgacaagtacatattttctaatcatatgaaaatgatatatctttaacaaagatactgtcatcgatttgtacaaaaatctagcaatgacatttttcttttcgctttttgagacaaaaagacttgtttgaaacaaatagaagctaatatttttttttcaacaaggacatatgcgatttttttctattttgaattatccgttgtaatgcacagatatttatctacctagtctatactaatacaaaagatggtagtggcggtgagtctgccaccaccaccatcaccacccaactaccatacgggacccatgaactgtgagttgcttgtctcttagcctcacatgccatagttcccgtcgaaagaaaaaatatgacaatagaatattatgaaaaattttatcttacgtaatgacaacaaaattagcataatgatagtatagtagacaattaagaaaaaaaaacgttgcaacacacagccatcatgctattgtctagagaatatacaacaatggttcttttgtcataaaaaaacaactaggtaaacatgctggtttcatgcctacatgacatgaacaaaccagcatcagtataggaaaacaggtaaattaaactgagtacagatacatatagcatatcacaattcacaacatgatatgctcaaagagccatgaggccaaggatcgaaatgtagatcaaaataactaaacgattcttctgatgataatctcatcacaacacaccgaggagttcttccagcatcgtcgtccatgaattaatcccttcgatgcagcacaccataattattcaggatcaggatcattctggttgcttactgtgtgtcctcgccgtcgccggccggatcctgccagaacgaggagctgaggatgtcgtcgccgtcgccgagatccgcgaagaactccatgacgaactgatcagggctgtccggcggggtgtagacaccgaggagcttcggcttcttgtgcggcagcacgggctcgtcgtcggagatggccgacagcaggaagtcatcaggagccaccacgacgccgccgggagggatgatcatcggctggaagatggcttgattggccggtgcaggtgccagcgccggtgccggcgccggagctgcagcgggtgtagtcgcctgcagcatcggagaatcctcggcgaccaccctcgccggcgtgcgcccgcggccgcggcggccgccgcgaccgccaccgcgtccacgtccacgcccgcgcccgcgctctccacggccgccttgaacttgtagctcgggctcaggaaccagcgccgacgagggaggaggaggaggaggagcctcgcttgccggggctgatggcgccgccgccgccgccgcgcgacggcgtcggcttctgccgcgtccacgggcaccaccaccgcgtccacgtgggccacgagcccttggaacgagggagcgcaccaggtgggcgatcccgaagaagacgagcatggaacgcatcaccggcgtggtcgccggccgcagcggcgcgcgggggaagttggtcgtcgccttgtccccgtggatcaccgtcgccgcggtgtcgtacgcccaggcggcctcctcggcggtgccgaacgtgcccagccacaccctctccttcacccccatcgtgttgcggatgcggatctccgccgcgtacttcccccacggcctcttcctcgccccccggtacttcctctccgccgccaccagaagctccgccgtcaaaccttcctccccctccacaaccggcgccccgacgaaaccctctccctctccctcgacggccggcgccacccagccctccccgtttgcggccgcaaaaccctccgcctccacggccagcgccgccaacccgtcggtgttgatctccccctccaccgccgcagccgccgccaccgccccgttccccgcggtcgcctgcgccgccgcgcgctggcagtactccctgagaagctcgaccagccacgtcgtcgtcttctgcttcaccggcctccccatccctacgacctaactccggcgatcgacgccgcgcgcgcgccctagccctaaatccctaatccctctagatctgcctccctcccctgatcgatcccctctcgctcgctctcgcctcacgcttctcaggagagagtcactcacttgaatgcgaggccagccacagccacagccagcgccctaatagctttcactttttgtcgcgcgcgggtttcaaggctttcctcctgatctcacttggcggcgtcacggcttgcgtgtgctggcgttttgctagctagctagccgtttgctgggctagctggcgcagcagcagcggcggacagcggagcgtccgtacgtcgccggtggctggatgcgccgcccgcgcggtggccgtggctgggctagctttagctgcgttgcatgcgttgccagtctctctctctctctctctctctctctgtaggaaacgcagaggaattaagtgggcatcctctgccgtttggagattgtactggaggttgtgcagttgtttcgatctgggtcgctcatctggaaagggacgggaagggagtagtatgtcacatggtttatgttgccactcggtttgtttctactagggtaggtaggttggagtggagtctacaagagtaatgattcgtctgacatctacgtttgtggactctagtacactgtattaattttgatacaccaagatttctattaaaattaatgctgctaaagaaaataaatctattccttgaatagagatgcacatatttatcaattatttgcacaagaagaggcatatctttatcatcttgtggctactttggcaactttaaatttcgaaaggagcaaataatgggcatttcaatttttcaccaagataaatgacactgctctagattatacgggtcatagtagggtgagcctggctaatcgaagtatgtgaggtggcaacactactctaaggtgaggtggcaacattgctctagggtgtagacgatgggtaaggcagggaggtacttggtactattaatcagatcaacggcagcaaatatgatactagttgtgtctctagccaatagtgttcaaaaaaattgttaagacatgtaggttgtcggtgatatgggaccgggagtatcgtgactagaggcttgaggcagacacaaccgcccacgtggcctggcaccttcggggacgtcgggcccgagggtgaggtgaccgccctcctcctgatttccccgagggggggtcgggtgactccagcctcgcccccgagggccgaggcgccccgacccctcgcgttttctactccacgtgtatgggttaggtgagcacagcagggctcacctaaccgcatttatcgcgcctctgctaagcgtgtcacgccgcacgaagtgcagtgcagtgcactcgattatccggtctgtgaccagtcacagaccggtcaaatcgcgggttaggtggcgacaggcggtcagacgcatgcttcgccccatcctgtctagacgagagcttctaggcactcgtccccggctggagctagcgtgttacatcccagagatgacacgttagccccgatcgatatatgccaggcttcatcctaaccattacaagcaagatgttgtttgaagaagggcaaacatgcacgttgctgagccgacgtgtggtggacaagaatgaccgatttgtgaccggtctgacactgctcacgtcgtcagcacacagccaccttcccacgacgtgcccgcctcaggcagaagtggaggtaggtatgtgccgtcccatcaggaggattttcggaggacgaccgtgcaaatctccgtccatttatgaaaagaagaaaagtccagtttggaaagggaagggtgcatgtggtatccccttgaagtataaaaggaggaccttgcccatagaggggtggattctttcgagattcagagcctagaacgagggagaggtcggctcacactttgtagctccttcatacacagatccaccaaaacacaggagtagggtattacgcttctcagcggcccgaacctgtatacatcgcttgtgtttcatattctcttgaaaggtcgcgatctttccgtcatctacagagagagcttgagatctcaccctgagcccccggccgaaccggcaaaggggggcctgtgcggtctcccggtgaggggccacgagctccgtcataggtagtccattggatggtcaatatatactagtataggaataagccgataatcaagttctgacagagaatggcctctaatatgtgacatcacgtctagtaatattttatatacagtgtcatttagaattctagggcttacgtcaaactagctagttatgccaataaacgcactttacatcaaataattttccatgtaagaaacgtttttggccaacgaatactcgggtagatactagggcttacgtcgaactagttttggcgccaataattaatagtactgtgatataagtcatctgatgaatacattccacgtaagcaacgctttttttctaataagtcctagggtttgcgttgaactaattttgacgtgaaatccaaatttcctcaacttacttaaaacaatgaatctatatgatttttttttgtttctcgcattatacgatttctaataaacaaagcatcgattacaagattttcttttacaccagtggctaaaaaataagttcttaattaacctacctgctagattgtcattaagataatttattatctgacacttggttaccactgctcaatagcaaagaggttttaccttttggagcataacatgtcccctgtgactctagctaggcaatagaggtagaaacaatacaatcatggtgaaacgtgtaagtagtccattggtggtcaatatatactagtgtaggaacaaaccaacaatcaggttctgacacgaagactaatatgatacgtcacatctagtagggaaataacaccttaatttgtgccaatgaattttagggcttacgtcaaactagtttcgccaataagcgaaccaaattttgacacgaaggttctctagtgtgtacatctagtaactttccacttatacaatgttttttgccaaatagtgcggcggatagtagggtttacgtcaaactaggtttggcgccaataataatattgtgacattaagtcatctcctgcgaatactgattatatgtttcatgcatgcaaacaacactttttttgcccataaattctatggctttcgctgaactaattttggcgcgaaatcctaatttccacaactttgaacaattaacctagctatatgatttccaacaaccaaagcatcgggcacaagattttcttttacacaccgttggctaaacaaaaacaaaaaaaattaacccagttgcacatgtgaaacccagttaaacatccacatgcaagggcaccagacatgccagcaatgtgtgtacaatgcgagctccagatcgggtttctccgatgctgcaacagcaactgcaaactactgattctgtagagtataggccgagaccaacggtttgcatcctgaccgtgataatctcttttaattaagcaccaaattaaaacattcatatctagctatgcaccctcacttgcatcatcagttgcggctacctagcttgatatatatagtcgttaattaatcgtggtaggctggcacagcagccagagcagagcgagtgaacggggggaatcgcgtgtgtgccgcacggtgggcatgcagctgcgctacatacaatcaaagtcgttcatctggaaaggaacggaggagaccagcatgtgtatacaataatccgtaatttctttggcggccaaaaaccgctaaggttagcctgtaaactgccaaagcaatatatcttcacggccaactgtaaagtaagaaccgctaattatagagcaacagggaaatccctattttttaactgctaaccgtgagggagagttttattggtggtccatctcaacatactatacgtatagtgtatgttgtggtggcttacgaccgcatgatacttggatacacacatggtttatgctagccgcgtgtatgtctagtacttcaatttgttttcagggatactgggtagaaagggaaagtatataaaagtaaatgattttgatatctctaagttggaccctagtacaatatctattatattattaaaggaatagaaaaaggaatagaaaaaggagcttccacgttcgctttcacggcctagaaattctcacattaatcggagaaaaagaaaaaacagagtctatatagaaatacaatttagaaatagctgaaattcgaaattaaaaaataaggaatattagaagaggagactagagtccatatagaaatacaattaggaataactaaaattcggaattaaaaatagagaactgctagaccacggcatcctgctaaatgggatagattatgatgggttaataacgagttgttgcccccaccaaccgcgtccatgtgtccccacgcgtctgcatcgctttcccccacgcgtctgcatcgttcacccatacccttcacgtgtctgctactcccccacgtgtccatgcactggcatcaggtcccctgtctaataccaatctggcaccaatatctgatacgatacttgatacctgaggtaccagatctggttggtacctaaggtacaagatctagtactatgatatcagattcgatacttggggtaccaaacctggtacgcactgtcaggtaccaaatctggtaccagtgtttgatcagatacttgatacctgaggtatcagatctggttgatacgtgaggtaccagatctagtaccataggtatcagattagatgcttggggtaccgtttgatccgagacttcatacttgaggtatcatatctggttgatacctaaggtaccagatatagtaccataggtatcagatcagatgcttggggtaccgtttgatccgatacttgatacctgaggtatcatatctggttgatacctaaggtactagatctagtaccataggtatcagatcagatgcttggggtaccaaacctggtacccatggtactagggttggtggtacctggtctgatacccatgacgtatcaagaccagtagttgtatattaggcctggtacttaaaaaaaagtaccaaagcgtggtacctagcgcagcggtatcatctggtaccaaacaagttatcttcttcttcctctcgctaacacgttgtatcccaattagccgttgatccctaggcatgaaatgaaagcaacaaccaaaaaagaaagattgtgaatagatgcaggcaacaaactagtagaaaatccgtactctcatcttcctcctcctcgtggacatctagccccatgcagcctctgctgctgctgcactcctgtcggcttctcgaggatggtgctgatggccagctcaaatagggtgttacgatcgacgtggcaggggaacggctccgggtggctagtggctcgtgggtgcatagagggcgacacggagggatcagtgtgcgcgtagtgggtggtggatgacgttgtgtagacgatgagtcaagatgaggcgtggggcgttaggtgatcattagtctatcccgttaggacggtattccgttttatagattttctgttaaaaataaggaatattagaagtagagtatagagtccatatagaaatacaattaggaaatacctaaatttcgcaattaaaaataaggaatattagaagtagagtatatagtccatatagaaatacaattaggaaataactgaaattcggaattaaaaataaggaatattagaggtacaatatagagtccatatagaaatacaattaggaaataactgaaattcacaattaaaaataaggaatattagaagtagagtatagagtccatatagaaatacaattaggaaataatagaaatttggaattaaaaataaggaatattagaagtagagtatagagtccatatagaaatataattaagaaaaaaaatagaaattcggaattaaaaaaataaggaatattagaagtagagtatagagtttatataggaatttaaaattaacctaaactttggaataaacataataaaattaaagtagagtttagagtccgtataaaaatacaatttacaaatggaagaataacctagagtctatatagaaatgcattttacagataatgaaaattcagaattaaaaaaaagaaatattgaaagacgagtctagagtccatatggaaatataatttacaaataactaaaatttaatattaaaaataattaataactaacacgtatatataatacagtataaatattacacatgagtagtttcgtaaagttagtacaaaatttaaaattatattatcattttaatatttttaaataatacattgagaaagcatatatgctattacttaagagaaaatataatgatgctagtcgcgtaatctgtgcgggcctccatgctagttaattttgatataccaagatttctattaggaatgttgctgaggaaaataaagtcagctctgtttggacaactaggagatagaatagaaaacacattcctaagatacagatgcacatctctgtcatcttggggctctacatggcaattagtatctctttcatcatcaagcaatcatagggataaatgggtttttaatttttcaccgagacaatgccattgcttcatacaagacaatatatagccgcgagcagtacgtcgccggccacgtgtgccgcgcggtggccggactagctgcatgcgttaccagtcaggagattgtactggaggaggtgcagttgtttcgatctgatcgttcatctagaaagggatggcgaaggtgtagtgtgtcttgcggtggcttaagactgaggatggtttggattcacatggtttatgttttgcatctcttgttcaattctcgatttgtttctactggggtaggtgaggggaataaacaagactttgtgagacatctaaattggactctactgtatttattaattttgatctaccaagatttttttctaggaatgctggtgaggaaaataaatacaccttttatctgaataaaagagagagataatagaaggacattcctaagatagatatgatcatcttcatcaatcgatcaattgcaaactagatgcacatccgtgtgcctaatttggcgactttctttctcatcttggccgccggcgatggctgcggcgacgcatgtgatggccatgcgatgttggagaagacaccattggggaagaaggttgtcatgacaacatcatgggctatcaacaccgacttttctggttatggcacaactgttgcggtggtgagcttagtcgtcaccggtgccggtgccggtgcagctacggcagaggcagcgggtatgtatgacaccgggaaaatcaaagaatttggctctagtgacggtgccggtgcagatactaaataaaaagggccaccatttttatgcaactttgagctctcatgttattattgtagaacaaaagaactcacacacaacaatagataacacattaattcatgtcaacataattaatgtgtgaaacacacaacatgattggggagttctaaacaagaccaaagtatgggtaacacattttaaattcgtggtaaacaattaacacggaaaagtgtctaattgaccagaataggtttcaatagtttttgttcaatcataagaaactagataaacatgtttgctaaattacataatagcacaggtaaattaaaccagcgtcattacaagatgaatacaaacaacttagtaaattgactgatacatagcacgtcaactgaagctggtgctttctctgaatcatcgtcttcattcgtaattggatgatggttcgttgaggtcaaagtcaaacactatcggcctctcattcccagcagcaccttgggtcaacgaggatgcgacatcggtggcagcctgagccgacgaggagggaacgtcgatggcagcctgagctgatgaggaggggacgttgatgaaagcctgaaccgacgaggaagggacgtcgacagcggcttgagctgacaacgatgcgacgtcaacggctgcctgagccgacgaggatgcatcgtcagcagctagagacgacgaggtgtcaacgtcgaggagcattgacatcgagctcagcagcacgggctcgccctgctcaccgtcgggcacatcagcgaagaagatgtttggatcaaagtccagagcctcgtggacggcgtagtttgtcggcacaccgccaggagggatcaccacctggaagaaggaatcgctagccgccggcggtggcggcggcggtggcggcagcgcatgcgatggccctgcagtgtaggagaagataccgttggggaagagagttgccatgacaacttcatgggctgtcagaatccgcttttccggtaaaggcgtagctgctgcggttgcaagttcaggcgtcatcggagccggtggccgtgcaactacggcagaggcggtgagtgttgatgacaccgaggaaatcacagcatttggttccagtgactgtgaaggtcatgatactagataaaaagggcaccagtatctttatccagcagcaggactttcactactttcccaagtaaagctagtgttaagagactggattgtagaagtgttgactgacttgactggaaatataatatggaaagactgatggactgactttatacaactttaagctctcaggtgattattcttgatgatcaaaaaactcacacacaacaataaataacacattagttcatctcaacataattaatgtgtgaaacacacaacatgattggggtgttctaaacaagaaaaaagtatgggtaaaacacattataagttcatagtaaacaattaacatagaaaagtgtctaattgaccagaataggtttaatattttttgttcgatcataagaaactagataaacatgtttgctaaattacatgataacacaggtaaattaaaccaacgtcattacaagatggatacaaatgacttagtaaattgatggatacatagaagatcaaacgaagctggtgctttctctgaatcatcgtcttcattcgtaagtggatgctggttcgttgaggtcgaagtcaaacactatcggcctctcattcccagcagcaccttgggtcgacgaggatgcgacatcggcggcagcctgagccgacgaggagggaacatcgatggcagcctgagccgatgaggaggagacgtcgacgacagcctgaaccgacgaggaagggacgtcgacatcagcctgagctgacgatggtgcaacgtcaacggctgcctaagccgacgagggtgcatcatcggcagctagagacgatgaggtgtcaacgtcgaggagcgtcgacgtcgagctcagtagcacgggcacgtcctgctcaccgtcgggcacatcggcaaagaagatgttcggatcaaagtccggagcctcgtggacggcatagtttgtcggcacaccgccaggagggatcaccacctggaagaaggaatcgctagccgccggcggtggcggtggcgcatgcgatggcgatgtaggagaagacaccgttggggaagagagttgccatgacaacttcatgggctgtcagaaccggcttttccggtaaagtcgtagctgctgcggttgcgagctcaagttttgctggaaccggtggcggtgcagctgcgccagaggcagcgagtgtagaaggcaccggcgaaatcacaacatttggttgcattaacggtgcagttgctagtgctgatgcagatgcaggcaccaatgccggttctgtagcaggtgtgggtgccgacggcgatggagtacccacggtcaccgcagtcggaatgcgtccgcgtccgcgcccgcgcccattccaaactccacggccacgactagcaaaggttgcctcagcaacacgcccgcgtccgcgttccggtccaccgcttttggagagggttgaggctgtttggagcttcctcttcttgggtacaggtgcagcagctgcggctgcaactgcaggcggcggcatcgggaccaggatggcttcaggcaccgccgtcggcggtgccaccgccggtgcagcagcagaggcgcctggcgcgagtgtggatgaccccggcgaaatagtggcattcggctccattgttggtgctgatgcaggcaccggcactggagctgcagaaggtggcagtggagcacctgcggtcaccaccgccgaagtaagtccgcatccacgcccacgcccacggtttccacccgcaacggcggcatcggcaacacgtccgcgaccacgtgcacgtccacggccgcgctctccaccgcttgcgaagagggttgaggctgtctggagcttccttttcctatcgggtgcaggtgcagcaactgcggttgccgctgcaggcagtggcggcggtggcggcgggatcgcttcagctgccaccggcgccggtgcaaatgcggctgcagcagaagcgctggctgcgagtgtggacgacaccgtcgagatcggtgcaggtgcaggtgctgatacaagtgccttcgccggagtggcagcaggtatgggcgccggcggcggtggagcacccacgatcaccaccgtcggagcgcatttggtttcggacccacgcccatggccacgaccggcagcgttggcgatggcaacacatccgcgtccccgtccaagtccgtgctctctgctgcttgcagagagagttgcgggtgtagcaggcggtggtgcgagcgcttcaagagccgccagcgatggagccggtgccggtacagcataagcgggcgcgagtgcggatgacggcggagaaatgacagcattcggctccaccggcggcgcaggtgcatgcacagcaggtgtgggcaccggcagcggtggagcaaccacggtcaccgccgtcggagcgcatttgcctccgcgcccacgcccaccaccgccaccgcgcccatgtccggtaccgacaccgcggagaagtccacgcccaccaccaacaccgacactggcgccgcgcccgcttccccttccaccaacaaatgcaccttcatcagatgtggcaccggagcaacatcagatgatgccggtgcgcctgcaccgaaaccggagatgcatcagatgacgtcagcgctggcactggagccgcatcaaatgacggcggcacgggcacctgcaccataaccggagatgcataagatgacggcggcgctagcatcggagctgcatcagataacggaggcgcggccacctgcaccatcaccggagacacatcagacgaaggcggcggcacaggcagcaataggagaggagtaggagccggagcctcgtggacggtgtagtttgtctgtagactaccgagagggatcaccgccaggacgaaggtatggctagacggcggcggaggcggtggcggagcatgtgatggccctgcaatgtaggaaaaggcatcgttatggaagagggttgccatgacaacaacgtgagttgtcggcaccggcttttctagcaatggcgcagctgctgcagttgcgagttcatgcatcgttggagccggtgactgtgcagctgtggcagaggcggtgagtgtggatgacaccggggaaatcacagcatttggttccagtaacagtgaaggttaagatactatatataaaggtcaccaatttttatacaactttaagctctcaaagtgattattcttgatgatcaaaagaattcacatacaacaataaataacacatcagttcatctcacaataatgaatgtgtgaaacacacaacatgattggggagttctaaacaagaccaaagtatgggtaaaacacattttaaattcatggtaaacagttaacacggaaaagtgtctagttgaccaaaataggttcagttggcttacgatagtttttggtcgatcataagaaactagataaacatgtttgctaaattacatgataacacaagtaaattgaactaacgtcattacaaaatgttaacaaatgactaattaaattgatggatacatagcatatcaacaagatcatgcaataaagcaaaatggtcatgagggtcaagtaaaccaagagatctagttaaggatggtccttctcgttgtctccatctcattagtagataatccagttgatcgcgatagactcatcaatccgaagctagtgctttctatgaatcatcgtcttcattcataattgattgtcggttcattgaggtcaaagtaaaacactattggcctctcattcccagtagcaccttgggtcgacgaggatgagtcgtcatcggtagcttgagccgatgaggaggggacgtcgacgacagcctgagccaacaaggatgcgatgtggacggcagcctgaaccgacgagagtaagggacggtgactgcagcctgagtcgacgatgatgcgacgtcaatggtagcctgagcagacgaggatgcatcatcgggagccagagacggcgaggtggctagtaattggaaggagattgacttgcgagatgattcacctccatggattgttcaatggtgacgtcgggcgggtgtcaacaccgaggagcgtcgacatcgagctcagcaacatgcgctagctcatcctgctcaccatcaagcatgtcggcgaagaagatgttcgatcaggtcgaagtcaggagcctcgtggacggcgtaatttgtctgcagactgccgggagggatcaccgcctggaggaagatattgctggacgtcggcggtggagacgacgacgcttgtgatggccctgcgatgtaggagaaaacatcattggggaagtgggttgccatgacaacatcgtgaattgtcaacaccggcttttctagcaatggcgcagctgctgcggttgcgagttcaggtgtcatcggagccggtggtcgtgcagctacggcagaggtggtgagtgttgatgataccggggaaatcacaacatttggttccagtgactgtgaaggtgatgatactagataaaaagggaaccattttgtacaactttgagctctcaggtgattattcttgatgataaacaaactcacacacaacaataaatcatttggtcgttaacaataacacattagttcatctcaacataattaatgtgtgaaacacacaacatgattggggtattctaaacaagacaaaagtatgggtaaaacacattataaattcatgctaaacaattaacacaaaaaagtgtctaattgaccagaataggtttcaatagtttttgttcgatcataagaaactagataaacatgtttgctaaattacatgataacacaggtaaattaaaccaacgtcattacaagatggatacaatcgacttagtaaattatcggatacattgcagatcacccgaagctggtgctttctttgaatcatcgtcttcattcgaaattggatgctggttcgttgaggtcgaagtcgaacattatcggcctctcattcccagcagcaccttgggtcgacgaggatgcaacatcagtggcagcctgagccaatgaggcgggaacgtcaatggcagcctgagccgatgaggaggggatgtcgacgacagccagaaccgacgaggaagggacatcgatggcagcctgagctgacgatgatgcgacgtcaacggctgcctgagccgacgaggctgcatcgtcggcaaccagagtcaatgagttgtcaatgtcaaggagcgtcgatgtcaagctcagcaacacgagctcgtcctgctccccgtcgggcacatcggcgaagaagacgtttgggtcaaagtccggagcctcatgtatggcgtagtttgtcggcacaccgccgggagggatcacctcctggaagaaggaaccgctagccaccggcggtggcggcgcatgtgatgacccggcagtgtaggagaagacaccgttggggaagagtgttgccatgacaacgtcatgggctgtcagcaccggcttttccggtaaaggcgccgctgctgcggttgtgagctcaggtatcgccggcaccggtggccatgcagctacgccagaggcagcaagtgtgggcggcaccggtgaaatcacaacatttgactgtattaacggtgcagttgctgatgctggtgcaggtgtgggcgccgacggcgatggagtacccacggtcacctcagtcggaatgcgtccgcgtccgcgcccgcgcacactccaaactccacggccacgaccgacaaaggttgcctcggcaacacgcccgcgtcctcgtcctggtccaccacttccggagagggttgaggctgtccggaccttcctcttcttgggtacaggtgcagcagctgcggctgcggctgcaggcggcggcatcgggatcaagatcgcttcaagcgccgccgccggcggtgccaccgccggtgcagctgcagctgcagcagaggcgcctggcgcgagtgtggatgacacgaccggcgcaataatgtcattcggctccagtgatggtgctgatgcaggcgccggtgctggagctgcagaaggcggcggtggagcacccacggtcaccaccgctggagttagtccgcatccgcgcccacgcccacggctgccaccggcaatggcggcatcggcaacacgtccgcggccgcgtgcacgtccacgtccgcgctctccaccgcttgaggagaggcttgaggcagtcaggagcttccttttcctttcagctgcaggtgcagcagctgtgcttgccgcagcaggcaatggcggcggcgggatcacttcagctgccgccggcgctggcgccggtgcaaatgcagctgcagcagaggcgctggctgcgagtaccggcgagatcacagaactcggtgcaggtgcaggtgctgatacgaacgccttcgccggagctgcagcaggtgtgcgcgcctgcggcggtggagcacccacggtcaccgccgtcggagcgcgtttggctccgctcccacgcccacggccgcggccggcgaccgcagcgttcgcgatggcaacacatccgcgctctccgccgcttgcggagagggatgcaggtgcagcaggtggcggcggcgcgagcgcttcaagagccgccggtgctggagccggcgccggcgcagcataagcgggcgcgattgacgctggagaaacgagagcatccggctccaccgacagcgcaggtgcatgtgcagctgctgatgcaggcgccagcgtcggggctgctgcacctgcagcaggtgtgggcaccggcggcggtggagcaaccacggtcaccgccgtcgtcggagcgcgtttgcctccgcgcccacgcccgccaccgccaccgcgcccaagtccacggccgccaccaacaccggcaccggcgccgcgtccccgtccaccaacaaatgcagcttcatcagatccagatgacgtcggagctggcacctgcaccggcaccggcaccagagcaacatcagatgacggcggcgcgggcacctgcaccggcaccggagatgcatcagataacgtcggcgctggcaccggagctgcatcagatgacggcggcacgggcacctgcacaatcaccggagatgcatcagataacagcgtcgctggcacaggagctgcatcagatgacgacggaggcgctgccacctgcaccgtcaccggagacacatcagacgaaggcggcggcgcaggcagcaacaggagaggagcaggagcaggagcctcgctcgcctccgcctctgccgccgccgccccacgttcctccaccacacgctcgcggcgagctcgagctcggtcgaagaacgctagcatggaccgcatctccgccgaaagcggcgacggcgtctgcgcgggatcgccgaagttggtcgccgccgcctccccgcgcagcacccgcgccgccgcgtcgtacgcccacgccccctgctccgccgtgtcgaacgtccccagccacagccgcccggcccccgtcgggttgtggatctcggcgacatacctcgtcccaaacctcaccctcaccccacgatacttcgtctccgggtcaatctcctcccactcctccgccgccgcctgacgacgccagcgccgccgctccacggcggggacgacgcgaacctcgccctccaccaacggcgaaaccaaaacctccgccgacgccgacgacgacaccacctgatccccctccatgacgggcacaatcacgagctccaacccggaaccggccctcaacctctccctctccccgggcgacagcagaaatccgccgccgccgcccgcggcggcggcgcggcggtactcgttcccccgtacctgcacggcgaggcgcgccgactgctgggagtactccaccagcaagcctttcatcgcctccgctactctctcctccggatccattcctgcgacctactcgatcgagactcgtgagagattgtgtggagagagaggaagaagagatcgatggcgatggagatcgatggatggcgaaatgggggtggcggcgtgtgggatttaaggaggaggagagggggggggggggagcgtgtccgggcgtcgtcgcggcgtcttcaagccgagagctaggtcacgctggggttgcctttgctgccgtcgtcgcgtcgtcttcaagccgttgtgacgcacgcgggcgtatgcggacagctagcgtgggctgtgcttgcatggctgcatgcgtcaaccagtggactcgatcctctggtttagggaaggaacttgaggggatgcggttggttcgatctggaccgttgatcgtgaaagggacgatgagcggtggttagcggtgatgttttgggttgccgttttggcttttttttttctttttctttttcttttttgtgcggggaatatgtgcttagccggaagcgtgagggtttgcggggaatatctcctatcttaatcttcctatctagccagcagaaggttgtcagggcaggtaattaatgtggtggggttgttaatgtgttgctaaacatggacgtgctgcagtaattagctgcctagatcagcaaggtttgaaggtttagctttgatggatcagggcagtaccgttgatcggattgagaacatagttttcttgtttccttttctttatgacttatcgatatgcttcctccttataaaggataatcaatttctagctatgaacatggacaagcatttgtccaagttcatatatagctgggaattgatttttttcaaatggagggtgtaggctgatgacttgtatgtttctttttttttctttgtccgaattgcaatagtgttgagaaaatttggggaatgtgaactaggtgatgtataagttgattaattcatgatcaaataacgtcatagtcgtgttataatgttgtgtgtgttccattatttacaaatataatcgatgtcgatttatgcgtgtggcactattaaattatgtccgtatacgacatcgattcctcatgcgcttactaggtttaaacacaatattctatgccatcatcctcttctctttcgtcctacatttatccccctttataaatttatttctaacctataagaatcatcctaaaaaaagttcatttagggcccctttgaaacgcaggataggaaaaacatctagatttttcacattttggtccttttgaaaaacttatttcgcaaatagacccttgaaaaaacttatcccagaaatggtcctttttggggcgcc

SEQ ID NO: 7748 - DNA, 25166 bp, Oryza sativa
cagtcggcagcggcgaaggcaagccgatcggtgaagacgtagacgcccaacaacagcggcataaagaccagccgtgcaggcgaaaacaccagtcggcggcggacgaggcggccggtcggtgaagacgtagacgcccaacaacggcggcataataggccagccgtgctggcggaaacaccagtcggcggcggcgaaggcaagccggtcggtgaagacgtagacacccaacaacggcggcataaaaggccagccgtgcaggcggaaacaccagtcggcggcggcgaaggcaagccggtcggtgaagacgtagacgcccaacaacggcggcataataggccaaccgtgcaggcgaaaacaccagtcggcggcggacgaggcggccggtggtgatgttctgactgatccattcctagagcgtaagagataagcttaaagccatgaatcccttttatgcatatctggatctggatcctgcagaacaaacatataggatgagtagtatctgatataaatataatactcgagaaaaaatcaagtattttaaaatatttataaatatgtatttctcctcttgtcaattttgatttccccgagcagatgactcattacgtttaaacgctctgcccaactagtcatagccaccaagcactgggagtcggcctaagcacttcccaaacatgcatatgagtgacatgagttcgtcattaatggaacaaagtttcacggatcggagtttactactcgggtacttttgcaattattaagagcagaaaataaatttatctcatctctatgcttttgatttattccgaataatacttagcaccttgcgttactcggtccatccaacgagcccccgggtgctaggaatcggcccaaaggcaaccatccattggcaaaccaaacggaaagcataggaagatagaactccataactcgataggtacttttgtactcagattatgtcgcaagcaatcaagataaatattataaaaaatatgatataacatctgtagcccccgactcactactcaatggaagaccaattggtgtagtgaggcagaggaaaaggaaaaatatcatataaagaataaaataaatgatgacttagctttgtaatattccccttggtgatagcggaagtggccaatgtgggaacaaagtcgtccatcaataacaatgaagacaccagtcggcggcgacgaaggcggtcgacggtgaaagcgaagatgcccactaatggcggcataataggtcagccgtgtaggcggaggcaccactcggcggcgacggaggcaagccggcggtgaagtcgtagacgcccaacagcggcggcataataggccagccgtgtaggcggaggcaccaatcggcggcgacggaggcaggccggtggtgaagtcgtagacgcccaatagcggcggcataataggccagccgtgtaggcggaggcaccaatcggcggcgacggaggcaggccggcggtgaagtcgtagacgcccaacagcggcggcataataggccagccgtgtaggcgaggacaccagtcggcggcgacggaggcaggccggcggtgaagtcgtagacgcccaacagcggcggcataataggccagccgtgtaggcggaggcaccaatcggcggcgatggaggcgggccggcggtgaagtcgttgttgttatcagcaatggcggtggcgaagacaagccggcagagtggactcgcggccgatcgaccggaaagctgagacgcctcgagtccatgaccagcatcaatcgcctcaatagtgccgcgtaattatatgcgaacaacaacaaaaaatagcaagagattaatttgagattaaaaatcaacatgataaataatgataaaaatcagattgagtttccccctgactgatttggatcaagtcagagaagaggagcttgaagaagtgatcgacggaaaggaagtgaaaactcccaaagcgaaaacgaagtcggcgactcatgaaattgattccatcgcgctcgttgataggaaactcgacgcaacccctacctggcgcgccaactgtcgaaacatgatttcggcaataataaaagggggtagcgcacgagacctaaaagtggatggatgcggagacaaaggatttagacaggttcaggccctctcaatgagaggtaataccctactcctgtttggggatttgaatccgccgagtgtgtattgatctgacgatcaggttgtctcatctgccccctagagggcctcctgcccaccttatataggacggggagcaggattacaagatagaaaccttaaccaatacggtatcggtttcctaaatctactttacaatattatcaaaccaggactttaggccgttccgtaatatacaaggaaacataacacccaagtcatgatctgttacatattacatagatataagttatcccctataactagtcggataaccatgccgtgtgggtatggggtacccataatctccacaggtctctctatgttcttatccttaaaaaaaatcaatgatagtttctagatatgaacgtggataaccatacttgtctgatttatagttaggaattgacttttttttaagaatgtgtaggttgatacttgataacttgtatctttcctctctcttttttactttgtgataaacactagttttgtgtgcgaattgcaattaatagtgttgagaaatgtggacaatgtgaactgggtcatggataaatttgattcaagatcacaggattaatgtcatcatagtgttagaatgtggtgtgtggtccagtacttaaaaatgggcgtaatttcccgctatcggcttggcttatgggtgtggcactattaaattatgtcgttatacggcggcaattaattccctatataagcgcctatatagtaggctctaaacgcatcatcctacaccctcacctcttcctcttgctgcctcaccggcattctcctctcctgcaagatccctcgttcctctcctttcatcctcctcactttttgtacattgttcattcaaatcaataccatatgaatcatcttttgttgttaaaagggtgctaccggtgggtggtttattttatcccagtgtgcactcatcgggtgctcaaattaaatttaacatgtgacaagatgcaaagaggacatgcaagcttagctccccatcatccatcaacaaatgcaagtgcatggtatggatctcaacataactgaggaaaacacaatttattcgattttgacttgcttgttttcatatagagggatttataaaaatttactacctccattctaaaataggttcactcttattctctagcatttatccccaaataagtaatttatatcgcctacgtaccctcgaccataaatctaggagttctatcattacctcttatctatctaccaaccaacagtattctattaatgagggtcaccttgttttttttttctcttcatactaattttgaatcataatgattagaaattaatttattttggatcaggggtggtagtattgactattgtttggtttcaatttcgttcctactcatgaaataaactttcaagatcatcttctatgtttttttacgggacttgttcctatatctttttgtccataaaaattacatcttcaattttatgaaatcaaactccatatgtacaataacacgatctatctattctgcgtataaccacaaatttgttcaacaactatcaaaataataatatagcaaaatgatagttgcaatggtactattgtaggtttatctctgcatatctcttacattaaataagtacatatcttatcttatcttatcttctaaggtgtgatttggtttgaatttattctacagttaattttcaatatacatctattgctatgtatcgcagttaaatgatactaggatgacaaccaaccatgtcataaataagagtaactgaagttgctaatgtctactggctagaataaacgaatatatatatctttttgaatttaaccttaatagcagtagacacctaaaaacaaacgataaattaatacaaactttttgtcacatacatgcattgtcctaccaattttactttgattctaaaaacttcgcgcaacatgaccaacttaattacaccaaactgtagaggtgcgggccaagaacaatgtatatgcagtattctttttctcaagaattaacaaagctttatattgttttgttttgtacccctctttattgtctcactcctagcttttactagtccctttttttttgtggagttagcatatttctttcttgcttaaattaagtacaaacgaccaaaccactttgatgttttgtggtgtgggggttttctcggcaagacccagcgtagcatgcttgaatgaagtcatatggtgtttggtacagtagatggtgatatggtgtatttttctgtttaagtgtattaaaaattatgtgtataatattttgttttaaatttgatagtagtatgtaatgtgcatgttaattgagttgaattctatgcaaaccttctgttttttttattctgtgtttcatttgtttatagatctttaatagtttgggctggcaagttgcatccagcagaaacttctgttccttcggtgtttcctgccatcacctcttccatcttcattgccaccccatgttatatatgtttgcaccttggccccccttccttagcgtcaatgtccctgctttgttttcgatccttgagtattgcctgacaaaggttaccaaccttcactctcttatttctcgtgcgcacgctttccaaactactaaacaatatattttgattaaaaaatttataaaaaaagttactgtagaaaattacactaatctatttttaagttttttaactaatacttaattaatcatgtgttaatccatcctttcattttacatgcggaaggtgctctgttaaagaagtgttgccaatgtacttatcagctccatttcctagtactcacttagtcatggaggcagctgtactatgaaagggatgaagtgaaagtggatgaaagcttgccctagtgacgggggaggggggagctagcgggtgcgggtgttgatggggaagacggaaaagggatggctggaaagcaaaagatttgaagcaccatgctgtcttagagcaactccaacaatctatctatctggtttggatcggtaaaaaaaaacaaaacgagtcaaaaccggggtccagcacactcggtatctcgctccgctcgcgatcccgttcggcatccgtcacccctcgtcctgcatatttgcaatgaccatcccgctcgcaatcgcctctctcccgcgcacgcgctcgtttcccgcccgcgcgctcccgcccaatcggtcccgccgcctcgccctcccgccgtgctacgccgtcgcacctgtcccgccgtcccgcgccctcgccgtcccgcgccgtcgtcggtcccgccgtctagcgcccccgcccttccgccgtcgcgccgctccggccccggccttcgtctcgccatgtggaggccgctgcgtcctgcttcaacggcggctagggacttggatcaggatgctcatcgcccggaatgggacttggatcagtcgggtattggatcgatgcgccatcgggtggttcctccaataggcgtcgatggttggaaggcacaaggtctgttcatcggtgagcaagtcaccgatgaggaggtctgcacaggtgagactcactatctacgtctgtcaaaccctttgctgttagttggatgactagatcacaggaagtttagctcgttatgtattctacctgaggattttgggattgcattcatgttggttgtaggtttctggaaataaaattgatgtctttcttcgcacctgaccagagtagctacttgttagtacagtacatttgaatgaaagattcatccagatcaaattgcttcttctttgcaagtaaataaacaggacctaccctgagtctcgttttgctataaatcttccatcctgcattcacatcacaataatttccacaaaataagatagtttacaattgcaagagagtaggtaaattaaaaggataatactctgttatttacattgctgcaaatgtccacattgcatataattttattcagctcgatagtagttacattactacaattgtctggtttgcatatcatgttattcagccagagttcccatgcaaatcttgagcttcccatgccctgaaatgctgaatggaaccagtggtgtagttgctttccctattgccggcttacagtcctacatgatgtttattctccatttattttcctgtgacagatggtacgcaatcagtttatttcactgacctcctagtaaatgatgttgatgaatctcaatttgccgcacctactagtgatccaatctccaatggagctccaacagctgccaagatttctcagggtaggaccaaaaatttcactactcaggaggacatccttcttgtgtcagcttggctgaatgtgggcatggatcctattcaaggagtagatcaatcacaaggcacatattgggcaagaatacatgaatatttccatgccaacaaagagtttgagtcaacgcgttctgaatcctctttattgaatcgttggtccgcaatacaacatgatgtgaatattttctgtggatgtatgtccagaatagaggctaggaaccagagtggttccagagttgatgacaaggtaaacacattatttttgtggtatgattatttgtcgcagtttttagttctcatgtttattttggtttcaaatgtgcagatcgcaaatgcatgtgaattgtttaaggaggaagacaagaagcataggaagtttaacttgatgcattgctggaatatcctgaaggacaagcccaagtggatggacaatcggaagaaagttggatgtgccaaaaaaccaagcaataagaaacagaagacagtggcaaattcaagtcctacatcagttgaacctgctgatcttgatgtctattgttctgatgctcaaccatctgtaagaccggatggaaagaaggcggcaaaacagaagctacgacagggtagaaccatagaagcagtggactatctgatggaaaagaagaaagaagctgatgttgtgagagagttgaagaaagaagagatgtgcaagaaagcctttgctctgcaggaagagaggtgcaagagagcctttgctctgcaggaagaacggaacaaattggagagagaaaagtttgagttccagaagaaagaagctgagaaggctgagaaggtggaagaggagagaattctaggtttggatttgagcacaatgaactaaaatcagcagaaatattatgaatggcgtcagaacgagattctcgctcgacgttgcaatatctagaagttcagctcgtagcgtagttcagtttctgaatgttcagcgtccagtgtctgtgtgttcagttctgttctaaatgtttagacttcagagtctgtgttcagttctgttctaaatgttcagacttcagagtctagagtctgtgtcgaagttcagtgtctatgtgtgtggcagtatgtgtgatatagtatggtcctaatttcagacggacaacattatgtgtgcggcagtttatgtttgaacttcagtttcagggtcatgctattatccctgcttcattatcctgcaccctttcatttccttggtctgccatcgataaatacaggttataaaaaataacattgtacaagccaatatgtccaaagctgccaaaaaaatttcatagaattgcacagcctttatgcatatgatacgtcctctttttctaaatgtccaaactgggacttacaaaatgcaaagcatatttcaaataaaaagttttcagatgttttatgttctgcgtctagagaatgataagaatcaatagggataaacctcttttggacaacaatctcataaatgggacgcattaatctatatgatataaatctccatggttttgccacaagtgctcgatgaggtctacctgaagctgagtgtgggtttccttgttcttcattttttttttgtaattctgaatgaaagcttatagttcaggtgtgtcacgccctgaactagccccgaacggaaccagcccgtgacgctccaaattaacctgttaaccgataccagtcccaggaaatagagctggtatcataggaagacagaatatcacagcaacagaggtctctttattatagagtaggagtacagtcatgttgggctgcggacagaccccgagctcacaactgcattacaaaagaggaaagcggaagccaagacttggacctaacatcacaggcgcgacttgggaaccagatcgaaaccctataactcatcatagccgacttgttcctggaagaactcctcgtcagcgggatccatctcatcttcttcagccactggggaggattatttatatagagcaagggtgagtacaggagtactcagcaagtcatggcaattatgtgtttaatgaaggcttcaaaggaaaggctgttgtttttacaattgattttttagttaaactcctttttaaaacaactaagtgagtgcttctcaaacgacacggatgagacagtgcatctcgtccgatcggagtatgtgcaatgtatcagtctttgattgattcaagattggcacccggccacaactttcaaacggccagccgggcctagctgatcccgtcagctacagatgttccaaacatcgaacccaaattcccaacataattcaccaagcagtagtcgaacaaaactacgctaaggaatcaccttacatccgcccatgaccgtgggcacggctgttcgaacagtttaataacctctgcagagggggcacactttacccacacgacattactaacccggatcacccagcccgtggagaacagccacgtctggtgaccttaaggctttcatggcaatgcatttcgagagctggtacaggtttaccatatgccgacgagaggggtcgcagaccaacaacaggttaggtcccagaccatactgtgccaggaagcccaggggtcctccccgacaccaccctggcgaatccacttgtcttactctttaaaaattcataactaattcatcttagctcggatttagttggttcaagtctctaattttttctaaaattgagatctacatgttaaaaatatccacatgtactgttcatgcttgtttatgtgctgttttggtgattttgctcttttctctttagattccgacgtttccggagagtctgagtttgcaggagaagattttgaagagttccaaggccagcaaggcaagtcgcacagatcccaaacaaccctttgagcatgttgatcccgtttaaagctattgtttctattcaactattgcaattattttcgaatgtcattgggtggaattaacctattgtttgttatagcccttttgttcttgattactttattccttgataccttgggttattataacttgactagttgggctttatatattggttcagctagatattagatatgattgcttagccatgcttagaaacattagcacactattgagataatttatgactcactattatttaatgatggcttaatgatagctcatgatggttaatcatgattggttaattaattaatttgccaactaaaacctgataatggtgggttgtgagcacatggttttgatggtcgtgctcatgacaattaaggaccggttcacgagttttggttgtgaaacattaaccgtgccaaccacaagccagcgtgggcaacggctttaccttttgtatagcatggttcattgcggggcaccagactgagaagtggcgaagataagcccacgggagttgctggggagtccatgccttgtttataagggggtgattatgatccaggaacggtgcgctgtggtggattgtgttgtgcgaggggtactgtcacagctcctttccgaggtaccgtggtggtattgaggcgcatggtgacatgttgtggggctgtgtcttgtgggtacagtggtacacctctggccagagtaaaactattcgaatagccgtgcccgcggttatgggcgggtctaacaatgtctttcgtgattagtttcacacttctcaccataataaaagatgctataactggtaataatttgattagctcttggtttggaatggtacattcctggtttggagatagaactgtgcagccgggatggttgttcagaatggttgggcctatacaacagggtatgttgtatagcgttggattaatattgtttaattactacttaactattttattaaattctaaaatgtttattaaatgatgtttatgcaaatgaaaccctactatgccatcctttgttatcctgtgcacttgcatatttgctgcgtggcttgctgagtatgtcatatactcaccttgtaatcattcatcagcggaggagttctacagtgatgctgatggtgtggaggattaggtgtagccctggtcgagctgcctgtggagtggagtcgtctgcgccgtttatcttatttttccgctgcttagatctttattgattgagaggaactatctacctctgtaatgacattttattcgcttattaattagagtaataattgtactctattatcaatttgttattgtgtgcctcggctgattcctggacgagggttcacacacatgtaagcgtttggaattttggatagaaattccgggcgtgacagtagtcgaagcggaacactgtggaagagccaacaacacgcttccgtgcagtgcggatgaagcgtgggccacggtggaaggaagcaactggagtgtgtccgggggtgtaggagggactaactgggtgtgggtagggagagtacactggtgagtacggcgcacgcgagctaggggagcgcgggccactgggagtgcgagcagagccgcgggagctgtgggaagacaggtggctggcgtggcagaggcggctggagtcccaagaggtagtgtcaactgaggtgacaccctcctcggccaggcgggcctcaagtgcagcgtagcggcgtgcaagggagcggtaagcctcaaggagtaggtcgtgctaagtggcctgagcctcagaaagctcaaccatgcgagtcagcacgggctgagactcgcggtacagacaagggtacctggtgtcagtgcggcctgaaggaagccgtggaagctgccgaaagacggagcccccgaggcggtggctgtagtcgtgggccaaacgatgaatcgccgtccaggagaggtcctggtacgcgatctggagagtgggcctggccacattgaagtggtgtgggcgaaggccagccccgtgtatacctccacgagggtaaaggtacaccgaaagctcacaacgaggggggacacggtccacagagtaccccgtgtactcgggacacgagaagccaaggaagcgggtgaggtcacgaagctgagcgacgtggtgaccatcaccaaagccgtgggaactgaagctggcgttcactgccatctacaattttgaaacagggagaaaagatcagtaaccattttagaaataaactactgaaagaaaggaaacaaaagaagccttagctttttgcaagtatttttgaacttagcatccttagagtcgtcctaaacgttgggtttcgctatagggccaagcctgtgctctgataccatcttttgtcacaccccgaactagccccgaacggaaccagcccgtgacgctccaaattaacctgttaaccgataccagtcccaggaaatagagctggtatcacaggaagacagaatatcacagtaacagaggtctctttattatagagtaggagtacagtcatgttgggctgcggacagaccccgagctcacaactgcatcacaaaagaggaaagcggaagccaagacttggacctaacatcacaggcgcgacttgggaaccagatcgaaaccctaaaactcatcatagccgacttgctcctggaagaactcctcgtcagcggggtccatctcatcttctttagccactggggggaggattatttatatagagcataggtgagtacaggtgtactcagcaagtcatggaaattatgtgtttaatgaaggcttcaaaggaaaggctgttgtttttacaattgatttttagttaaactcctttttaaaacaactaagtgagtgcttctcaaatgatacggatgagacagtgcatctcgtccggtcggagtatgtgcaatgtatcagtctttgattgattcaagattggcacccggccacaactttcaaacggccagccgggcctagctgatcccatcggctacaaatgttccaaacatcgaacccgaattcccaacagcaatttcaccaagcagtagtcgaacaaaactacgctaaggaatcaccttacatccgcccatgaccgtggccacggctgttcgaacagtttaataacctctgtagagggggcacactttacccacacgacattactaacccggatcacctagcccgtggagaacagccacgtctggtgaccttaaggctttcatgacaaggcattttgagagccgacacaggtttaccatatgccgacgagaggggtcgcagaccaacaacaggttaggtcccagaccatactgtgccaggaagcccagggctcctccccgacaccaccctggtgaatccacttgtctcccggcatcaaggctcccctgattagctaattactcagccaggggtgtcccattccatccatgtggtcgtacttgttatatgttcggatgaaattctaaaggaataggtccttaagtgcaagagcgggaaaccgtgctcccgacacgtcccccggtctgtgatttttggaaattcatttagttcgcaagcaccgacccaggcgtcgggtttttccaagtcttttgtaaaacccaagttttacccattgttggatattttaaatttgaggggaggactccaatgtgcgtgcccgaaggcccatcgaagtacaacagtcgacaaaggaggtttaagtgttcaataattcaaggagggtaattgcagcaattaggattggggccggtaggctatctcgcaagccgcggccaaatttcttgtgttaatcctatccatgcattatttgcggaaaagaaatacttatatttaaattttaggtgcaagatgatcaaaggtgacttgccttgctcgagatcttgagcttgatcctcgaaatccgcgcactccgagtcttcgggctccgaagctacacgcgaacgagacgactcaacaaacggcaaaattaaagccctattattgacctctaagcgtgccattgggtagatctcgagatttgaggatttttggaagttgaacagagtcagatggatgtacggttgagaagatattgaatttctaagattattggatttttggtctaaaggaaaaaggatttaattaaaccctttgaaaaagaaaagaaagagggaggaggaacagacttccctcgggcggctagggtgcggcccgagagaaggggcgcggctcggccgagctaatgggccggccggcccgagaaggcgacccaaaggcacgcgcggggagagggggaggggaaccggtgggctgggtccacctcgcgtggtcccgagtaggacccgcttgtcggcggctcggctcaccgtgagcgaggtgcatgcggcgcggcgctagggttggggtgggtgcggtgcacgcgtgtggcttgcggtggacacggcgcgcaagtggcccacgcgtagcctatcggctctccgtgggccgcgcgcacgcgagcggggatggaggaagcggctgaacggggtcggcttgacccggtccggccgagctagcgccgacgtggcgccttcgtggctgccacgcgggccggcgggaggaagacgaaggcgccgaccgcgaatggacggcgggcggcggcggtttctccgggacgccgtgcgatgacgagggtgacggggtgtacaccggaatgacaaggggaaaagagagggagcgagccaacggctcggattcgccggagggagctcgacggcggcggattgctgcggcggcaaccggcggcgagaaagggggaaatcggcgacagcgtgacgggagatcgattcgggcgagctagagcatctacgcgactccgggaatccgtttctagcgtcggattggacggaacatcgccgacgaaggccggcgacgggcggctactaccgagcgcggcggtgacggcggcgagcctactgcgagcggcggcagcagtcggagcggcacaggctagctacggggaggctacacaagctactgctcgagtctaaggggaggaggaagagcgaggagggagaacggggggggtgttctaccgagacgagacggggtgctgtgacgagaggccgacggcatgggagtgatctctccggcctcgggccggggaagaggaagaagatgagcgcccggagtccccttccgatcctagcgcgcaccggctcctccagtgcacgcgacggcgaagggcgacggcgaacagggcacggggcgaggcgacaatggcggaaggcgaaagcgagggagatgggtttgggggaggggatcgggtttatagggcggctatgtcggttcagaaaccgaccttgggcggtcaagccagcgagctagcgccccggctagcggccaaaacggcgacagggaggatgacgccggcggtggaagagaaaagggaaaaaggaagaaagaaagggggcttgccccttgcttctttgggaaaagaaggagggagagagggcgacgaggcaggaggaggaggagctctgcctccatcccttggaagctagcgcgcggagtggcggggccgggtcgatgacgacggcgatgatggtggggcggtttggaagggcgcggctacagggcggcagatgcgggctcaggcgcggaaggcgctgacaacggcggcggcgacttgccggtcggccacctcggcgcgcgcgcacgggaagcaatgggtggtgcggcgatttgagcagcgtcggcgggaagcggcaacgagagcagagagggagggagaagtgaaagagagagagcgagctctctctctctctcgctcagcgcccaagcggcgcacgttcctcacacgtgcgggcaaggatggaggggagaggagagttgggctgaggaggaaatgggccggggagaagagatcggcccacgaactcgagggaggcaaaatagacttttcgagaggatttgatttgggatggatttgagattagggtttggatttcgacgatggattggagaattgagatctggaatggcacggacactagacaacaaacaaggagacaattttcgcatttaggatttttaagagatagttttcccactaggcgccacgacggaacggacgctacaaggtgcatcatcatgggacactgacaccctttctcccatgtcgtcgtagttgcaaacatattggcctttattgttgaagttgtattcgtagtcatctcgctcatcttcaacaatcatgttatgcataatgatgcaagccatcattatatcatggagcgtgtcttcatcccacatacgagccgccccacgaacaattgcaaagcaagattgtagaaccccaaatgccctttcaacatcctttcgacaagcttctcgtgcctttgcaaagtattttttcttattaccttgtggctctggaatggtcttcacaaaagttgcccacgatggatatatcccatctgcaagataataacccatcgaatattcatgaccattgatgtcaaaattaacttgtggaccttctccctcagcgagccttgcaaatatatctgatcgttgaagcacattaatgtcattgtgtgaacctggcatgccaaagaatgcatgccatatccatagatctttagatgcaactgcttccagtataattgtaggctcctttttatagcccctatacatcccgtgccatgcagtaggacaattcttctagctccaatgcatacaatctatggaacctagcataccaggaaatcctctgctcgctccaattgtaagtaacctagcagcatcctgttcattaggcttcctcatgtactctggcccaaaaacctcaacaactgctgcaacaaactttctcaaagcttctagagcggtgctctcaccaatacgaatgtactcgtccaaagcatcagctggtactccataagccaacatacggaaagccgctactaccttctgcagacaagataatccgagcacaccggctgcattcctcttctgcttaaaataatcgtcatgttcctcaacagctttcattatgcgaagaaatacatgaagcctcatccgaaacctatatcatgatgcaattaaattaaattagcaatactataaaacacggcacataaaaattacataaacattatagagaacatgcgaacctgcgtctaaagatgtttggtccaaacgttggattatctgagaaatagtctttgtaaagaagattgtgccacaatagtctatcccgatgcactacctcatgtccctgaacagatccaattcgacccagattatttactgattcctcaatgatcatttacgcagcaccaaaaaatagatcatgctcctcattcgacgaagagggatcaatcaattcgttcattacgaactcattaaattcatcatcagactccataccctgcacgcaagagtgatcaatttctactgatgttaattgaattcacgcaagattgcagtaccaatcttcctctacatggcgatagtgcacgcacctgttggatgagtggccggcggcggcgtgatgacgcaacaaggaggcgcgcggcatgcataaacgatctgccgccggcgacgcggtgcaacgagaggcagcgacgtgcagaaggaagcagccggctgtgaacgacgtccaagcgatggccggaaaccagcggcggcagcggagaaacgagaagtcgcggagtcaaccggtccggaagaacgggagccgtgacgtggacccttttgaatatggagagtcaatatttagctaggctgttggttttacccctctgtttgggatcttttttcctttttacagacctctttactctctaaacttagctaatcatatacataatctcttggagttgcaaataggttgtaagaagaatgcccccacgatgaccttggtccacacagagttatttttccctttgacagaagctgaatatcatggcatagcatcctactatttccaggatgaactgacaaatgccggtgtattcgaagggcgtacttgcgcaactgatgcaggccagtagtttggcagcttctaaaattttgttcattctgctagtgcatcaaaggaggttgcgttttcttctcaaacattgttagtgatctgcaacagactttgggttcacacgatagggctgaagtgttcgtacaggggtgtcatttctgatcatcaatatggcatgagtcattttacacatgttctttcttctgttttattcgatagcttacactcatacaatttagttttggaaagaattaatatataacctgttgcatgctcatgattctctcataaaaaatatgtgcccataagtagcgaaagaactcctctacacattatcttcctaacttgttcacatgtaaatgccatcctacaagttggccaaaatggacaatgtcggtcatgggcctcacctttttaagtacttcatgacaagaaacaagatacccaatatagcaccgtgcactttgtttctgtgctcctcagatagctattcgattcttggaaatccttaggctacccaccatagtaacataaaatcctacataatttcatggctaggattctttatctaatcaatttggtggttcttttccttggctttaatctgcacagagctctctcatggaggaaccaaagttacatgaatgatatcgctgatcgatgtgccccttcaccccatcctttaagtatgtgccagtcacgagcagcagcttttggctatccatgtgaagaatacaaggtacgactacatcttagtcctgtatggttcgcttctgtaagaaaaaactcatttttataaagtatacggcatgacttgcaggtcacaacagaagatggctacattcttagtttaaagaggattccccatggtcctcatgactctaacacctcgactgagatgaggccaccggtactgcttttccatggacttatggtggtaaggacattgttgtaccaatcttgtgccatctgtgctctcatcatacctgaatcaagtgtgttgtttggacaggatggtgctacttgggtaatgagtactccaaaacaatcacttggatttattttggcagacaatggatttgatgtttggattgccaatagtcgtggaacaaattccagccggaaccatacctcactctccacaaaagatccggttctcatctcaagctttatcaagatttaatttgccatagaattatactaaaagcatgttgggtactcttttcaggcttactgggaatggtcgtgggacgaacttgcttcctacgatcttcctgcagtgctgcagtttgcctatgatcacacaggcgagaaaatccactatatcggtcactccctggtgagctcatatgtgccacttgaaaatgtcaattactagacacttctgccttttcagtgatgctgtaaaaaaaattgctacttgcatttttctagggaaccttgatgattcttgcagccttctctgagcacaagttactagatgtagtgcgatcagctgttttgctctgcccaatagcttatctgagcaggacgaaatccaaactccttaagcttgctgctcacatcttccttgcagaagtaaaatgctgtaaactttcttgttcttattgttactggcagatcatggttgattctatttatctctttgtttgtcttgtgcagacagttcactggctaggcttttacgagttcaatcctgttgggtaggcacttccacaaaacttctaatgtacttgaaaaaaaaaatcagtaaatgtacttcaatgccaagttcttgcttgtagtttttgcatatcacagcaactctattaattaccagtagagatgcccatacttgtaactcataacgtgactatcgtatcatggaacgatgtgtcactgtcaccaaatttgctattgctatatagggatagtctacagtttatactggtattttggataactaggcccaaatgtgattgtgcttacttaaagccgtaagcattgactactatgggtgtcctgctgcatgacaggccagttgcacatgaagttctaagccaaatatgcggcgatcctgaaattaattgctatgatctattttcggctgtagcaggtattttttttctttcctccaatttaccacgccctaaacaatatgtgatattaagctcatcctagtaacaccaattgcatggatttgattttgtgactgaaggaccagattgctgcctcaatacttcaaccttttgtgcctttctagagcatgctccacagtctacctccgtcagaaacctcgttcacttgtcgcagcgtaagaacctcttatcagaaatatttttaaggatgttattcttcaaacctctgtcacatcactcactcttctatttcctgatctaccttccaaaacagtggtaagaaatggaggtgtcagcaggttcgactacggcaacgccaaggataacatgaagcattacaaccagccacgcccaccgccgtacaacctctcctccattccgaatcatgtccccatcttcctcacccatggtggcgaggactacctcggcgatgtccccgacacaaggcacctcctgaggacgctggtcaagaagcacaacagcgacagcatcgaggtgatctacgtgccagactacgcgcatgccgactttatcatggcctacaatgctccagaactcatatacggaccgatggtcgacttctttaagcgtcactgaaaccagatccaccagatttcaccattggctgtatgcattgccaaagtagcagctgtatgacaagtttcagcattgaagatttcagtctcactgagcttgcatccatcagtacatctttgtcatgtcaaagtatatatgtcagttccaccatgctagataacacgaaaataaaggatttgataaattgttactcgatctcgttgtaatcacaatgttcttgattcactggtctcttgcaaaaaatgaatatggccaacctaatttgtttttgtaccattaattcttattttctattgtctatcagatctattgcttctagcaacaaatccaatcagatgtgttgtgatgttgatagttgagatgctgccatcaaaaagagatggagtatctgaattgggcgctacagccgccagaattgctaggaggtcccaggtgtcccaactcccaattgtccggattttccttttcccttccaactattttggtagaaaatcacatgaatgatgaatcgtcattggtttttttcccccttgatttctagcggcaaccgtcactgccgctgagctgaatggtggtaatttgcgtgacttagctttgatgggatgtgatgagatatttgacagctttgaggtcatggagatgcacgcgattcaacttggctacctgccatttcatacctttgtgaggtttataataggttactggcatactcgctccgtcccaaaataactcgacctagaatgggtcacaggttaatttattttgggatggagggagatattattgagctgaaatgtagaattacttatatagatagatgatttttatttcttgcatatccagtgccaccaaaggaaagaagaggttggtagctttatatggaaacaagacaacaaagtaaaattgtatactagtatgtttttcctctttagatgtatgacagagagccagagctttcttgcaaataaaaaagaaaaggaaaaaggagtttttaccccaaaaagaaaaggtcagagggagacccaaattaactgaacttattttatttccagattttttttcctttttattcatgtcctcctttgtgctgccaagggttgccaagaacttggcagcaaactgagccagatgttcatgtggctctctctatttgcctccagggaattatgtgtcatatctggctgcaaatcagggacaggaaaaaggctttgacaagtgcttggcgttgacattgttatctttttcggcaataatgctctagtcaaataattctagacaggttaatttgtatataaaatatcaaattattgagaagagtccaagtctcttgctcctgttgagtttctctttagtctcttcccttcaatgaaaagagcctgacattttctcctcaattagtacagtactctgataacacagagtagctgtgataaaaaggccaatgtattaattgacaggttcttatcagataagcaaacacatgagtacatgacctataggagaaccaagagtccaaacaaaaaaaggccaagtgatcaaggtgacttggcttccatgtttcatcaatcaaacagcacaaaagggaatgaaaagaacttgccaattctttacttttagaccatgtgtgactcagcatcatctgttcttgtcccttcaggagccaaagaactacagtactactaccatcacttggaagcgtagcgacagctttccgagttcaattaggattaactaatcacttgattaaggaatctttttttaagtaaacctgattaattaaagaatctggagccacactaccacctggagatatcaaccgcggtttctgacgacacgtcgtgccggatccagaaccttgtacctgcaatgatgaatgcaatcatcagatgcagcaaaagaccaaccgtttcgctcatagctgattataaatcatactatttattagcatcagataataataatttatataattagaattttcatgcgttcttagcgattgaaaagctaatattaaaaaagaaactatgatataaaaatgtgaaaatcaactcgaaaattaagttttgaaatttatattatggataagttttttctgaattgttatccggtcgctttctgatcatctggttagattagatcacaggcaggaggatatggcttgctgatggccagctagcccagcagatgagcagggtgtgtggttatgtgtgaggaatcaggctggatcacatggatgattggtcgtgatcccggtggtttactgctaatcatctcacttggctagtcggcccgcgttcttcgccgcaccgtctgctgctccttgattttccttgcaaatcattgcatctggcgattataaatttgtaataattcgttagctcgtgaagcttcttgtcagaacttgttggaagaatactgtactgtactggcctaacacaactgtaacaactggttcctgagatatcttcccttctcttgatctggaagatatatcttctctgaatcacgatatgtgcctggtggtggatgattaccgcgcatacatgcagcttggaaataatctgcaattacgcgcgtttctgattcagttagtggcatatgaatccccctcggatcttgacagattcctgaacaataccgaaaacgaaaggaactgcataattgctccaagttatcacccccccccccctcctgtgaaatcgtgatcacgacatgcatatatacaacctatagctatcgtattttgtgacataaattatgaaacaaaccgaagagaaaaatgcagagaaaacgaagaacacaagaaaatgtaaacgtcatatgtgttggctgttctgcagagttgcaggcatatgctgctgttgttggcgagacgccgacgagaacttaacgcggccgctgtcgcggtaggtccggcgatcgatcagctggattttcttttttttttctttgttgcagttgccctccgccctctccgggatgccgttgatcaggtgacgcttgtcgattaccgcttgtgttgggcacaataatttctctgggtgagagcgagttctcgtgcttgatttggccataagtttccccctctttctgagattgttgttttttcccctcttttgtgatgcattgtaaattttacctttttcagatttttattactttctttttttcacttacatgcctattttttctcgattacatgaaaaacacgcatgtaaacagtatatgcgtgcactccacttctagcacgcatacacttttcatgaacatatttctaatctgttaggtaatgaaataaacattttggcctttgcttaatgagctgtagccaattattataaaatccacacatagaaacactcagcacgtactgacataacataaagtaaacacaaactaaaaaacaccaacacaagataaaaaaaaccataattacttaattctatttgtaaatctccatccgaagttagaaaaagatgcataatcattgattttaaatttatgatatgcatcatttattagcttattgtcgtcattatgcctttgtaagaacatatttctaattaggccacggagtaatctctggcctcgtctattaaacctatgttataatattttctagtaaaataatgttaaaaacatgcactgccccagcaccaaaacacgcgtgataatgctatattaggggatcctcctaagctacgttccaaactacggcttaactaggtactagtattggtagtataaaaaccttcaccctctggtcacgtaagcttccattcatcggcggaaacagggtaatggaaaaaccaattgcggctctacaaggtaacgtacgtcaaataaaatcaaagcctgtcattttcgcgccatcctaaaatttactgataagaaattgcaatttgtgtcctctccctgctggtgaagtagtaagcatccgaatcttgattttttttatttttttattttttgtacttttaaaattttaaattctaaaagtaaactttttccgaaacttattttccatttgaactttttaggaatgttagtcatactatagtgacgaaacaacactatcacgttgatctacatgacgtgacaacgttattttgtcatgctggtctgactagcgtgatggtgtatttggccacaccatcctgattggcgtgactaaggccctatttgttttagcttagaattattataatctggattattagcaataatttggaacaaataggtagattattataatttataaactaggttagtataatctggtaatctcctctaaacgtactttttttcatattattgggtggttaaagacccactacccttaaaaacattatagaaattatccattgccattgaacctaacagcctgagcacatctgcttcctctctcctccagctgcgcgccgcatccgcttcctctctccccagtcgagcgcaaatccttccccaaacccttaaccctacgtgcgaatcattccccaagcccccaccctacgccccagctcatttcccaagccgtgtcgccgccgccttctcatcctcctcccctaagcccccaccctacgccccagctcctttcccaagccttgtcgccatcaccttctcatcctcctcccactcgccgtctcatccttctcccactttgcaatagctaagggcatccaaaataacttgggacattataggcattagcctttcaaacctaataattcatgcttccaataatcatataaacagataacttataagttattctactatagcttattacggagtataatctagcttattgtaatatgcctttacctcaataatctggattaatcaatcttaagttaaagcaaacaggacctaaaagatcaaggtttttaaaaaataagttttacaaaggtttatttttaaaatataaaatttaaaaagttcaaaaaaattataaaagttcccgaatctttcgctcgcctcccttgccggctcgccttgccgccctgcgcctcccccaccacacacctgcacgccacgccaccaggcccaccaccaccagatacccagatcccaggcacacgcaat

SEQ ID NO: 7749 - DNA, 18477 bp, Oryza sativa
ccatgtttctgccacctccacctattgttgatccagtgcagcagcagcggattcagcagacaccaccaatccagccggttgtgcaaccaatccaacaacaggtcgtacaaccagctcagcaaacaccaccaagccagcagcctctgcaaccaattcagcaaacaccaccaaggcagcagcctctgcagccgatccaacagactccattaaggcaacaaatcgttcagccgatttagcaccaggggtcaatgaacgcatcggctgggttcgcagcacctggtagttagcccatacaacaatttgtgaaccaagtcgtcccagaacatttggttcaccatgtacagccagacggcacagtaatgcctcaggttgttcctgagcacttggtgcgcaacatccaaccgaaccttcataattactaagggggtaacttgagttatcaatatcagcctccttccccgcaagcccaatatcagctagggggattggctcaaccccagttcgcatctcagcctccttccccgcaagcccaatatcagccagggggattggctcaaccccagttcgcatctcagtatggtcagtttgagcccatgcaacaacagccacaaggggcagctcagcaacgaccgtgggccgatgtgattgttgatgtaatgagagaacagtttgggcttaaaccaaaagagactggaagcttgtatcggcagccttaccctgagtagtttgagagagttcctcttcccaaccggtttaaagttccagatttctccaagttttcaggacaagagggcgtgtcgacttatgagcacattagtcgattccttgctcagtgtggtgaagcatcggctgtagacgctctgaaagttaggttattccggttatctctgtctggatcagcttttacttggttttcctctttgccatatgggtcgatcaatagttgggccgatttggagaagcaattccatagctatttctacagtggggttcatgagatgaagttgtcccacttgacagtgattaagcagcggcatgatgaacccgtgcacgagtatattcagaggttcagggagatgaggaacaaatgctttagtttgagtttaaatgatgctcagttagccgatttagccttccagggtatgattgctccaatcagggagaaattctcgtctgaagactttgatagcttatcatacagaaggtaaccttgcatgagcataggtcggcggaagtcaggaaaagctctaagaaggttaatcatgtttgtccgtatatgtatgggtcggatgatggggaagacgattctgaaatagctgcagccaaatgggtgaggagtaaaaaggtcataccatgccaatgggtaaaaattcctaaaaaagagaagtatgactttgatattaccaaagctgacaagatctttgatctactactccgagagaagcaaattcagcttcctgctggtcatacaatcccatcggctgaggaattgggcaaaaagaggtattgcaaatggcataattctggatctcattctactaatgattgcaaggtttttagacagcaaatccaggttgccactgaagggggaaagattaggttcgatgattccaaaaagccaatgaaagtcgatggtaatccttttcctgttaatatggtgcatacagctggccaaacagccgataggatccgtgcaaagggttttcaagtaaattcggctaagattatcaacaagtatcagaggaagtatgacaagtagcaggagaagcattatgaagaatacgacgatggttttgatcctcattggggttgtgagttctttagattcttctggaatgaagggatgaggttgccatctatcgaaaactgccctgggtgcagtgatatcatcgagagctcgagccggtcatataataagggtaatcggctaaggcaggcaagacttcctattcatcaaagattgggtccgatgaatcaagatcatggccaagaggatgaggtaatcaggaagaatcaatggtgtccttctggtattttcacaaaaaatcagaagagaagggttcaaagattgaggaacagggagcgccttcaggaggttgaacaagaaatcaaccatcggctgaggaaaccaaagccaagacaggagtggcgtgttaagaatcaggttcctgtagccgatgatgctgcagccgatgaggcgaagaggttggcaaaaggaaagagtgttgtagcggcaccaattaacatggtctttacattgccagctgaattcgggatagatcaagccgatgtcgatgaagtggaagaggaatcggctaagttggttctgtcaccagaataggcagtattcgagaaacccgagggaacatagaatcggcatcttaaaccattgtacataaacggctacgtcaatgggaaggcgatgtctaagatgatggtcgatggtggggccgcggtaaatttgatgccttatgctacgttcaggaagttggataggaacgccgaggatctcatcaagacaaatatggtgctcaaatactttggtggtaatccatcggaaaccaaaggtgttctaaatgtggagctgacagtcggcagtaagactattcctaccacgttttttgtcatcgatgggaagggttcgtgcagcttgttgcttggaagggattggattcacgccaattgttgcattccttcaactatgcatcaatgcttgattcaatggcaaggcgacaagatagagatcgtgccagtcgacaggtcagttaatgttgccagtgccgatttagccctttgggagatggatggccttgattgtttatctggaaaagtctgggatggagattttctaaaagtgtccgattctgatatacagccaattgaagatggagaacccaagctattactttgagggcgtcgtggagggttctaatgtctacaccaaggatacagtggatgatctcgatgacaagcaaggtcaaggtttcatgtcggccgatgagttggaagaaataaacataggtccaagcgatcggccaaggccgacatttattagcaagaatttgtctccagagtttagaaccaagctgatagagctcttaaaagagtttagagattgcttcgcttgggagtattatgagatgcctagactcagccgatcgattgtcgaacatcggctacctatcaagccaggggttagaccacgccagcaacctctgaggaggtgtaaagctgatatgcttgaacctgtcaaagctgagatcaaacgattgtatgatgctggttttatccgtccctgccgatatgctgaatgggtttctagtatagtttcagttattaaaaagaatggcaaggtcagggtgtgcattgattttcgagatttgaataaagccacaccaaaggactaatatccaatgccagtagctgatcagctagttgatgctgcatcaaggaacaaaattttgagttttatggatgggaacgcaggatataatcagatctttatggctgaagaagatatccataagacagcttttagatgccccggtgcaatcggcttatttgagtgggtcgtcatgactttcggtttgaagagtgctggagcaacatatcaaagagccatgaattatatatatcatgatctaatcagctggttggttgaagtttatattgacgatgtggttgttaagtctaaagaagtagaggaccacatagccgatttaaggaaggttttcgagagaaccaaaaaatatggcttgaagatgaatccgacaaaatgtgtttttggtgtgtcggccggccaatttttgggatttcttgttcatgaaagggggaccgaggtaactcaaaggagcgttaatgcgatcaagaagattcagcccctggaaaataagacagaactacaagagatgatcggcaagatttctaacttgtctggaaggttagagccttttacacccttgttaaggttgaaagccgatcagcagtttacttggggggcagagcaacaaaaggctttagataatattaaggagtatctcaactctcctcttgttttgatccctccacagaagggggtaccgtttaggttatatttatcggctggtgagaagtcaatcggctcagttttgattcaagagttggaagggaaggaacgagttgtattttatctcagtcgacggctcttggatgctgagactcggtattcccctgtggaaaagttatgcttgtgtctgtatttttcgtgtacaaggttgaggcattatctattatctaacgagtgcactgttatatgcaaagccgacgtagtcaggtatatgctatcggctccaatattaaagggaagagttggaaagtggatattctccttgactgagtttgatcttcggtatgagtcgccgaaagcgattaagggacaagctatagccgattttattgtagagcatcgtgatgattcaatcggctcggttgaaatagtgccatggactttattctttgatggatcggtatgtactcatagttgtggcatcggcttagttataatttcccctaggggggcatgtttcgagtttgcttatactattaaaccatatgcgaccaataatcaagctgagtatgaggcagtgctcaggggtttgcaattactcaaggaagttgaagccgataccattgaaatcatgggggattctttgctagtaatcagccaattggcaggagaatatgaatgcaagaacgatacattgatggtttataatgagaagtgccaggaactaatgaaagagtttcggctggttactttaaagcatgtatctcgagaacaaaatattgaagctaatgatttagcccaaggggcatcggggtataagccgatgatcaaagatgttaaagttgaaattgcagcgatgacagccgatgattggaggtaagatgtgcatcaatatttgagtaatccatctcaatcggcttctaggaaattaagatataaggcattaaagtatacactgttggatggtgaactttattatcagacgattgatggagtattacttaagtgcttaagtgccgatcaggctaaggttgcaatcggcaaagttcatgaaggaatctgtggtactcatcaatcagcttataagatgaagtggttgcttcggcgcgcagggtatttttggccaacaatgctggaagtttgtttcagatattataaggggtgtcaggattgtcagaagtttggagcaattcagcgagcgccagcgtcggctatgaatcctattattaagccatggccgttcagaggttggggaattgatatgatcggtatgataaacccaccatcgagtaaaggacataaatttatattggtggcaactgattatttcaccaagtgggtagaggcggttcctttgaagaaagttgattctggggatgccattcaatttgttcaggagtatataatctaccaatttggtcttcctcaaactattactacggatcagggttcaatcttcgtgtccgatgagtttgtttagcttgccgatagcgtcggtatcaaattgttgaattcttcaccttattatgcacaagctaatgggcaagccgaggcatctaataaaagtttgatcaaattgattaagcggaaaatttctgattatcctcggcaatggcatactcggttggccgaagcgttgtggtcttataggatggcttgtcatggatcaattcaagttcctccttacaaacttgtttatgggcatgaggctgttttgccatgggaggttagaatcggctctcgccgaactgagttacaaaacgatttaacagccgatgagtattacaaccttatggccgatgagagggaggatctggttcagtcacgattgcgagcccttgcgaaggttaccaaggataaggaacgtgttgctcggcattataataagaaagtggtacccaaagatttttcggaaggagaacttgtatggaagctgattttgcggattggtacttgtgatagtaaattcggcaagtggtcgccgaactgggaaggaccgttccaaattcataaggttgtgtctaagggagcatatatgttgcaagggcttgatggtgaagtctatgggcgagcactcaatggcaagtatttgaagaaatcttacccaagtgtttgggttaatgcatgataggctcgtattgccgatgcatgatagccgatgtgcttacatcgccttgagatggctgatattgttatatcgcccttagttgtttttcatggtgtaatcggttgtggtttgccgatgtacaatggccgatattcttatatcgcccttagttgtttttcatggtgtaatcggttgtggtttgccaatgtacaatggccgatattgttatatcgcccatagttgttttataattttatcaatgcttttgacattgtaaaattaggggggcacatatatgtcaaaatgcaatggaaaatttttgaacaagttttcaaagtcatattaatcggcacaaaggattgttaagacagtacagtattagaatgtcttagccgattacaaaaaattctaagtcctattacacaaaggttattgagacaagtatcgctggatagccaatatagccttctgcctaatctattctacttcttctatggcttgggcatcttgagcgtcggttccagggataactttcagagacttggtcagatcagcaacatgcttgatagccgatttgagtcttgctttctgttcttcaatagtatttgggagatcggctagttttttgtgctccatatccagctcagcgttgcattcttcaagttgtgctaagagttcaatcttgcgagcctcgagccgatcaatgttggacttgattgggccttcagatagttgatcaagcttggacttctcttcatgcacaagttgtcggttagcttggatagtagcttcaatgtccttgcgctctcgccgttcggccagtcttaacttggctttctccagtttgaattagtgttgctcaaggtaaacggctggggtaaggatatcggctaactcatctgggattagagcctgaatctcatgtagccgagccctgattgagccacaatcaaccaccaagctatctagtgatgatgcctctagccgatcagagatactttccagagttttcttcacatcatcagataaagaggctaaggctttgcttgtggtatcttcttctccttcatcaagataatctctgatgttaaaagagaaaagatcggctaatacctgcagcaacgatttagaagcagttagaggttaaataggcatagccgatctgaatgtttgttgagacaaagagaaacttactgggacagcaggagcagttggttgttcttcttcctcaacgtgatgactccccacagccgaaggagtctggtcacttgacgattgctgtacagaaggagaaggaggaggaggaggctaaaaggaaacaagtgttagacagagtcggctgagaattaactaatgaaagttaaaattatcttactggtggagctagtttagatgttgttgcagccgatttcttcttcactgcagtcttctttttctgcaattataaaacttggaagtgatcggctataagacaaaataattatgaaagggattaaagagagatacttacccttgtaaagtgaacgggggcagaaggagttgggggcgtttgcttgggtgaagccgatggtgttctttctgtgtcactcatttcggctacagcctggtcaacatcttcgccaatttcctcttcatctaaggcttgttcaataaatggatccaaggcgggcagatcatcagccggcttatcagtcggtttggttttcttgaacttggcctttttctttggagccaagaccaaggtattcacggctgatggtctggttttccttttttggcctgcatcggctagttccctagttaggccgtgaaggagagttgaagtcttgggggcatgatagccgataacagggggagatagcccacctccattcagaattaaacccgaagcatactcaatattcttgccactattactttgatgaggaggggaggactctgttgtctgcaaagcaggagcaaaagattggtcaagtaatgaatcggctaattgactatgcaatttagtaatgacaaagtttacctggggtatgacgtcggggaacagatctgtcatatacatcgtagccgattgatgaaacagatgcagcttccattcaccccaccatctgtcaaagtttttgcttctaaatcctgccaactcaatattttcaatgctgcccagaggaggcccaggtaggttaagtagccgatccatcattagagtggatgtgatttgtcctcggcactgaatcttgtcggcaaaaaataagccgattgggagttggcccaatccaagttgtctggccgagctcattgggtgataaaactcgtaggagtcttggatgtttctcccttgatgaatgccgacaggaaggatgcatgggttgattgcggctataaaaacttctctggatttttggaatttcttgtgattaatatcttcgaatctaaaatctgatggaagttcgaggtctgcggagtcttcataagggaaccagattcgtgcatctttcttaaaaccttcgtagaagctacagaaccagtccttaagcagctcggccgataactttgctcctgcatcggttggtgtggatgcatattctccatacgacatgcacctgcgatgggtgcgctcttctccgtcatcttccacgatcggccctggcagtgtgaattcagcttctgttatagagggccgattgacaaccttcataactatcaggtttaaccaagtttgcagcagccaccagggtccacctgctccaaccactgagccgacggctattctagccgatgcattgttcaacatctgatacagatagccgagaaggattttgcccaaagggaattctttctttgattctaaggcttcagctacgaactgccaattggttgtagggccacaactggatccacagaagaggaacttttccagccacatgagcaaaaaggctacgtgctctcgaggggtaacagatccttggcccatgtatgccgccacatagccgaaccaaccacctatgctcttggtcttcaagtcaaattggttcttgatatttatgctcatggggttagccgatgaagtcacatctaatccggtaatcatggtgatgtcgattaaagttggagtcatcggcccctggttgaataagaaagcgttgatggtgttcgaccagaagtaggtggcggcagccattagaggttcatccttagcagaattggctatggtgagagcaagtgcttggccgattccaatctcgtcccaatgaactttcttactagccgcgttgataccaagtagaccagctcttatcaggtgtgagtttttcgagagatggccaagacttaaaggtattcttccagtgacccaagttagggttggctagcctaaaagggatccggttggtttcaccaatgatgaaatcagtggggtcgagattgccgattgggccaaggaaatagtggttctggtgcaaaagactgggaattgcgacttggtgggagagatgctacaaatccaaggcaatcgatataaggaaaacgatataagataggagaaaatcgatctgctgataagaaaggggatctagccgatagagacttacctcagtgtactcggttgatggcgcatcagatgggttggtggaagacgacatcgttgcaagcggaggtcttgccggagaccaagtcgcccgggagtcgcttttgcatcggaggaatcgccggagagagaggggattaagattcgcttgaacggtgaaaacggaagtcacggtgtgagatttctcgagggtgacggttagtatttaaagcacggcaataacggtcggaaaacggcaaagtgcgaaacttcgtcggagtcgatttacagcaaatccgaaacatttccaaatattccggacttgggggcgtgtgttaacaaccaaatttggtaacatcggcattgggaaagaagattagatcgaagcaaagtcggaggcggagatcgagttcgaaaacagagcaggaatcggctggagtccagatcggctacgatgagatcggctgagtctgagacgggctaggtgagccgatgtagccgatcccgacaatacgacttgtatacgacatcgggtttaagttaatgtgcttcaagatgattgccatgcacggatagagtcctgggaaggcaattgtatctattaattaagatattttatgtaaattccttatagataaatgtgggcaaaagtctaccgcaaagacttatggtattttagggtttgttagatataatagtcgtgtccggtatgggtatatcttgtaattctcgggtataaatagaccccgagccctatgtaattgataacacacacgttcaatacaattttggcgcatcgccacccttttgctttagttttgtttcgacgagttcttactttcgggttgagctgcatcggattcgatcttcaacaagaggtaaaacttgttatgatgacttatattctcgggattagtgcttccatctttatgacactctaatcttgtttatgtaattcgtcgagttatcatatatcttacataatctctggcaatatcgctatctaatctactatcggctaacatctgttagcagagggcaaccgattaggttagattttgacgttgatctagattatataagatatctaccactctatgaaacttctagcggcttgattgtctagatatcgttcttcttttcatacttaatgctatatcagttgagtttgatctattaagtcgtgcttagaatatcgatctttagcctgccttctagttgctgattagagtagcgtcggagtttcagccgatcttatctgatttaactatatttgttctatatgcttcattgacatgttaaatctgtcctttatatcgagatattgttgtatctaagtatattaggcctttgtttgatatattatacctgctttaatttcctgatatagagtagtatcggagtattagccgatacatgctagatctatctgatcggctatgctataaacatatatagtcctgttattgatatatatatttcgatctaagtgatttatactgtctcggcatggtgaccgatctatcccgatcacttgatttaagtatacatcgatataaggggtatatatcgttgatatctacagctgatcgagtagatttagttctttcttacttattcatgactgccgaccgatacacagatgacatcagctcaaagataaatgatatgtcatcggcatctagccgatcggctatcatttatagttttaatcacggtttctttgcttctatttcttgttgattacaggatcaaatcaattggcacgctcatacattcgaaggcgagctttggacctgcactggagttaagaagatctcccaggccacgtgttttttgtcaacagatttatgctattcgtagcttacgcgtatcccatcatcagcctgtcacgggcgctggggtcgtcgcgctcgcggtggctgcacaccagagccgctgctatgattacccacgctagagtcgccacgcctctaggttcgggatttgacgctgctattaacgtgcgggaagaactcaagatggggaatatgaaccctagagcgagaggaactctcccttcccctcctattagtttgcaaccgcctggtcagcatgacaacatggcaaatacggtccagtcagtctgccacgtgtgcaaaacctcctcgtgaaacagcctagggggttaaatggactggattataaggtttggggggctagataccccattttatagttctgggtactatatagactcttgggcatagtctagggggatttggacttttttctatccagtaaaagtactacttagaatataaaaatgaggaggaagagtctcttttagtagaatttttactaagctattatgcaaattgaagcgcgggaggaaaggagctggctgtggctggggagggggcaagtgcgggtgctcgtgcgctcgcgtggtggtttggcccccttagtctctcatctctcctctctacacacacacgcacacacgcgcgcgcgcgcacacacacacacacacatatatatatatatatatatatatatatatatatatatatatatatatatatatatatatacactttatataaatacgtataaattttgtatatacgtacacaaattatatatacatatataaagtacgtacatatattgtaatatgtatatgtatatgttttttatatagatatgtttaatgtataaaaagatatatacacatgtataatgatttataggtgcgtataaaaactttgtatacgtacataatttaaaaacaaaataactgagagaaaagaaccaaaagaaaaacatatcacaaactttatatacatacacataaaagtttgtataggtatgtattaaaaaagggtgaattggaaccatctagagaaaaaaaaaagagtgagaaagctgaaaaaaaaatataaaaaaaagaccacgtgcctctttcccacgctccgcccccttctccgcgcaagccacgtgactgcgccattagatagcctttttgccaacctagtatttcctcagctgctcagctcgtcagttgtcctataccacgtaatattgaaggagggatgacctcgaagctaatgccatctggatcggtctcagcttctcgtgccgtcgtgtatgcttaattatgtggagtatcttttatgattatgcacgtgacaaaactatatgcaaaaacaaaagactatatctaacgaggagaataattttgacgagctaatagacagagagaacagtgaaaggttattaaaacttggccgacaggaagcacgtggcgccggtggtacgtccgacgaaaggacggtacccccggctcgcagttataaaactagcagtacaaggtctgctcatattgatacagcagctacacagctagcaccactaataacgagcaagctagtcgtcagtggcgaatctataacgaaaatataggggtgctcctttctaatgcgttttaggaagtatggatgaaagcttgcatgtcatctaaatagttctaattaatttgaaaaaaaataacaatatgtattgatatgaaatatattactccataagtatataacttctacgagttacaacaaaaataacaaattaaattgaaaatagttatcgtacattcacaattatatttattttttttgcaacatgtagaagttgaattttaactttcatgtttgtggagtgatatatttcacattaatcatttttttaattttttgatgattatttagatgacatgcacaaaacgatgtgatatcccctcgagggataaaaacgctttcccatgatggaagacaatacgacaagggcacaaccacaaattcaataacacaattgttgataattgttggattactttgtgagtaaaaaccactcacttccctaatcccctgatcgttccatccattgaagtaggaaaaaaaaaagaaacaaaaactaatacagtagcttaataaggaaggtctagcagccaattagtccacttaatcacccatggatcgcgatatgttgtctttgtttgctccttccttgcgacctggttgatctgcacttatgctatacgctgcttctctcccgaaaccatgcggctgctgctggttctgccgagatggagctggggctcaagccccaacgagccccaacgagccccaacggtgaatccgcccctgctagtcgtagctagctagcgagtgaatcagtggagtgacgagagatctcgcgatggcgaaggcggtggtgctgccgctggttagcaagcttcaggaggtggccctgagcgaggggagggcgctggttggcgtcggcggcgagatcaaccgcctccgcgacaagctcatgtggctgatggccttcctccaggaggcggacccccagaggcgggcggccgacgccggcggcgagctcatgcgcgtgctcgtgcaccagacccgcgacgccgcgttcagcgccgaggacgccctcgacgactacgccgtccgcgtcgacctgtcccgctaccccggctggtcgcgcgccgccgtcggcttcctcgccggcatcaccacccagctgcgcgtccgccacaggctctccagcgacatcgcggccatccatgcccgctttgaggagatcgtcggcaacaaggacaagtacaggctggagggctctgcgccctcgtcgttgctgacgtggactgcctccgccgcctcctcgagtgaatcaatcctctggttagtcaaacacagtccttacacgatcgaaacgctctattcacttcatacgtcctccttccatactcgtaaagaaaatcgacaatatttaacaatataaattataaataactcagtcaaatcttgagaatataaattataaataactcttaagttattgtgtttaaaaatataaaaattatataaatagatttgtcttgaaaaaaactttcataaaaagtatacatatatcatttttcaataaatatttttatagaaacaagaagtcaaaattatattttgaagaccgtgttaatatcctaaacgacttcctttacgagtacgaatagagtactcgtacggggatacaagcgagctaagcggcgaacccgcttataaacaaaactagtgcataacccacgaattgactcataggttaccttctaagggtttgttcggcacctccttttcccaacccctctatctcgttttccgcgcacacgcttttttaaactgctaaaaggtgtattttttgcaaaaaatttatatacaaaagttgctaaacggaggaagtactcggttaattataattacatgctaatgcttcatgtctttgtatacgccattcaaaattccagtgaaagattcatatctcggggctgtgtttttttgggaggttgggaaccctcccatctgcacggaaatcggagcgatagattaacacgtgattaattaagtattagctattaaaaacttgaaaaatggattaatatgatttttaaagcaactttccattataaacttttgcaaaatgcgtaccttttagcagtttaaaaagcgtgcacgcgataaataaggaagatgagttagagttcatgggaaagaacacagctaggcttttccttggtttcaacgattaggcttagattttcgacacgggcgtgaaacgtgaaaaaccgttagcatatactctatgctaattattgaaaaaccactagagtaactaatctagtagcattaatttttttaaacttgaaaaaagttatttatttgatttttaaagatactccatagaaaaattttacaagaaacatatcgtttaatagttagaagcgtgcttacgaagaatatgaaaagtttataagaactcacacaagagtggttttctggatggcatggtaatatatatgtagtgaaacgttttctttatttttgtaaatccaaataaaggaaattatctttagacagttttttccccaaatacagtatagaatctcatgtgtacacacagagcttatgatcacatacacgcaacctaccaagtatttctgagaaattgagctgtcatatacacttaaaatataataacccataaatactaacatatcagtattgagtcggttacaacaatgcatggtagatcatttgtgatcatatggacaaatttggtatgatttaaatagaaatatgtaaatatcatcagttcattttttttatattacatgaagtcatttctcacatgagaaaaacttatttcactatatacagatgttaacacagatactctatacagcaattgtgtgtatgttcataatgcatgtatatagaagtcagtactttaaaaaaattgagaagaagtcgcttactacttaattaagattccaaattaaagtggttttagcattgtcacgcattagtaaagctacagtaaaattgtgcaaagttaattaggctcccatcggatggcctaatcagctaaagaaaaaccaaattttaaatttcatacttaattttgagattgattttcagatgttttcaacgtagtttctttttcaaccttggcttttaaatcacccagaacacatatataaaagttttacctacaaattcatttgtattccctaataagccgttttggcttattagagaaaaagccaaacgatggggaccttagtttagtactcccatccgttcccaagtagttattattataaattgtttagcatatattaatgtgttgggcaagaaataaccatagtaccttaatatttgattcatgtgttgttgggagtgagagggtggttaaaggtaggaaggaaaaactatatattgaggataactgaggtaacaaaaattactctgaagtaagttactctaaagtgataagtctttttagataaattacgaatccttaaacgacgaccagctatataggacggaaagagtatgataaaaaacagacttgttccgttttaaacgaacgtcgataagacctctttaattaatttgtttttatatcgattcttttgaactttttcttctgcaaagcttccggaattattattcaatctcttgcggggaattattattcgatctcttgcggggtacgggttgtttgcgatttggctgcatcactccgttgactgaccacaaaagtctcgtcaaatcacgtgtctggccagtaaggggatagcacatacttgcattcaaataaccttgttattaagacaaaacgaaataggaaaacttgccacttggactaaatgatatgcaccacttgtacttaaaagaacgacttacgtacctttagtctcaaattaaactttggtttcttttatgtcatctattcttcaacaagcaacttataagaatattctaaacacaacatcatctaactatcgcaacagtacgcatgatttacacccctaaacttctatactgaatattttacaccctccaaattttcaaattgaacgaattaccctctaaccaagccaagagcagtttgatgccaagtgatatacgcgtggtaaccgagccaggggattttttttttcaagaaaagtttaactagcccacgtgtatattcttcctcccaatccacttcctttctttctcccctttctctatttcttgtctcagttgcttcgagcacatgcctagctgttaaaaaaccggtcccaaaatcaccattggaaaccgaacatggaagaaacgccataggagatcaagcacgatgagaacaacgagacacgatatttgttaacgaggttcagccgaagcctacatccccggggcgctgattacaagcgctatttcccgatccagcatattaaaacgtatcagagttacaacgaccctcggccggacgccgcaggcggccgctccctctcgctatattaagtcatcatatggttacaacaggtctgactctctatttaagagagatcttaagatagagtccgactcttactctagacctaatgcctattacaactccaattcttaaattgtaacctactttgtacacatattcgacacaaaacactaacaaattccacatcggtgaatatgccacgtcaacctgaatttgtcccatgtatgaacctctgcttacccagacttgagttggttcctttttgccgttcatgttgagccgcccccgacgaaccttcacccggctcccgttaacgagagaccttgctatccccgtaaattatctctcttgactccacccgcaacagggctccaccttctctcatatcactatagtcgtcttgccaagtgaaattaaatttcttcttagctggcacacagcagactccgcaaagaccttgttcaccttcactttccattttaagtttgagttgatctaatccatgatgtgataatacacgtatcaccaaaatagataaatcaaatacactagaaatgaagagaaccctttatgtatcctaaatatatcatgtactgtcaaacagtccgttgacactctcaatgatattcatctgctgctgcctgggtcctactcgcatgctgcttgacaggtcgagtctccctgcactgcttttctgcccgaaccaatactttgacttaatatgacaccgttgcatagccaatgcaagaaattccttacacatggtctgaattgtagcatgcgggattatgatgaagatacatgcatgcaaatgtatttaccgtccaggagtacaataattgtgttataatcctgaccaagtacctatgcgtgtaatattcttgcatgcagtgcagacacctcggt

SEQ ID NO: 7750 - DNA, 12479 bp, Oryza sativa
  unsure (1)..(12479): unsure at all n locations
tcctgcagcccttaaattactgctagaactttgtctcgcagtgtgattttcattaaaaggaaaagtatttacaaaagataattacaaagagagcactgaaaatattataatggttataaccaatcaaaaactctttactttaaatgatctttcattccgcacatatgcagaagaccttctttcttgaacaaaattctccaggcctcaaaggaagaattcttgttctgaaatatctttccatttctttctttctaaatatgccgggcagcaataaagaaatttccaagaagcccttttgccggaaacgcagtcacgctaccacaaccatttgaaagaaattgagattaggatcccaaagaatgcctaggtgccgtcaacatctctgactgaaaggacaaaagaagaaaagatgtcctcttatttccctatgaccatttgtacgaagtacacatgtaagatcatcatcctcctttgcacaatgccgatgattaagcatatctctagtgttcaacctgtcgctaaaaagaagtcatgcaaagaccttaattttcataacactacgtgttttccaaatccaaacataaggccttggcgtctgcaaagacatgaatataagcttgtaaaatctcttagcagtatatctagtagaattccatatgtagctccattcatctcccttgccctcgtccaaattgagaagagagacctcatgttccaatttgagatactccttgtaagcttgactgttcagaggcaaaagaaaacagtcctctaaggatagttactatagaccgatcatatttgtgctaatttcttttttttttcaccgatcctgaacaccaatatatattattgttctttgcacgtgatagttaaatctgattttttttagaggtgatatcacctaactatcacgttatagttaaatctgattttttttttgttagaggtgatatcacctaactagtacattcaaatccatacaatcaatcaaacaaaatatatttcaaaccgtatctcatatgtgtatctcatatgtaagtaatcaaacaaaatctcatactagtcacgctaaaccaatactcctttcattctaaaatataaggcataaacactaccaacatgaatacaaataaataatttaatcaccttatcggttagatcatatcgatgaatgcgtgcaatataattgaggtgcttgatggtaaatatatagatgcatatacgtttatattatgacacataaaaaatgattgtattttatatcttagaatagagggagcacaaggaaccaaacatatctccttatcgtgcccaacctcagcctggacgaaaaagatgggctagactaaggctgcgttctttgcatagcggtagaggaagatttacagctcacgcgaaacgcaaagcctattagcacataattaattaagtattaattattataaacttgaaaaaacaaattctatatagaaatttgctgcaaaatacgtatcatttaacaatttaaaaaacgtacttacgaaaaatgaggatgttgaaatttggagttgaagaagagagctgggtctaaggagataagcaactaaaacaaccttaagcggatcggagatgggaactaaaaactcacccatggggctggatgcaagtatagctcatcacaacacatgagcaaaacccattactaccacacattaaacaaaatgtaagcatcgcaattattagtatgcaagcatggcacatcaacctactaacacacaaaaacttaacatatactagcatgataattattagtacgtagtaaaacttaattgcaactagactactccctccatccctgtttacttgtcgctgggaatttaagtcattgtccatgtcgtgggcagctagtaggtgagccactagcatgaatagttttattaatttttttctccatgtttgttgcagacatgtaatggtaggcgtaatactagttttgtgtcaaattttaagcattgaaatgattaacataaaggcacattggtcatttttacaacactatattttgtcatttctatgctagaaagactactaaactgggataccatctacaaattataacatataaacatgctaaataattatttcttatataactcttataatatcttaatataaaacgatcctaatttttatatttgacatatattcatatataaatctgtaagtcctatagtaaagtagccgaatcctgattgccgctgcaacgaccgcgactcgactccgcgaggtgcgacgcgactgcgcgattcccctgagcgacgccgccctcatgccctcattcctcccgcgcgatgcgagcggctgctcgatggagataggcacctcgccaagctgatcgacgccgccgccgcctccgtgccgaccccgtacgtgagagctccaggcgctgttctccccgaggcgagagtagcccctggcgccacaacactgtccggcggccatggacgccgcgacaggaaccccggctgatcagagcccgaacgcgcccctgcctgtccgcgtcagtgaggatggcgtcgaggtgtcgcggccgctgacagcggtggcgtaggcaaggtgttcgacggaatgcgtcctggcttctgaggcgccatggctcgacgacgcgcgaggccggccgtgggcggacctcccggcggacatcctcggcctcgttgtcggctgcctccccctcgtcgaggaccgggccaggctgcgctccgtctgccgcgcgtggcgcgtcctccaccagcggtcgccgccgccgctgcccctgctcgtgatggccgacttctccttctccagcttctgcgcaggagagaccatcatgggagtgcgtggccgtgtcccgctgccggagagggagagggagatggcggctggtggcagcgtctgctgcgtgggctcgttcgagggatggctcgttggcgtcaaggccaacaaaggtcgctacttcggtgaccgccggcgtttcttgatgaacagtttctcccgggatgttatccgactcccgctaccttcgggagcctcccgctccgctgatgcctacactaggtctctccccatcatcaatggctctggtgtcttgcattgcacgatcaacgcagcgaagtgcgtgatgttgttctggaaggtcgtcttgtcctcgtcgcctgactctggctccaagtgtgttgtggccgccacctccatggtcaaggatgcagttaagcttgctctctggcggcctgggatgaagtcgtggagcgtgtgtgatggtgatactatcattaggtccattgatattgtcttctgccatgccaagggaacctccacatgctcagtttcggcaaattcaccactaacctcttagtctttgagatctgtgaagatgacaatggcttgatggtttctcgtgttgagtcttgtgtgatcaaactgcctggggtcatgggtaccgctaatgagacttggagcatagtagagtggcgcgggaaactactgatagttgtgacatactttggtgaatttgggcacaacattattgagattagagtatatgaggtggactgcagcacaaaccctgccacattcactgagatcaagagcttggatggcgactgcaactttatcagccaactcagcagcaagtcttttcgtttatctcattatgatgtagtcaaagattatcttatctattttatgcatgaccgctcttttgataaatctgtgtacaacatgaaagatggtacaatgacaccaattactgcagacatgtcagaggacaaaatttagacaccagatggaagactgatgaattcgacatggttatttcctcctgaatgaactgctgcatatcaaccccgatcctactgagtcttaatgtatgaagcactgatttttatagtagaaaaacttatgcatacttaatttgttttcatgtacctatgtgaacaagtggatttttagttgctttcgcactcttggttgtgggggtgttttaagttcctgtctatatgaaattatgaacaatgtttctccagatttcccatccactagtatgctgcaatgcggttatatcaatttctcttttaattcaagctgaagtgtttttcgtgtttctaatcaaggacccctggactgtgctgtcattcttgactgtctaggaatctggagcagtttacttaggggaattatagtcctctaggttgatgttacgataattaaatagaacatggtgtttgcatatcatcatatgtggatctgctaggcaagatattcgttacttgaaatgcatactgtttttccttggacactttcggtcttctgagtttgtttcggattacaggaaattagcacatgcatttatattttgtcttcatgatacaactttattgttttttctaacatatgtgcatttcttctctcgctctttttctaaaatgttgtgggagctcttgtcaaaaaaaaaatgttgttggagcatttagatgttactcggctatttttatttcatctcgaacatcagtcgatttttgaccaatgacaagttgacccataatatgtattaagttccatgcatgaagggaaactcagctgttttagttcattatttccgtcaggtttttatttcttataatagaggaaaaaaatcgactacgtcattgttggattgctgttcaaaaaaattgagtgaacaattctcttattgtagtcaattgttgtttagaaatttcgtttttttgtactatatatttttatgaggctgacaaaggtcctgtttggttccatgggctaattattagccctgaattagccctaaaggatctaaacaggtgggctagtttggagctaaagtgaattagcccccctcaaaacattagcccctccaaggggtgctaatggagctaattttctatggagaccatcaaaaagcagccctatctccctctctcttctctctttccaccttttagccccaaattagtctaaggatccaaacatgtcaccctacattagcctaccaattcaagactaaatattagctctcaaaattagccctgggctaatcttccaaacaggaccaaagtgacaactgacaaggctcagtccaccgaggcgcaaaccaaatcattttaaatacagaggtggggggtataattgtgatgggtttgcgctggggtggtcgatgcccaggtatttgtattgttttgctcccaggaagaaacccagtatgagcacagagcactcttaattcaaatgtaatagggaatgagaatcaagtgaggatatatatgtcagcaactgcagggacttttacatgtcatcaactgcctacagtgtgtagttgatagttagaacatgttgtcatgcatgaaagcaaattaaagacgagaaacagagcatgcaaactaggaaggcagcacttcctcttctatgggttacacatttttaagataacaataataatataaaagtcacagtctctgcgtcatataatattgcatacaactattatatatatcaagcatggaaactgccggtcgaccggcgcttagagcaaggtcaatagttagccggctgctggctccaaccattcttatattatttcgtagttactactaaagccaactattacaatagattagctattgtgctgactataattttgtaatcaaacaattaattgtgcatacaggtattgacatgtatgatcataagtggatcctattcttgtggtcattgttgtgatatgagggtgaacacaacaaagcaagctcgcgatggattagctccatccatacatcgatcccaccgggtcttcatgaatgatcagtgatcagattatgcgacagcacaagacgagggacggtcaccgctacttacctcaccacgtacccaaattatcaggatttggcgcacgcatgagatgcttctcgtcggtagcaattgcgccgccaagacttcatggacgaggatgaggaactgaggatgagtgtgcgtggtgcaggatggaggacgagactgcgtgatttgtgggggcggtggggttttctcgctcgctgacaatgaataacactagcggaactgcggaagacatcgtccgtcggtcgacgaagcaccggagggcggaacgaaggaggatgcgcacgggatcggataggtcaccatgggacccacaaaatatgtttttaatcgcgagtgcgcgtgaaaacgcgtgctatcgccgggcctgcgttgttctctctttgattctctctcctccatctatgaaaaaaacaatataaaaatttttggagcctcctgactaggattatcgtactgctcttagaacacatgccaagccacactagaaaacttttatatttcaaccaggtttctagacttctacgataatattccccttgttgatgacgtcatggacatgaaaaatgtgccataataaatagggttaattggatccatgccattataaattcttcagttttgatttataccattactattcaactatttagtgttatgcaattatacttttttaggtattggaaatatgccactacataccccttcgatgtgtttcacaaaatttttagactaaattgccctcatcttcttccttggcctcatcgtcgtcttctcccatcgtcagatccaaatctggcttagggaaaaataggaggtagaagatgaacgagagaagacgacgagggcaatttagtctaaaaattttgtgaaacacatcaaaggagtatgtagtggcatattttcaatacttgaaaaattataatggcatgaccttaaatagttgaatagtaatggcatatctcaaaactgaagaatttataatggcatggatcaattaaccctaataaatactcatttaccagcgaatgcaaggagacacatcaaagaaaaatcaggcattgatgcctaccatacctaatccagggtgatcacggtttgcatttagtccatatgacaaataacaggattgccactcataacagaaacaagaaaatgagagggggagcataagctatgggaagcaaataaatgcaagtctgtacctcgcaatacctttgcacatgaaaggctgcagatgaattaattccgttaactttgcgagccatgtaaacaaacaagccatttgattaaaatttattgcttaatcaagtttgttatattcgacctcaatatgtttggtgatgtattaaagatggaatcgcacccaaatattccacgaaaaaaataaccctgatgaagaggcacgcacaaagtagcgaaaaaaaaatcgtagtccatgcatgccatatttctagctatcaactttccagatgctccagatccaaacaaacaattcatatgatcactaatcgagtttattcagtggttgtgtaagttgcaatagtacagaatgatccaggaggcgggtcgcatttccgcgcacaaggaaacgaaattaatgacgaactacaacacgtcaacacccgactcctgagaaaaacgaaaacaagaaaacgaagtacaagtctacttacaggtaatttgcgcattgtgtaaaaattgcaaacagaaggaaatcactttcgcaatgtcatattgcagaattggtttatgattgtcgatgacattttgaagaggaaactgactcttcgtcgatgacatcgtacaactttcacttgaagattttnnccctttnttttcccccctttaaaaaaaaccccaanccttgggnaaattangcaaaaagaaggatatccaattgttacatgcatgtaaacaacatatgatggaaaaatacagagctaaagcgatataatttgacaaacttacaaggatatatgcttgttagcctttggttatctctttctgatgacaagtgcagatacgctgaaaaagatttatgtcctcatgtctaatcttgttgataatcttgtgagtaggatggatcgagtgttggtaatttctactgttcccaatgatatgcaaagagaccaatacaggcaaagcatgctcctctatcacaacacgtttggacgtgtcgtttacttccaattttttcaagcaatgaaacccatcaggcctgaaaacaagctcttctccgtcacaagaaacatccttgagtgtgagattggaaagaaggggcagcttgcctagctttccaatgaacccttgttgcagacacgtctttgacaatgacaatttgctcaagttcggcagctggaaatcagaaggtgaagtggtcatcttgtctatttctggtgatggagttgtgagcaggatggttccggttagttctatagtcttgaggaattgcagggaaggtgccgtaaaaatgctagagattgggaggtcaactcctttcaagatcagtgtagtaaggttgttgagattgttaaggttgtctgataacttgcgcgccttctcctctttgagcttctcttggatagtcacatccagtaacttgaggttaaccattcttctcaacatagagccatcccaatcctgcaatgctctcaccgacttgagtgtatttagctgtttcagttcacgagtccatcttggcacgatcagctcagagccaaacacatgccttagcgatgtgatcttccaaaaggaacacggcagttcatgcactaagctttgtctgacatcaattgtttgaagatttttgagattcccaatcgacgggtggatcctcctcagagatcggcaacgcgtgctaaggtaacggagatgcaccatgcctccgattgcctcaggcaactcggtgccgatattcaggccttcgatcatgattactcgtaggaacttggatcttttcagcagcttggtgaggtcaaatcttgaaattttcggtgatctgtgctgctcgcatgaacagcaggtggggaagcagctaggagatgatacactttcttctgctgtgctggctggtatctcttcgaagattgcaaagatggaccgtagcttgggcatcttgttatctagtgccgcgtatctgtccatactgttatgtagtgtgaggcgtcgagccctgtccggcgatgggaagtagtcaccatcatgcagctccatgaagtttgcctcatgtgcctctgaccgtgcaaacaagtagacactgtcatggaggaaaaagtggcggatgtcgtagtcaccatcagctgatgcttcagtaactagtcccctagtggtaagctgcctcaggtatagctgtcccagttgctgtaccgtcttcccgtgccgcggcaccacaaagccctctgatacccacaagttgacaagcacgttctggtacaccttgtagctgaccgggaatgctgtgaagtagaggaagcagagcttgagctcatggtgcaggtcatcgaagctcagggacagtatcctgttgagccgcttctctttggctgactcgaggtattttaacaccctatcccattcatgtggatactccttgttgtgcatgagtccagcaagcaggataactgccaatggcgagcccccggtaatgtcatacacacgctggtagtatattggcaggtaggtttggttttgttcatcctcctctttgccatggagcctcatgtggaacagcttcctgcagtccgtttgattgaggcatgtcagctttatctcatggacatcattcattgggtggtctagaaactgtggttttattttcgtgatgagcactacccgactacctctttcgttcttcggaagagcatggatcacagcattccagtcagcgatggacatctgcctgccatcgatgatgatcaagtagcactcttcaccaagacgtctttgtatcttgcttctaggattctcattgtcactttcgttattttctttcttcagttctttgcttatcaaactcaggatgttggatataccagcatcttttccgaccttcactccaattcgctctttgaagtgttctctgacagatggttttgaacagacactgtttacaaggatcgtcttaccaacaccactatcgccgacgacatatattacggcgaggcatcctgcggagctgagaagcattgcctctagttcctgctgctggtcgtcacgcccgataattggtggcttggatgtacccctgcatttccaacaagatgacaatctacaggttagtgtatggccatcaacagaacattagccccaaatagcctaattttggggctttgtttggtcacttccagaagttgccacaattttgtagcaaaaccacgacatgtttaagttatatatggattgtggcaccaaaattggtggccacacttgtggtaaaacaagctaaacaatatttcataaaaaaacaaggcaaacaatatgtgacgagtcagatcaaaattaagaaattatggcaaaccccaacctgtagtaaatgattaaaacactagctacaaattatatatctatatatcctatatagttgggaccaaaagctcaacatacataaagccacatcaccctttaaatcttaaccattgtatcattaattcttgatatgcacatgtagctcatgatatctgttggattgtttaggagagagatgactgttatcttcttgtgtaactgaggaattaaattcctttaattatttctattcatgaccttataatgttacctcccaatgcatgtgtcaattcatctaagcaagctcatcaacatacattgacccacgtcaccgtttaaaccttaacaattggatcattcttgaaatgcacatgtagctcatgatatctattggattgtttaggagagagatgactcttatcttcctgtgtaactaagaaattaaattcctttaagtatttctatttatgaccctaaaatgttacctccccatgcatgtgtcaattcctttgagcaaccatggtccacaaaggttaagatattcattatgaatgtatcatactattgttgtggcttgaatttgtgttggtaaaaatacattattgtgattaggatggtaccaacaatatttgacgatgttctcacaatattaaaacatctgcataactaatcatcaacatatttttgtcctaaccatctattttttaaaaaaaacaaagaaaaattaaaactatcataagaaattctaaatattataaatagtatcttgattcctttaatgtgtatttcttttcattttagctcaagtcatctaaaagtgaatattattttgtttctaggtactaaacaccagttcatccccactaagtgtagttaatgctatttctctctttgtcatgaagccacatggatgattgatctacggtccaaatttattttcctctttatttcttgttattaaattatatcaccttaattttgcttttggatcataacatctatattatctcccttatttttcttttctcattgcaccgcatcaccttagttttgttataaaccatatcatcttataatgtttaggttttttctttcaatagtcaaccaaagataaaaaaatatataaattattccctcctttttctcctatcaacttagttttgcttttggatgataaatgtaattatctcccttcttttctttctcattgagccacaccaccttagttttgttataaactaccgttcatagttttttttaaatagtcgatcaaagatgaatattgtataaagtatataaagttgtcatctagctatcttaaatgatacaaaactcctgcagcacgggtttcatcaagtatcaaatatgactaactcaagtgttgcaaactactttaattagtgaatcacacacaccctaactaacatatttcaaccattagatccatatcaaatcatcaaaatttcttcaacaatatcttatctagacaaccaactgctagcctcctttgtcttcaatccaagacagtgacacacgctacaacaaaaataacttgtagacacatttttctaatattgtaggatattttctaaatgtatttacaaggctatagaggcattttataaaatgtatactttgtgtcatttttgaacagatgttaaaggcatattctagaggcattcaattgtgtgacaaacataagaaaccactatgaaaaatgagagattcccttattctaccaatccttgaacttaacaattctcgaaaaaatcattcacaccttcaatgtacacctctaaaaaatgcctctatagaagttggaatgcaaccaagcaaatgcctttacataaggaaatttttaagtgcctatacaatacctctagtagataaaactaacaaaatttgctaatagtgcctctaggataaaagtatcctaggcaatttttaaagttctaaaaagtgtctctacacaataaatctccaaattttaaaggaaaattgaaaatttcctttagaaaagtgccacaataaaggtttttcttggagtaacataacaccatttttggagaaacaaaatgttaggataaactaatgtaaatgtttaatgg

SEQ ID NO: 7751 - DNA, 1830 bp, Oryza sativa
gccagggtggctggcgccgccctttgcctccctgcaaattgaagatccatattgcacaaatgtaccaattcacagtttgcaattcaaattacaattcacagtttcatacagactaaaacaagttccaattgcacaaatcacaactccaaaagtccatcacatagtgcatcacatattccacacatcaaacaatgccaaaagtccatcacatattccacacatcaaacaatgccaaaaatccatcacatagtcctcacatagtccatcacattttatatcacatagtgcatcacatatgtcatactaccaacaaatagattaacttcatacaaatcacttcttccgttggcgccaaatagcttgcgagcccggagtgtacctacatttaaaaatccaatgtttaaaacatttaaaaaacaaaatgagggaaatcaaataacatttgagaatggtaagctcattttacctctttttcgctgcccgagtggatcgcaagttgtattgggtgggttgcgtcctctgaggcgcgtcgggaagctgcgacatgtctatctcctcagcgtttggtgcgacatagtcctcatcctcctcctcgtcatcatcgtcgtcgctaggtggagccaacgccttcccctttcccctcccttgcggaatgcgtgacgacgacgagccaccaacttcttcatgctcttctatcctgatggagtgtcgagcggtacttggacgcgcggattgaggtagtggtggtggtagtctccgcggttggtacacgtcgtccaatgcaaccgacctgcaacctaatcttgctgcaagttttcggcacctttgacgaactttctgcatttcacttaaaaaagaagtttgttaggcataactcaagtaatgcaaagtgctaaataaattttacctctaaaacattgcggagtgtgttctccgtgtccttaccacccctcggagcttggagggtatgccccatttcattcacactcctgaggagctctctcgattgaaagcgtgagaagatatatattagggtctgggatgcaaatggaaataactttgacaaatgcaagaaaacttacgactatgtctctaagtggggcgtgctccatttgatatccaactctagtccggacatcatagggattccgcccctcatcggagtcgcggtcatcctctatgtcggcttccgtccaagtaaggcggaggaacagtctatatgtcctatgcagccaacgaaggtactctgagaaaacatgattttggtgtattgtctcgatgtacctgtcgttccttccggctgtcctccattcatcaatgtatctgttatactctagcccccagtctttcaccttctttgttctcaccctgtcgtacatagacaagtggaaggtgatgaaagaatagtgagcatcgacaagggttaaatggtacaaagttgaacattgacaatgaaagcaaacaaagataagaaatatttactggtgtaattcaactccagttgagatgtcctcaaccggccagtcttgtttcttcccgaactgtcgcatgacacggtgcggaaggtggtactcaactgcccagaaacaaatcaatgggcactggtacatgaagtagtcagagtctcgattgcacattgagttcagggtcaggcttgaagcctcatttgtgtggtatggtaaccactcaatctgcaaaagttgaagagatgtcgttggttagtatctcaattaaagaagtaaatgtcaaactagaagtgatattggaagtacttacatgttgaggctgtaagcagtccatttcattgacataaggcttgtatgccacatc

SEQ ID NO: 7752 - DNA, 7185 bp, Oryza sativa
ttactttgtcatttttaatttattgtaattatttctagctgatttaactattttccaattaacttagttttcaattattttatataaataatcatataataattccacatagtattcattttttcattattttaaaatttctaaacatactttcattgtttttcaatatttatatatatttttccttttttcctataacatatttatccaaattattttaacctaattttccctctacaagttttctctctcatcatttcccaccatataccttattggagacaatattgaatacaaacaaagccataaatgtaacatgctaaacatacatcattagatggtgttgctaaccttttcgattcctccgatttgtatattatcaataaaaatttcattaaaaattttggtagcacctccctccctcaaagctccattttgcagcaatggctcgagctagaggaggaagaagggatatataaagttgggtctaaagatctctaatgtctttagtcccggttccttggccccctgacagggggcacgcctaatgggcgggcagcgatcacccatctgtccccctactcccccctctctctccccgcttcctcctccccttcttctcttcttactacagtaaaccacaaaaaaaaatctaaaatacaaaaagttagaaaaatttatgtatagaaatactatgtataaaaaaattgaattcaaattcaaatttgaatcgggtatgtaaacttttgacttataaacttcaggtctataaactttaggtgtataaactttagatgtatagaaatactatatatagaaaatatttgaattcaaattcaaatttgaatcggatataattaaaattcaaatttgaatcgggtatgtaaacttttgatttataaactttggatctataaactttaggtgtataaactttagatgtatagaaatactatatatagaaaatatttcaattcaaattcaaatttgaatcggatataattcaaattcaaatttgaaacgggtgtataaacttttgacttataaaatttaggtctataaactttagatgtatagaaatactataaaaatatttgaattcaaatttaaatttgaataggatatataaactttcgatttataaactttgggtctataaactttaggtgcataaatttactaaaataggaaagtaatgcggtgccaaaaaaaggaaacgtggagggagggagggggggagaggtggtgatcgctacccgatcgctccgcgatcgatcgcgcattagacttttcgcctgacaggggtctagcatgccctgttagggggcgaactgggactaaagacgattggtgttaccaaccgggactaaagatcacttagtcccattggagtaataaaccgggactaaagaaacctctttagtaccggttctttatagaatcgggactattgtgcttttcggccgacccagcaaagatcagttctccagtagtggtagttgttctagactattggtcctactacaccttcgtattcaactactacaactcattgccatggtggtctcctacctcgcctgccagctatatattagaaacatcgttacgcgtgttcatcctgtgttgttgccaggcctagtaaacctattacatgatcttgtcctccatggtttgacaacattggctcttcgaaatcatatttctaaatgactatcatgatcgtatcattgttttcagccttagcacgtccgtgtgcaaatatgatccgtggcaccaccctgcgcgcctgcgaccatgccatggtgcattttggacgcctcacggcttagctagcttgcttatcatcggctatattggcgacgactactctaagcactgttacttcagtatgactctattgtgtcctttatttttggctatctcggcaacaacataaatggctgtcagattctctcgttgatttatttttccagtctaggcatgctgatcatgtttggactattagtatgttaaatggtatgttaaagtatatataaaatataatagttataggaatatgaggatatgattgatttatttaaagttacctttattcttatattctactagaaaattggtcacgcacgttggcgtgccaactatttagcccgtgtgtgctggttagactaactttagaatgcatgaaagacataatatttgaaccgattagctaaataattgttggcatgttttttttttttgaaacggacgatttgtcagccatcagattcacgtcgtaaatggcaaacctgagttacatatagataacatattatagatacactataattatactataattatactatgatgattgcgttggaaagtttaacccataattgaaaggattttcttttatcaatgatcattgcaagaaagtttttgcacttaagaaaatgaaaaacatcacattttccattcacgtttgttttttcaaattttcatagcttttcatcaaattcatgaaaatcaaaagatatattaattaggtcatgaaggaagatacttatgatgtcgtccttgctggttgaacacaacatccaccaatcgatctcctttctaactattcttcagatggaaagactaatggaaggagaagtatgatttggaacgttctgatgtctaataggctaatatttttttctagattcgcttttttctcttatgaataacttggagatttatttgaaaaatttaattattgcgccacgtggaacaagcggctggcggtaaaaaccgccggcttcagtaaagtaagatagatatatatacacaccataaatttctgtgtaattctttataagtgatacaactctggtaggataaacatactttggatgctgatcaaatactatatgcctctaaaatataaaatattttcccacatagactaggtaatacacaatctttaacaaaaaatgtaacattataaaaaataatattaaaataatgtacaaataaaatacgactaacacagacaattaagataagtggctgttttattatctgtttggtagatgtatagcttcaactctacctctaaagcccaactaaatagttttaactctatctaaacttaaaaaaatgccaactaaaatgctctcgtaaaataactcgcttgttatgtctaatatacttagtctaacctgtaacttgggtacgctcttttcttttgtcgaagaatcgaaaaaggatattatccaataaaacctgacatgttgaactttttgcttttccagctgtatgaaataatataccgaatttaggctgcttcctgatttcactctgtatcatcttggaattaaatttaggatttggtcctgccgacaatacccataattagtccaactccagcacgccggattgccggaaggttggcgacgcgttatcattgcccaggcctgctgccccttctcccctccttctccttggtgaatcgtcggcgatggatatcgctcttgcttctgcggcggcgacatggctgatcaacaagctcctggaccggctgagcgactatgccatcaagaagctgctgggctcggagggcctggacgcggaggccagctccctcagggatgcgctgcggcgagccacgctcgtcctcggcgccgtgcccgccggtgccgccgcaggggtcaggattgggaacgaccagctacttccgcagatcgacctggttcagcggctagccaccgatttggccaggcacctcgacgagctcgagtactacgacgtcaagaaaaaggtatctacactgtcactactgttgcaatttgggcgattcagtttcttctttcagcactcgaaatttcatctcttttttttttcatttgcagactaaatttttttttgggagcgtttagctaaaactctaaggttgtcctcgcaaatttttttttaaaaaaatctgttaaggttgccagactaaatgttcgtgtcacagactagcagtttttaggaacgaatagttgcagcaggaaagcttggttgagtttaagcttggctaaaacaaaaaaaaaattggggcaaccgtaactccaataaaataccattttttatagttttataaaatgtaaaagatctgttctgtcttctggctttctcccaaaagccgggtaatagtcattacctgttgtaaaaaaaaacagagagtaaaagctaagtagctagataaattagaagatgttaacatctgggttggtgggggttgattgtgaaaggagtactatgagtcttaattaactattactaacttattagacacctgatcctagggcaaagccgagtgattagctttccagtgaagcttttttgacatctctacatgtgggccatgagccatcaaattgtcaaagtgtctcaaaatatgcttatgcttcatattgcaaaactttgtttacatagtaatcggaggctctcttgagggctacgccccttaattatcggaggaaataaggactgcaattcccatatagtagatattcctgcatatggactcgcaatcagtacttaagtcccattcaactcctattgtagagtccagaccatgtccaaacagaatgaaacaaaactatgcataaaaaaataagtgagatgtggagtccaattcaatataaacaagaaaatgatcatgccatccagcacatatggttccacaaaaaatatgtaaaaataacaaggcacttctatgactacaacgtgcgattatattaaccaaatgttgaaatttaaatcacactatactcaggtggccaaatattcaaactcgacaaaaatcagaattaagtcacttgtttgtaagagaaatttttttataaactgtattgttaataaaaaagaaatcttagacttcatagtgttcacttgagatctaattttgtagcggaaggtgaaatctagttggactgtgaaccaagaggatgatatgcttgtgcaggaaaataaataaataaatataaaaactttaacatgttaagttagtggtaaaaattgtaaatgtagcaaatactaactcttgatttgttcaatatataaacataatgaaatgggaatttcaagtatatcgaattgacatatattgcaagacttcggatgcaatttttaaccaaactaatatatatagccttggcaatttagtttattgagattcatacgtttaattataaaaaatgtgataaattttatgtacagatgtacgtataagaataaaaagacaggacatgggcactcaaacctttaccaaaaaagaaaccagaaaataaccgaaaataaagaggttgtaggtagtcacctgaccaaagggttgcctcatgatggcagtcagcaatgtgtatctgcgtgctagaactcctggatggcactttgtcagtgagcatggtcacatgtggcagttgttttaggattatcatgccacagctaaataataagctgttctatgtgcattttagatccggttagtaaggtggtctattgtaggcttatggatctcccaatcggttgacttcagcatgggaaaaagccccttactgttccagtttaagcgtcctacagttaatccttgcacgctttatcaaccatcctctcataagtgctagcacagttctattttcgatttcgactgtattaatgcttctgtagtctgtaaaatcttgatctgaatttcacccattgtgacccccattccattatatggtatagtgatttcatctatatcctttgacatcctagccaccattttccatttatgttgtgtaggtaaagaagaaccagaagagcagcaatccattatccaaaatgaatttaccccttactcaagctgggcaatcaaagccgaagtacaatagaacagacataaaacagattagagatactgtgggatatttgcatagcatttgtgatgatgttcacaaggctctcttgctagataaacttgatgcaattaaacaagctgctcaagatgcaagtacagacaaacgtgagactgtggataacttcactgaaaatcctagaaataaggtgttcccaagggaagaaatgaaagatattatagaactaattaatagtgctgcatcgagtgatcaagaacttttagttgttccaatagttggtgctggtggtgttgggaagacaacacttgctcgattggtgtaccatgacccagaagtaaaagataaatttgacatcatgctctggatctacgtatctgctaactttgatgaagttaagcttacacaagggattctggaacaaatacctgaatgtgagttcaaaagcgccaagaatctcactgtgcttcagcgtggtatcaacaaatatttgaccaaaagatttctgcttgttctggatgacatgtgggaagagagtgagggtcgttgggacaagttattggccccacttagatccgcacaggctaagggtaacgtactcttggtaactactcggaagttatcggtggctaggataactagcaacacagaagcacacattgacttggatggtatgaaaaaagatgacttctggttattcttcaaaagatgcatatttggtgatgaaaactatcaaggccaaaggaagctacagaatattgctaagaaaatagccaccagactgaatggcaatccattggcagcaaaaagtgttggtacacttttgagaagaaatattaatgaggattactggacaagaattctagatagcaatgaatggaagttacaagaaagtattgatgacattatacctgcactaaagctcagttacaatcagcttccctatcgtcttcagctactcttcagttactgtgctatgtttccaaagggttacaattttgacaaaggacagttgatatgtacatggattgctctgggatttgtcatgaatgagagaaagaaattggaggatgaaggaagtgactgttttgatgatttggtagaccgaagctttttccagaaatatggagtgtcacagtattatactgtgcatgatttaatgcatgatgttgcacaagaagtctccattaacaaatgccttattattgatgggtcagatcttcgaacagttccgtcgtccatttgtcaccttagcatctggactgagccggtgtacaatgagcaaagcatagaacggaatgataactttgaagagaagtta

SEQ ID NO: 7753 - DNA, 25513 bp, Oryza sativa
ttccctaagcggttgcagggggtgtcatgctcggaaaattcactagtaatttctgaacttatttgtgcataaaatcctcatccaggaatcagccgaggtacacaaactgacaatttaatatacaaatccatcataataataacgttacacacttacaaaagaaaagaaaacagcagcggaataacggtctagcgatggcttcagctccactcccacaggcagctcaactggggtataagccaaacgtcttctccttctggatcctttttcttcaactgaggttgattgattattgcaagaatgagcatatgacatactcaacaagccacacagcaaatatgcaagtgcacaaggataccaaaggatggcataatataggctcatttgcaaaagcagcatttagcaaacatttaagagaagtaaaacagtggagtaattaattagaaattttaatcaacactgaacagcacacccatgctgcacaggcccaaccatcctgaacaaccatacccggctgtacagatctaactccaaaccaggagctaagcaaattattaccagttatagcatcaataattattgtgagagctgtgagactaatcacgaaaaacattgctcaacccgcccataaccgtgggcacggctattcgaatagttttactctggctagaggtgtaccactgtacccacaagacacaactccacaatatgtcaccatatcatcatgtgcccatgctgaacatgtcaccatatcatcatgtgcccatgctgaacatgtcaccatttgtgtagttgtgacaagacccctcgcataactcaacccaaagcagtgcaccgttcccggatcatagtgacccccttataaacaaggcatggactccccagtgacccccgtgggcttatctccgccacttctcagtctggtgctccgcagtgagccttgttatacaaagtgtccagccgttgcccattctggcttgtggttggcacggttaatgtttcacaaccgaaaatcgtgaaccggtccttaattgtcatgagcacgaccatcaaaaccatgtgctcacaacccaccattatcaagttttagttgacacattaattaattaaccaatcacgattgaccatcgtgagctatcattaaatatccatcattaagtaatagtgaaacattagttatcccaattgtatgctaatgtttctaagcatggataagtaattatgtctaacatctagctgaaccaatatatataaagctcaactagtcaaattataatatcccaaggtatcaaggaatagagtaatcaatgcaaacaggccataacaaaggaatagattcacaccacccagtgacattcgaaaataaatgcacagttgaaataaatagagaatttaaatataggatcaacatgctcaaaggaactgtgtttgggatctgtgtgacttgccttgcaataaagggtcttcaattaatcttcttaacacttccggcgcactcacgaaccttcgaaacgacggaaacgacaagctaacacgcaaaacgaggaaaaagactaataaaaaccaaatagacaatacataaaaagtaaacaaacatgtagatcataattttagatgaattatgagacttgaacggccttattcggacttcatatgaatttattacaaattttacaagattaaatctaattaaaacctatttaaaaaggattaaataaatttaattcaatttatgtataattttaatatgtagatctttattttatacaacttttgcaacttgaaccacattaaactgagttacaaagaattagttatgaatttttaaagattaaaccggattaacgcatttttatggattttaattgaattatgacgcaataatgaattatttttgaaaaggaaaagaggattattgcgtcagcgggctcggctcacggaggaccaggtgcatggcgacggttcacgaaaacgaacggccgagattcatccatccaaaacggacggccaagatccatcggtccacgaccggaccacggcggacggcaatgatgacgtcggcgatgacgtcatcaccggcgatggctcggcctcgcgtgctcgtcggcgaacgacggcgcggcggcgcaaacggaggacacctacacgtagcggacggcacggcgaactcaccggtgctcaccgatacgacaaacgacgacggacgacggccggcggcgaggtggacggcggcggcggcttcggtcggcggtggcgtcggagctgcggtggtcggcggcttcgggggtcaggcggccgggcttctccaccctcccgcacacctaacggtggtgacggcgaccggcggcgacgacggaggcggcggcgcgacgcggatggagctcggccggcgacgatagcggggtggagcacgtggcggcggcgctacgaggcacgggagatcacgggagagggggcaaacgaaagaagaggactagggggtcctatatatagggctagggagcggcggcgaaggcccacggcgaccggcgacgagaaggaaggtttagggtttggaggagagagatcgatccgaatcgaactcaaatccaacactttccaagcgattttagccggtgattccaaaagagaaaagatagaggagatcgagaagatcatttcccctctattgatttcaccggaaacggaaaggaacggccggatttggaatggcggcggcggcgcagctcggctagggtttcggcgagaggaagacgacgagcctgacaggtgggccccacctgtcagcgggcgaacgcgcgcgcgcgggcggctgactgggccaagggagagagagagtggtttgggccggctttcggcccaaaaccaaaagggacttttaaaaacctttttccatttaaattattcatgaaatgcaattccatttattaaaaatacttccttggctcaaataaatcccagaaaaatctaggaactatagaaacaagagaagtatttaacaaaattttatctagcccacttttatattgagatttaacaaattaaaattagatcttctcttctaagcttttaagatcatttctaataattcccttttagacaacaatttataaattaaggatttttaaacaagaaaagcacttaacataattataattagattattaatgattaaataattactgaactgttctttgtatcatttagaaattgagctccgaaaaatccgagaaaatttcagagagtataattaatcatggagaatttaataaaaattaaatccatccatgctttaaatttaggaaatttttatttcccacatttaacttcacttataaattaaagaacatttaatataaattctattaataatttattagataatttataaaccctaaaacgaaaatctggctgtgacacgtagatggcttggattccttccctaaggcggttgcagggtgttttggtcatttcccatgcccctaaccgtaatttggagcctatataaggagtagttcactctcattccaacacacacaattttgaactgaattacaagaggccttattgtatcttttgtacattagaataaggtagagagtgaggggaagctctggaggagtgcctggaagtttggcactcatccgacttctacctcgacgagtgtagcttcctaggaagaattctggaggagtaccagagctgtcagtacactctgctccgggttcggagaacttcttctataaagtaagcattcgtgttcctttcttatcttatttaattatttaatctgagtaagatagacttccatctttttgggttcattgtttagtatttatactaagtgctctagtactaggactccggatagagaaggaagttcctgcgaatgtattagagtagtaactaataacttagacgtggtgtctagattagagattacctttgtttgttgtgtatcccacggatttgtcagagataggcggcaggtggtgacagccctaaatcccgtcctagtaatcctccacgttcggatacatcatagagctatagccggaaccacgctggcagaccagcaggggtcggtgcccgaagcagcagataggaaattatgttttgcttagcttagataattaaaacatatagagagtcctgtctagcctgcctacctatagttgttatccttggatagtcttagccttagatagattacacatgttccctgagttcgatatcctttagggctcacccaaaggtgaaatgctacagcggtattccgtgcgcttgcggatttatctgtggtcataagaaataccaacaggcatgaggtgaactatatatggctaagcaaaatgaaccatcccacatgacattgtaaaataatgcaacatttaatagaagacgaggcatttataaattaggtacaatatgatcaattgtaatgcatgacttgccttgctctcatgttgttgggacctccgcaacgacttcgcagaacagcggtgcatcggaacaaccgaaatctacgcgataaacaaagcacacaagcaaaacaggcaatgagtctaccgaaacaggaaacaaaaccacttttaatggattctagggatttgtatggatttactacaatttgaatggactcaaatggagcttgcatgaatagttatgatttttaaaagattctttgtgtagaaaagtccttaatgatttattgcgaaataaacccaggggtgactggaccacgcgggtggtccaccgccagcccatgggaccaatggtccagatcagcctcaaggctgatctgacggcggcggaagcggctgcctggctcgggcacggcactagaccgccccaccggccatggcacacggtggcacgagcggccactggcggcacaggtcggtggcgcgtggcgcgggagcaccggcgtagctcggtgctaggagggagagggggaaaaggaaacaaagggggtcctcaccgaggggttcagccggcgcggggaaagatgacggcgaacggcgacgacgggcggtagacggcaagacgagccgcggatggcgtccggagcaatctaggggagcaaataagaggaattagagggagagaggaggtctgcggcgagcggcaatgccggctgaaggcggcggaaatggaggggctcaccagcgtgcggggaagggcgattttcgacggcggttggcgacgggtgaacggcggacaagatggccccgacctcacaaagccaacggcggcaacgaagcggcgcgatggtggcactagcggcggccagaggcggcggtaggcggcggcgctaggaaggagtagtgcggcggcggtaggcagcgtgggagaggacggcgaaagaaggaaaaaggtggaggaggatgcggggatggtttttataggggcggagagttcggacgtggccgggacgtggctctatttcgccggcgacgtggggaggtggagagagagagagagatggaggatttcgaatccccgccatttgcgagcgtgtgcgcgcgcgcgcgacgtggggtgtggaatggagcggagaaggtgggcgacgatggttggagctagggctccggcggccggaggttgaagaaggggccgacaggtgggccccacttgtcggtgattttgagaggggaggaggcgggcgccagccaggccacggccacgggccggcccagtaaggaggactggcgcggaaggcgtattgggccgacggcccaagaaaggaaaaaaaaggaggatttcgaatccccgccatttgtgagcgtgcgcgcgtgcgacgtggggtgtggaatggagcggagaaggtgggcgacgatggttggagctagggctccggtggccggaggttgaagaaggggccgacaggtgggccccacttgtcggtgattctgagaggggaggaggcgggcgccagccaggccacggccactggccggcccagttaggagggctggcgtggaaggcggattggaccgacggcccaagaaaggaaaaaaaaaggaggaaaagaaaaagagaaaaaaaggaaaaggattttcctaggatttatttattgaagataattgattttaattggataaaattattttcaaggctatgaaaattccattaaaaatcttgttaatgcattaaacatcgggaactcaagaaaaattccaccatgccatttccaaatatcaaatgcattcattaattagggttcagctcaaggttaaattgaacaatttctttaggcgttttatttgatgaatttaaagctagaaatgggaaaacttcagggcgtgataatattagacccgtcttgaaatgtttttattttcactttgaactacctattgttaccaaatgttgtacattggaccaagtgcctcacatgtcaatgaaactaaccacctctattatgtgtcgcttacacgtggaccactcgattcaaagtgtagcatttgacaagaatacatagtccaaagcaaaaaaaaagcattacaacggtggtccaaagtgaaactttggtaagaatttgcaacccaaagtgccatttacttttttttatatttttcccggtcaatcatgactggatttgcgttacccaccaccgtccacgcattgacatcctcatcgtccgcgttggtcatcattagctattgggttcttcttcgccaacatcgagcatcgccaccacgtcttctcaagataccaatattgctggtctaagccagtggtttaggtaccataggttaggctaccgaccttattgttctatgttgttggtcttgctgcttcacttttgttttcatctaccttcaccagcgcggtattggcaacaccgttgcacacattcaccttgagttatcattgagcctggcaaatccgacatgatatctcgtcctttacggttcgacaacatcggctcttcggtatcatcttccccaatgatagttatgatcgtgtcactgttttcaactttagtgggtcgtctcacaaccacgacgcattccatgcatccgtaaacactacttggcaccccttgcatgccacacgacttggctactattggtatttcttacgatcacagataaaatccgcaagcgcacggatataccaatgtagcacttcccctacggagtattccaagggtatcgaatccaagggaacgtgtgtgatcagagcttcctccggttcatccgaggacaccaagcaaatgataggccaggatacagatgatttactagtgagaaacagtgtctagggaaagcttaattctaatcctaacgcaatacttcaggcactgtcaacctgctgttcccagatgtcgctctactatgtacccggacagggaggacttaagtgatcgcgagggctgtcaccacctctacatctacctcaaacgtactgtgggatacgcagcaattactggataacaattacctaaacaccatgtctaagcaattaatatctactttagtgtttataactcaccaaagcaatcactatattttagttgattatagtgaacaataatcccgtatgctatttaggaactaaccaagagataattctcacaagataaatctaaattactcaagaagaatattatattgaattcagagtaataaacagaataaaaaaaataggagaagattaccgacaactccggaattcttccgacttcttctactctactctcttcctattctagtatacaatatagtacaatagagcctcttataattcagctcaagcttggaagtgtgtgtgagagtgaatgaagtgaggtccttttatagggtagttatgacggttgtgagaaggggaaatgtccgaactgccccgcaaccgtcattgggagaacatctggaacgtccacgccaaaccctaggatcaacagtgatcaggggggttcagccgaaccagggggttcggccgaacctgggctgggccttcctggtctggccttcagtcggtgaactccctgggctctcctctgtccatttctcggagttttgggttgattcactgatgttttgatgaagttcacaacccctccttgtatgaatacataattctcctcacattagtctgattttcctcccaacatcggggtttatcatctgcatacaaatatacaccaacacttgtagaatatgtgagattaagcacttatcactatgttggatgttttattatctgatctttatgcagatgttggcggtatagaatcggcatttaacagctgccaacagctacctcgacatcaacatatccgactttggctatatcaaccatggctactctacacatggctatgaagttgcatttatccccctagtgggttttggtgattaatgacaaatagggttaagggactaatgagttttattgaccattctcaggtgtttaatcccaagatgatattgtgtggtcaagagatgcttggagaacccccacaacttatattcaagcggaattggaactcgaagggtgcataggatagtttatttcttgcaatcgaattttaggaaaaaccgtactattaagaggggttccaggtgtggttctaggatataacaagtgctctttgtgagacccaagtgtcaaaatatttttgggagctttgttggaaaatggccctaccaggatagatcaggccggccggaagttccggtcctatggacccggaagttccagaccttgaaaggtgaaaattttcccaagtgttgtccggaacttccggtggtcaggaagttccagacccattccagttcaaaaatgtgagtaacggctagaagacgtcacctagccgttatatatatatatatatccaaaacgtccccagctcactctttggccatttcacttttgtttctccactctatagctgttgcaagcctctcccaaaagtttctttgcttcctccacccaatcttgagccattcttgagagagagtgagattttgagggtgaaggagaagttttggagaaggtttgaagactaggattggtgtgaccacttggggtatcttgtgggttgacatctcggtgcttattactcttggagatcatctcctagacggttaggtgtcacccgcgagcttcttagcaactgtggatgtcccagaaaagtttgtgaaggtatttctcacctctgcaacgaaacgaggtaagtgagtaaagaaccttgtgctgaagccctagaggttttcctagtagagcaactcacacttgtggtgttttctagacggaggtttgtcacgaccggaaataacccaacgggcgttccttacgtgcgtgtattattccttgtcccaggaggcaaggtacaccaaaagttgatacatttcagagtttatcaagcggaagcgtaaataattaatttattacatgggcggcgaaggcccagcacacacaaagacaaacgggaaacagcggaagactagggcgacgaccacaggcgcttgacggcaggcacgagctagacactaaagccttcatcttccaggaactcctcttctgggtttgggaaaaattgagcaagactgagtacaaccaccgtactcaacaagacacacccacaagtgcagaataaatgcaagggagtacaagggagccataatatagggggttagggtttgcagtaaacagcattaaaagacacttagttgctcaaagctattttgtaaacatgattctagagctatacaatattattaatcaaggccgtgaacccacacgaacctgctttaacccaaggcctacgacgattcagaccgaactggcaacccgaccatgggtcctagctcgtcccaagccaacccaggccaaccattccacattttagttgttaagcaggttttaagaattaaaacactaacttgggtacattgctaggcttgcccataaccgagggcgcggctattcgaataggttatactctgatcagaggtgtacatctttacccacaagacacatctttctcacgtgtaaccacgtgccacataccaccacggtatacggacggaagacgtgacatagtttccaacccatcctagccatagacaagagtaccaacccaaccccacctatggccggaacctccgggacaggtaggcaggactgagcccctagcagcaggacaccggccttgtgccatgacatctcgactactggaccgcagctcgtgtagccttcatttgccctagagatgtccatcgacccccgacttcatccatctccatttgtgtacttttatttataaccagactgagccacaaactaagccttacccactagacatgtggaagtatggtagtgctttgcaacagaggcccgaagaccggtccttatatggccgaggtgctactatcaaaaccatgcaccccgagcccagcctaaaaccattttgaggattttgaatagagggggaggtgtgaatccaattccacaataatccatccattccatagtgtccaggtgatgagaatattcccaaagtctagagttgtaaaaccacctaatgttgcctaattaaccagcgaaacatctacctaaattcatactagtggtaccatgagtagagtgtccactagttggggttttgtttaatctagggtgaacaaggtaataatatcaataacaataataataaagtcataacaaaggtaaataggcatggctaaataaaacattgataactcgggaatttaagtaaagcgataatgcaataatttaaatcaaaataattttataaaatgggatccaatatgttcaaggatgatgtgacttgccttgctcgctttcccaaacgtcggcttcaacctccacgaagagcggatcttccgaagctgcagcatctacacgaccaacggaaaagaaaaggcttttactctaataaactccatataacaagcaggaacaaagcacaaaaatgggttcttgacttcttaaggaaaaattagagacttgaacggtccaactccgagttcaaatggccaagttatggccatttgaagtttatatgctctttaaatgaatatttgcgaatttcttcatttaaattttaatttaaaaagggtttattgcgtcagccgagggggaggggcgcgcggaccgtgtccacgggagtggggcccacgcggcagcctcacggtccacggtggaccgggtgcacccgggctcacaccggccggcgccgtgggccccacacatcagccgcacccgaggacgcgggcggctgacggccgggccccacgcggcagccactcggcgcgcccgagggcggccacgctggcgcggtcggcgggaggcggcgcgcccgcgccccgatggtcgccgccggcgaccaccagcgcggcggagcggcggctgagagaggggagggaagggggaaaggaggcgacggtccacggctcaccccggggcgacggcggcgacggaggaggcggccggagcggagggaggcggtggcgcggctcgggtcgacggggacggcggcgctccggcggtcggcgaccgaaacggaggggtggacgaggtcagcgacgatgcggcgaagccgaaggaggcggcgccgaggtgggaggcggtccagggcgacgacggcggcggaccggagctcggctgcgacggtggagagagagagcgatggcgcgagctcgattccggcgaggagaaggcgcggcaaagggtggaaacgggcgaaggaagtgcggggagggtttaaatagggttggaagggggagagagcggccggaggggaaggaaaccggcgcgggaggtcggccgccatcaatggcaccgacgagatttgcgggggcaaatccgcccgtttgaacgcgagagagagagggaaaaatgggggaaagggagagggaatcacggagagtatttccccccactttattgcacgcggggacgacgggaggcggcgggattcgcggcggcggcggcgctagggcgcgggcgaggcggcgggagcggcgggaggtcgtggatgacgggtgggccctacccgtcagcgagggtggcgggcgggcccgcccgtcagcggcgcgcgcgcggggaaaggccgagtgggccgcggggagaggagagagagaggggggaggagagatgggccgggccggcccaagggagggaagggggacttttagggtttttctttttataaaactttctcaactttgtttatttcttaataattattatttgtgctctgaaaattccactaaaatttatttacacattttaggcttttaggaaatatacaaaaatcctctaagccttatttgacttttaactttgcacattttaattgttggaggctttcacacggagtttaattattctaggcataatttaaaggatatattttagagtcgttttgggacgtgacaaacctaccccccttaaacggaatctcgaccccgagattcggaagaactggcgaagtgatcgggatgggctgccttcagctcgtcttcacgttcccaagtagcctcttcctcagcgtggttgctccattggaccttgcaaaaacggattacccggttcctggtcctgcgctccatggtgtccaggattttcactggcctctgcacgtaggtcaagtcttcgcgaacttcaatttgctctgaatcggcctgctcggatggcactcgaagacatttcttgagttgcgacacatggaaacatcatgcacgttgcccaaggatgcgggcagctccaactggtaagcgacttctccgcgtcgagcaatgatacagaaaggacccacgaaccgaggtgcgagcttccctttcgtctggaacctgtgtacaccccgcaatggcgtgaccctaaggtacacaaagtcatccactgcaaattccaggttacggcgtcggttatctgcatagctcttctgccgggactgtgccacctttagattatcccgaatggttttgactttagcttcagcttctctcaggatatcagtcccgaacacttggctttccccaacttggtcccacaatagcggtgtccggcatttgcggccatacaacgcttcatagggtgccatttgtatgctggcttggtagctgttattgtaggagaactcggcataggggagactcttatcccaggtcttcccgaaatctagaacacaggcacagagcatatcttccaggatctgatttagacgctcggtctgtccatctgtctgcgggtgatacgcggtgctgaaatttaatcgggtacccaactcttcttggagcttcttccagaagtgagaggtgaattggcttcccctatcagatacaattttcttaggaacgccatggagactcacgatcctagcgaagtagagttcagctagtttgttccctccataggtggtcttcacaggaataaaccgagctaccttggttagtcgatccacgactacccatatagaatcataaccaccctgggtttttggaagtccggtgatgaaatccatcccaatttcatcccatttccattctggtacttggagaggttggagaagtccggccggtcgttggtgctctgccttgacacgctggcacacatcacaaagggccacgaactctgcaatttcccgcttcatactaacccaccaatatttttctttcaagtccaagtacgtcttcgtgctgccaggatggatggaatagggactttcatgagcttcctgaagtatcaactttttaagttccctgtcgtctggaacgcatacccgatttccgttccatagggttccgtgttcatcctctgtgaaaccagcggctttaccctgtttcatattcttgaggatcccatgcatatctagatcattcttctgagcctcgcggatttgatcgagcaaggtaggcttggcttccagcgtagccaagaatccatgaccaactatgcttaggttcagggcttccatctgttgattaagttccggtggaatgtcacggacgccaagagtgttgcaacggctttttcgacttagagcgtcggcgaccacgttggccttaccaggatgatagtgaattcccacatcataatcgtttatgagttctaaccatctcctctgccgaagattcagatccgactgagtgaagatgtatttcaaactcttatgatcagtatatatttcacagcgattcccaatgagatagtgccgccagatctttagagcatgaaccacagcggccaactccaaatcatgggtagggtagttgccttcatggggccgtagctggcgtgaggcataggctaccacatgaccttcctgcattaatacgcaccccaatccttggcgcgaagcgtcacagtacaccaggaagtccttgcgagtatccggtaagatcaacactggcgaggaaaccagcttttctttgagagtttggaacgccttctcgcattgcgggctccacacaaatttttcttctttcttcagcaactatgtcatgggtcgagcgattttggagaagttctcgatgaatcttcggtagtacccggccaaacccaaaaagctgcggacttgagtgactgtcttgggttgcttccaatcagtgacggcggtcaccgtgtcgggatccaccgcaactcctttagcagatatcacgtgccctaagaacttgacttcggacaaccagaactcacacttgctgagcttggcatacaattggtgttcccgcaactttcccaacaccagacggagatgctgctgatggtcttcctctgattgtgagtacaccagaatgtcgtcaatgaaaaccacaacaaacttatccaagtattccatgaacactttgttcattaagttcatgaagaaggcaggatcattggttagaccgaacgacatcaccgtgaattcatacagtccgtatcgcgtggtgaatgcggtcttcgggatatcttcttcacgaatacgcaattggtgatatccagaacgaagatcgattttagaaaagacagtggcacctttaagctgatcgaacagatcatcaatccggggaagagggtacctgtttttgatagtaacttcattgagagctctgtagtcaacgcacatcctctttgtcttgtctttcttttccacaaaaatcacaggagcaccccagggggaagtgctcggccatatatatcccttttctttcaactcttccaactgtctctctacttcggctagttcatttgctgccatacggtagggtcgcttgtacagaggagtggttcctggagcgagatctatccggaactcaatctctcgcttgggcgacataccgggtagttcttccggaaacacgtctccgaactctctgacgatggggatttccgacagtcctatctgatgaagttctgaactgccgacagaggttgggggtgcaaagaaaacaaccggttgttccagcccccgatacagagtgacagtgcgccttgcgcaatccactactccttggaattgagccaatcaattcatcccaaggatcacatccaagttcttggtgtctagaaggatcaaatccgaggggaaaggaattccctggattcctataggaacggcagggctataatactttgctgtcataacccctccaggggtggtgatgagcagagggttcctaagcctttctacccccaactgatttctccccacgaatggcacagatataaatgagtgggaagctccagagtcgaacaaaatggtagcagagatggaatgaatgaggaacgtaccaacgatgacgtctggagttgtcagcacatcctcggcagtcacgtggttcacacgaccccgaatgacatccttaccaccgttgttggggcggggaggcgcttggccttgctggcgcctcggctttgggcatttatccgcaaagtgcccggactcgaagcagttgaagcacagacgctgctgaccttgagcgtctctgcggccttgaccaggctgcacaacaggcgcaggaggacggggcgcacgggtcccttgctgactctgctgttgctgtggctgtgggacgcgcaccacaaattgaggtcggggcgcggagcgtggttgctgctgctgctgctgctgcgaggaggatccccctggatagggaatggtgtagcggaccctttagttagccccctgttgattgcggaaatttgccaagcgacgcttgtgcgactccagttccttgtgcttggcttccaagcggatgctcttgtccaccaaacgctggaaatccggataatccccggagactagacgcacggacagctcagggtccattcctgccaagaacttctcctacttttcctcatcttcacgaacatcctccggggcgtaccgggccaggttgttaaactcatgcaaatactccatcacagagcggttgccttgcttcaactctcggaattcccttttcttaagggccatgactccggccggcacatgggtcctccggaaagcggcggtgaagcgggcccaagtaataggctgtccttctggctgcgtagcctggaagtggtcccaccatagagatgcgggcccctgcagttgatgggcggcgaagatgactttctcctcatcattgcactgcacggtatccaactttttccccacagcatgcaaccaatccaaagcatccacggggttattggagctagagaagataggcgggcggatgcggaggaactctgcgagtttagaatgttgcgggggtggtggtagaggtggagcattatgctgtggcggattttggatgtgatggaggaaagcagcacttctcctggttgtcaccatctgaaaatcccacacagaaccagcaaacagagagagctgactattaaaactaaccacccacgactaccataattcttgaatttatttctgctattaaattggttcattaaggttcaagttggttaagcaaataaaataaagacaggctccgacacagttataccacacaccggtataaccatgccccacatgactcaagcagaaaaacaaacgagaaaaacacacgcgcaagcctactaactgctcgtctacttctgcgacgggccagggcggaaggtgagcagcagcgcatcctccatgctaccaacgccagaggctccctcctcctgaggaaccacgggcgcgggctcggcacgaggggtctcgacgaaacaggtccatgccaaggactgacgaacaagctcgggcctggaggtactcttgcgggcggtgatcttcaggctgcggcagacgcggcggcgcttggggcgacagacctctccctgggcgatcttgagctgacacagctgcgcctctactgcgtccaagtccttctttagctgcagattctcctgacgcagctccaggatcttcatgttgttctcgaccaacccacggcgcaccatatgatggaagttgatacgggtcgcgttgtacgcctgcaccatgcgcgccaggtgcatgatggtagcgtcatcctccgagctagcatccctgaaggtggcgtagtcgcgggctcctccgcgacgagggtggtagcggtagggcgagtgctgcaactcgtccgggtagcgctggtgaagagtgccgatggcgaggagtgcagcgttctggcaagcggcggagaaagaatctccacccgcggtgactgccaacgaagtcctctcgggagagccagtgaggaccactacagtgacctcccaggcagcgtggggctctacatcatcaccctcctgctccaggagctgcttgccctggtagtccactccatgcggataccccaggacaacgcacatgccccgcagctccaaaacaaagccagtaaggtccaggccacgacggttgatgctgccggccatctacaagcaaggacaaaagagaaaaagaaataaacattttagagaccagcttttgacaataaatgaagcagcaggacagagagagactaaaggattttcacaaataagaaaggatttttatttcgaaaatattgctaaggcttgggatctaaagctcgttctagggtcaagggggctctgataccaacttgtcacgaccggaaataacccaacgggcgttccttacgtgcgtgtattattccttgtcccaggaggcaaggtacaccaaaagttgatacatttcagagtttatcaagcggaagcgtaaataattaatttattacatgggcggcgaaagcccagcacacacaaagacaaacgggaaacagcggaagactagggcgacgaccacaggcgcttgacggcaggcacgagctagacaccaaagccttcatcttccaggaactccacttctgggattgggaaaaattgagcaagactgagtacaaccaccgtactcaacaagacacacccacaattacagaataaatgcaagggagtacaagggagccataatatagggggttagggtttgcagtaaacagcattaaaagacacttagttgctcaaagctattttgtaaacacgattctagagctatacaatattattaatcaaggccgtgaacccacacgaacctgctttaacccaaggcctacgacgattcagaccgaactggcaacccgaccctgggtcccagctcgtcccaagccaacccaggccaaccattccacattttagttgttaagcaggttttaagaattaaaacactaacttgggtacattgctaggcttgcccataatcgagggcgcggctattcgaataggttatactctgatcagaggtgtacatctttacccacaagacacatctttctcacgtgtaaccacgtgccacataccacaactgtatatggacggaagacgtgacatagtttccaacccatcctagccatagacaagagtactgacccaaccccacctacggccggaacctccgggacaggtaggcaggactgagcccctagcagcaggacaccggccctgtgccatgacatctcgactaccgggccgcagctcgtgtagccttcatttgccctagagatgtccatcgacccccgacttcgtccatctccatccgtgtacttttgtttataaccagactgagccacaaactaagccttacccactagacatgtggaagtacggtagtgctttgcaacagaggcccgaagactggtccttatatggccgaggtgctactatcaaaaccatgcaccccgagcctagcctaaaaccattttgaggattttgaatagagggggaggtgtgaatccaattccacaataatccatccattccatagtgtccaggtgatgagaatattcccaaagtctagaattgtaaaaccacctaatgttgcctaattaactagcgaaacatctacctaaattcatactagtggtaccatgagtagagtgtccactagttggggttttgtttaatctagggtgaacaaggtaataatatcaataacaataataataaggtcataacaaaggtaaataggcatagctaaataaaacagtgataacgcgggaatttaagtaaagcgataatgcaataatttaaatcaaaataattttataaaatgggatccaatatgttcaaggatgatgtgacttgccttgctcgctttcccaaacatcggcttcaacctccacgaagagcggatcttccgaagctgcagcgtctacacgaccaacggaaaagaaaaggcttttactctaataaactccatataataagcaggaacaaagcacaaaaatgggttcttgacttcttaaggaaaaattagagacttgaacggtccaattccgagttcaaatggccaagttatggccatttgaagtttatatgctctttaaatgaatttttgcgaatttcttcatttaaattttaatttaaaaagggtttattgcgtcagccgagcgggaggggtgcgcggaccgggtccacgggagtggggcccacgcggcagcctcacggtccacggtggaccgggtgcacccgggctcacaccggccggcgccgtgggccccacacgtcagccgcacccgagggcgcgggcggctgacggccgggccccacgcggcagccactcggcgcgcccgagggcggccacgccggcgcggtcggcgggaggcggcgcggtggagcagcggccgagagaggggagggaagggggaaaggaggcgacggtccacggctcaccccggggcgacggcggcgacggaggaggcggccggagcggagggaggcggtggcgcggctcgggtcgacggggacggcggcgctccggcggtcagcgaccgaaacggaggggtggacgaggtcggcgaggatgcggcgaagccgaaggaggcggcgccgaggtgggaggcggtccggggcgacgacggcggcggaccggagctcggctgcgacggcggagagagagagcgatggcgcgagctcgattccggcgaggagaaggcgcggcaaagggtggaaacgggcgaaggaagtgcggggagggtttaaatagggttggaagggggagagagcggccggaggggaaggaaaccggcgcgggaggtcggccgccatcaatggcaccgacgagatttgcgggggcaaatccgcccgtttgaacgcgagagagagagggaaaaatgggggaaaagggagagggaatcacggagagtatttccccccactttattgcacgcggggacgacgggaggcggcgggattcgcggcggcggcggcgctagggcgcgggcgaggcggcgggagcggcgggaggtcgtggatgacgggtgggccctacccgtcagcgagggtggcgggcgggcccgcccgtcagcggcgcgcgcgcggggaaaggccgagtgggccgcggggagaggagagagagaggggggaggagagatgggccgggccggcccaagggagggaagggggacttttagggtttttctttttataaaactttctcaactttgtttatttcttaataattattatttgtgctttgaaaattccactaaaatttatttacacattttaggcttttaggaaatatacaaaaatcctctaagccttatttgacttttaactttgcacattttaattgttggaggctttcacacggattttaattattctaggcataatttaaaggatatattttagagtcgttttgggatgtgacaaggttgagttggatcttggtggtcactcaaattctagaaaatgacctagaggtgttggggttgaaagctgtagatttgctctgagatttttgcacaagtgaggcaaggggttaatcgagacccaactctttggagcacctcaacggagagtaggattgcaagataagaatttcgggacaaatcgtctttgtctcttctgtgatgtttctgtgcatgtgttagagcacctcaactgctctgtttacctatgatccatctcgtgaaatttagctttgtccctgttagaatttcctagtttttttctgttgcccggaagttccgatacaagaacaccggaagttatggactgtctgagcagaccgaaagttccggtgttctacaccaggaggtaccgggcctgttgaattttatcgctgtgatttgtttgtgattttcaggaaagcctattcaccccccccctctaggctacatctctgcgcgttcaggctacctcgaccatggtccctttgccccttcactttagctacctcgaccagtggcggatctagaaaaatgattcattggtgtcatagcatgctaattatatttagactatagtgttataatttatggataagcagtttaatcataggttttaccgaaagtcatcgatatcgcctgacaccgatgctaacactgtagatccgaccctgacctcgataatggcacaaatgtctattatctgtgttgagcactctgacctatttcttctttagtttaagcgtttatgctattcacacttggattgcaggggaaatgaagtatatggtagttagagatatattaagatgggattgatttgtatggttgtttttcatatttctaattcctccttctctctacccatgtactccctccgtctctaaatatttgacgctgttgactttttttaaacatgtttgatcgttcgtcttattaaaaactttcgtgaaatatgtaaaactatatgtatacataaaagtatatttaacaatgaatcaaatgataggaaaagaattaatgattacttaagttttttgaataagacaaatagtcaaacatgtttaaaaagtcaacggtgtcaaatatttagagatggagggagtatcttatatctatacatatctctcaaagctcgttacaatcaactagtccacaatatattctctctgtattatttgactttgacttctggacattttggggaattctcaaaagatgggtttggagatgagttttacattttcttcaatgaattgaagtataaatttgaggtaaaatggggaagttttgggagttgctcgaaggaacttttgtatggggattttaaattttggtatgaagcttgtgttctgatttttttttaaccgagggggaactttgttccagcttttatatttggaagaagagaaatgacccagtttataaggaaaatcaggtaaaaaaccaaacaactgcacggttaattacatgaaaccggctcaaacccaccgctacacaactaacaatgacggtggagcccaaacgcaaaacatcgctgctatgctaaacataaatgcgacacaacagctccgacatcgcagaagaggtgttatcattccctagctagccgcccaagcgacccaatagcgccgacttcacaatcgcagcgacactgaagccacgaaagtcgccaaagcgaaaaacagctcgaacatccaacaatggacatcagccaagccactgaggagccacttcctttgcacggccagcatcacaactccttaaaatagactgcaagttctgaatttttgggtctttgatgttttgtgtcaatagaactatagaaggggatagttgttgggtcttatgtcagcagatggaattttggatgctaaaataggttttactaaaatatcttatccttccgctgcgaaggatatgcgagaggtttttcctaaaaaaaaaaagatatgtgagaggaaactcctaggcccaacagattgcagtttgtcacgagaaagggcgtccaggaaaggaaaaggccatctagttcggtgtggagacaccaaccgttttcctgtttgtcctaacttctttggcttttttttattatgtttcctaagcaccaggattttgtaataaaagtacaaggaaaatcgtccactccttgtcattttggtaacgctcccgctcatggatccctccattcacgtgaaacaattatcgcaatgctacatctacacttaagttgcaccacgaaccttccagctacaaattgggtacctaggtggtattcggcattaggagaaagaaaaaatgcagcacataattttcctcgaaatgagtctgcattgtatgattaaaaataatgtttgcatttcagcacatgctcatttgcccgattatcgtattattctcgtagagctgtatgcttttaatcttccttgtcatatgtattagctcaaatacatatcgcgagacattttaggatatcataagttaattttttttagagtttgatcaaatttatagaaaaaatgtgacaacatctataacatcaaattaattttattcaaattcactggtgcaaattaagtttattaaattcactagtgtttaaatatttttaaggactttctataggacagccagctgaaatttttggtcatattagctgagttttagacggggatccttcccaatctgacacatatcaagatctccaatgacagatataccaaagaagattatcatagtcctccatgataacagtagcacaaacattataaacgatatccatcaattgtagaaataattatgtttatgtttccatcttagagatagcaaaagtagttgtgaccataagcttgtgagttgtgaccagacaaaacaactaatgcaaccgatccgactaagaacaacgataattgggtcatagagttgctaggtaaatttgctttgagaaaataattttatctaattatgatattcatagtttaaaacatagtgctaacaaatagtaatgattagaaatatatattggaaaccaaatcgatatcaaagacactaggctgtgttcggcaccccttttcccaacccctatctcttatttttcacgcgcacactttagaaactgttaaacggtgtgttttttgcaaaaagtttctatataaaagttgcttaaaaatgaaactaatccatttttgataaaaaaatagctaatacttaattaattatatactaattaaccgctccattttccgtgtatattgtttcggttgggaacatggaatggcagacacagccttagagaataaaacatgctataaatatttttaaaattgttgatggtttaattttaaccgaagggagaacattcaacgattctgcagctgctccgtgctcacgagtcttcctgtaccaaaacgacgcattgatttatgttacggtgtagtaccacgtgaaactccgggtacgcctagccccccatgaatgcccaaccgacaaacaacaaaaaagcgttactgcgcccacaccaacctcgcttgctggccgttggattggattggatgacgcccacccggcccaccaccaccacctcccccctagagatggcaacggtgaattcaccgttgggggtcatgcccgcgtccccgtcaccgcggtgaaaatatttcactgtccccgcccccgtcaaccacgacgaggctataatttctccaaccccgatcaccacgcggtgaatttttccccgtggtgaacccgtccccagttaaacaatatattcacagtcacagattgtagtatgctcaccttgcatcgtcactgttgtagctttaggagggaggtggccgaaggttgaagccatggtcggcagatggcggcggcgacgacagatggcggcggcgactcccgacggcacggcgatgacggctcccgttgaagatggctgcaggctggcggtgcatcgacggagcctgccggccgctcctggtaaagacggcttcaggcgccgcgcggcccggcgccgcgtcgacgaaggcggccggtgacgggcagcttcagtctcctggcgagaaggcagcgagtggcggtgcgcgtggtggctggcgaacggcgccggaggtggctggcgaacggcggcgcggctcccggtggactggcgaccggcggcgcgcatgactcggtcgggtggctagtgtggatctagatctggatgggtggaaaatttggagattgacctgttgacttagggttagattatatatgtctgttaaatgggcttcaatattatgggccaatacatctaaaaagtctagaattcctcccttgtacagtacagtcgggtcaccgtgggg

SEQ ID NO: 7754 - DNA, 2613 bp, Oryza sativa
ctggcttctgcaaacctctgttcatgcaaggttaccttctgtgcaaaatgtgacaaactatcaaagtcttgagacgagaacttctccctgatcggagcaatcataccctaaaagccaaatcggctaactgggcatcagttaaactcaaattgtagcacttattccttatctctctaaatctctgaatatactcatacacaggctcatcatgtctctgcttgatcgctgttaaatcgaacagtttcatctcgtgaatcccactgtagagatagctatgaaagtgcttctccaaatcggcccaactattgattgatccacatggcaaagaagaaaaccaagtgaaagctgatccagacagagacaatgggaacaacctaaacctcaaggcatccacagccgatgcttcaccacactgagctaaaaatcggctaacgtgttcataggttgacacactatcctgccctaagaattttgaaaagtctagaactttgaatcggttaggtagagggactctctcaaaccactcagggtaaggatgccgatacaaatttccaacgtctttcggcatgagcccaaacggctccttcctcacatccacaatcatatcggcccatagtcgttgctgaggtactccttgaggttgttgtggcatgagctcgaattgattgtattgaggaacaaactggggttgagcccgtcctccctgctgatattgaacttgcagtgaaggaggctgatattgataattcaaattgccccctggtaattttgaaaatttggctgaatattgcacaccaaatgctaaggaacaacttgaggtatcactgtttgatctggctgtacatgatgaaccaagtgctctgggccaacttgattcgcagcatgctgccttggctgattgtcaggtgttgcaaacccagccgatgcattcatcaaaccttgctgttgaatcggctgaataacctgttgccttaatggtgtctgctgaattggttgcaaaacctgccgccttggtggtgtctgctaaatcggctgcacggcttgttggtttgatggcgtttgttgaatcgactgcacaacctactgccttggtggtgtttgctgaatcagctgctgctggactgggtccacggtaggtgaggtggtaaaaacatagctgcaacctgatcttgcgttagccgattcacattctgtccactatgctgtggttgttctctcaccaacaacagatgattaactaattgacctggtgccgacgatggtgcagcgggtgcaggagccgatactggtgccgtcggcggagccgatggtgcattaggaggaattgattgaacagctggctaattatcggtgattaagggctgataattcgggaaaacacctcctggaaaataaaccggtcctgtagcctgatattcagccattgaaccgtcaaccattgtcttcaccatgtttgacaaagtgttgactaatatcccagattgattgatcaaagtatggtgcacggcatagtcaacctgatcctggaagttgttaaactgtaactgtgctgtgttgccatcttggttaagacctccaccttgaaatccctgaacaccatcaccttgaattccttgaaagccatctgcagcacctttattactcggttgagccacgccatctggagcttgtttcacttctccatccttagaagaacctgtcccagaaacatcagcaattacttttactttgtacttctgaacaagtgttcccttgcgggtctccgtgaatgagctcaagaactgattccgtgcttgttgcatcattgcctcaagatccttttgctgctcaggtgtcaatttatctagagtgatgagcacaatgttgccttcatcaacctcagatagacccagcttgtggatcttagctttaacagagcgaggctcaccagccaaagacggcgacgctggcggtttctaggccatgaggaaaaacagctgttgtgattctgacttccgatcggtcccaccgggcgtgccaaaagcgtgttgatgtgaaaacacaaggcctgggagatctgcttaactccagtgtaggtccaaaactcaccttcgggtgtgctagcgtgccagttgatttgatcctgcaatcaacaagaacaaagacaaagaaactgcggttgaatccataaacgatagccgatcggctaagtgccgatgacatatcatttatctttgagccgatgtcatatatgcatcgatcggcaatcattaataagtaagaaataacaaaatctactagatcgactatagatattaacgatatataatccttatgtcaatatatacttaaatcaagtgattgggatagatcggtcgccatgccgagatagtataaatcacttagatcgaaatatatattaacaacgagactatatatgttcatagcatagccaatcagatggatctagcatgtatcggctaatactccgatactactctatgtaaagatattaaagcaagtaaaatataccaaacaaagagcctaatatacttaaatgccaccagatcttaatataaagggtagatttaacatgtcaatgaagcatacgagataaatatggttaaatcaagt

SEQ ID NO: 7755 - DNA, 8081 bp, Oryza sativa
agaccacagtcaaacgaggctttggaccggtatgatacaataaaccaagtttagtgatctcgatgtgcgctttacaagttcatgcacctaagtgaaaactcctgacaagtttaaggatcgttggtgtattttactcgtctagaagtctattatttccatgtgtcctgccttctctgaatcttgcgagttttctgaacttgttatggtctcctatactgttcaagcaccttattttattgtcacgcttgttgtgttgcaatgccgtttggccacttgtgccctctcttttcatccattttgggtgttcatcacaggatgtacataactgaattcctctcccttttttttcgtcatgtaggaggaagacaaggcacggctagtccaagaaacagggctacagctaaagcagatcaacaactggttcatcaaccaaaggaaaagaaactggcacagtaacccatcttcctccaccagcgtcaaaaccaaacgcaagaggtaccaaatcaatctttgcacatctgtcatatagcctggagttctgccgatccattgatttgcacttaattcgaacaaaaaaaagtaatgcaggtgataacaattcgtagcagatgatcgccgagggctgaacactatgctgggttacagggcaggaggaattcatccaaagcaataggaggacaattgcttagatcaggaaatgttctgcaagatcaggatcaggagccgtatattagagaaccagttatattttatagacaaaactaattgcaagtaaacatatatagttctgtaagcgcttgatttgaagaaaaggggaaatttttccaaaggggttgtataaaatggcgaaatttatatttcagtttctagataccactgggtaatactgctcatagcactggtgttgatgtttttgttctccatgcgtcgtagacaagcggttgaaccgtccgcttcagacgatttttttcacacgtatatatgtatgtattgctgtgggtttatttagcttatctattgtgttctgctgcactctgtgtgcttaatcagttaatcacttatatatattctaagtatcatttgttaatttgtgcacaagagttgagaaaatatcacacatgatgaatactttgcattcttttatactactcccttcgtcccatttttaaatacagccatgattttttcgcgctcaactttgactgcccgttttatttgaattttttttaaaaaataaaaatataagtcacgagtaaagtattattcatgttttatcatctcataataacaaaaatactaattataaaaaaatttcaaataacaccaacgttgcccttaaaatccagtatattgcaaaaaaaaaaacactgagttatgtattatctgttgacgtgaaattacgtcatgatacatgaaaacctgggaaaattgcttaacttcaatgtattatgagtttcgagcgcgccagttagtttgatccgacaactaacaagatgaaaatagatcgataatcaagatgttgatcatcaacttagggagccgatatcaacttaggaggccaatacagtatttagaaatcatcacaaaataacttatcgctccgatgaaacactacacaaaaacttatcagcttattaatagcaatctgatagatcggatttaactgagacagttataaatggtcgttaagtgaaaactttaaccgtcaactcctgcataaaaaatataaaatatattatcaaaacatagtggtaggggtttattggtggggttggccgaggcccaacaaattaaggttgcccagaccccaacagttcttaggcccacccactcggggaaaggcctaatctccctaaaagactagtccaataggggaagggtggctctcccttttaaggtggcttcctcctcccaagctaagcaaggtgggattattcagaggctcacatggttgccgctcgacttttgcgtctttgccaacgggtaatagtggaggatgtcctcatcaacctagatagaaatatcggacttaaccgagaaagttctagccacgctgatacaagtgaagttgatgaaacttacttcattgtcggagatcgaaactaagaactcactagaataaaatgtggcaatgtgtcacacccagaaattcccgaataaaattccaagcagaatgtgcattaaaatccccgtccaggaccggccggggtacacaaacgacaaagttgacatacagatccacgtcttacaaacattataaaagtcttacataaatgcagcggaaaacttaaaggataactggagctaagccttgacttggactgcagcgggaacaccactccacaggcatcctcgatggcacggacgaagcctactcctcggagaaaccaccatctgacgcatactcaaattctggggtttggggaaaatagagcaagactgagtactacccactatactcaacaagtcataccggaataggggtatgatgcagggaattatcaagggatagctataatggttcgtttgcataaagcgggcatttataaacagaagttgaaagcagtaaaatagttgtaataattaatcaatattaatcatccactgtccaacgctataccacgttgcaacaggcctaaccatccacctatactattcaattccattagactagtctagggtgagtctaatcacggtgaatctggttgaccgcccataaccgcgggcacggctattcgaatagttttactctgatcagaggtgtacaactgtacccacaagacacagccccacgacacgtttccgtgggccgacatgccaccacgacataccggaaagaggccgtgacaggacccttcgcataaccccctctaaccaagcacaccacacctcaggtttcacccccactcctcgcaaggcagcgggcagtcccctctcatgcctaggtgaatccggaagccgcataggccatcgcagggcccatccaaactccatcacgcccacccttgcctggatgcgtcggctagaggaaagctacactacaagcccagtcattgcccacgctggcttatggtaaatacgaggaattcttccagggtttcccgcgaagcagtccttaattgccctaggcgcgaccatcaaaaccatgcacccacggcccaccatttaatattaattaattagccaacaccggagcggtgagcaataaccaacatcaatcctagaatctgatatctatgcatttaatgtagttccccattgtgtgctagttgaactaagcaaaactaagcattccctagtccaatctctagtcatgttatatcccaagctaacaaaggaacatggtacaagacagcatggctatgacactaggtaaacatcccatagtgttattataaaacaatgcagtatttgaaggaaaacaatggagcatttgcaatatagggtcaacatgttcaagtgacaagcatgacttgccttgctctgcagctggaggaacttcggcgactatttcaaggtacaccggagcgtcgggagagacggaatctaagtgacatacaaagtaaacaatacaaacaggctatatgactactgaaacagagaacaaaaccatttttgatggattctacacatttttcttgatttactgagacttgaatgggcttcaacggagctcggatgatttagttatgaattttagaagatttactgtgtttttactataaacggaaaaatccttaattgatttattgcgcaataaataaatcccggggagagagagagagggcggcgccgacatgcaggccccacatggcagtgacacgggtggcggccgcggtggaccgagtccacggactggggaaaggacggcgcaccacgtggcgctgacgtggcgccgacgcggcggccacacggcagccacgtgggcggccgaacggacagctcatccggtagatcggacggcgagcgtggctcgcggccggcgcgcgcgggcacggctcaagccggcccagcggccatggcgcgcggcggcatggcgcgcgtgcagcggcgacgcaaggcggcgaccggcggtggagggcgacggcgtcgcgacgacgcgggcgacgaagcggcggccaagcagctaagcggcggcgcggcggctagcggcgcgggagagagagagagaggaaggggaggagggatctcaccgacgacgaccgacgacggcgagcgacggaggacggcggcgacggcgggattatctccggaaccacctagcgaacacggtggaaggggttagagagggagagggaattggaagagggcgaggatgccggccgaaggcggcggccatggcgatgctcaccggcgaacggcgcggagtgggttccggcggcgggatccaacggaagaggggtggacggggtggctcgcacgacggcgaacgcggcggcgtcgtcggcgcggctcggcgcggcggctagcggcgaccggagcggtggcggcggcggcgaagaggagggtgacggcgctagggcgttagagggcacgggagggctcggcgagatggggaaaaagagagagggggtggcggtggagcttaaatagaggagggggagcccagacgtggccggtaaaggtgggaatcgccggccgacgtgggggagtgggggaggagagagaggcgggattcgaaatcgaatcccggccgtctcgggcgcggcgcgggcgagagggagggggagtgggtgcgggggacgcagcgcatgcgcggcgtggccgacgtggcccagaggaggcgggaacgtgggtgcggcagcggttgaggggcgcggcggcgccggctggaggaaggggacgggcctgataggtgggccccacctgtcggcgaccccagggagaggagggaggtggccggctcggctgggcctcggactgtcggccggcccagcgggaagaagggggggaagagagaatgggccggcggcccaattgaaagaaaaagagaaaagaaaaagggaaaagaaggaaaatggattttcctgggattaaatattgcttgtgctcaattttaattggttaaaattatttctagagctctgaaaattccactaaaaatcttgttagcatatttcgacatgtagaactcaagaaaaattccacatgccaaatccgattattatttgcattattttattagggttttctcttgcttttacaccgatattttctctggtggattataaattcaatttaggcttgggaaagaacttcagggtgtgacacaatgcaccaaaaggaattgtattgatatgtgaagatgtcttacaaagacttcgggtgtacatatttataatctcagattgatacaactttttattagacacggtataaaatttcctaacaagaaaaggaaaataactaaacctacatatttaagagatatactaaaaatatgaaactgcctttgttgtagtcttcacgattcctccttgacctcgcatgatctggataaacttccatcgataaatcaatttgtttccttaattgaatccactaaagaaccgtaccaaattttggtgttaacacatgcctcctaatttttgagtatgagaactcatactacaaaactatcttcttcctgatctttatgacttcaaaatttattcatcttttgcctcttgcaatcggttttcatgagttgataccttctacatcagatgagctaaactttcaaactcttgaatggaaaaatctttctttgataggtgttgacaatccttgaaataccaattctgctaattgtgcatcacttaagctcaaactatagcatcgaccgcgaacatcacaaaatctttgaatatattccaaaaccgattcatctacttgttgcttaagcaatgccaaatatgtgagtttcatctcattgattccagcaaagaaatacttatgaagctgcttttctagatcggcccatcttttgatagaatttgaaggtaatgatgaaaccatataaaagccgatccaaacaataacaatggaaagaatctaactttcaaagcttcaccagctgatgcttctccgcactaagctaaaaatcgactgaaatgctcaattgttggtatattgtcttgtcctaaaaatttagagaaatctggaaccctatcaaactacttaggatatgggcattgatacatataggtttgatcgatcccaaactgttctctcatcatctctatcggcccactcattattccttacattgtccatgttatagtgatgcgacattgttccttgcatacaatgatacccttcaccatgcgtatactgatgaggttcttctggccaatattgatgtagttcttcatactgatgtggttgcccaccaagctgaatacgtccataaaatatttgaggcactgctgtcatcattggcatcaacaacggcatatgtatatcaatgtttgccgatgtctttaatccttgagcaattgtttcgttcaccccgcctgagttgaatattcattctaactaggaggaagccgcaccccaatagaggtgcacgtggttttgttatttatttttctgttttgtttatttgaatttatattttgcgttccttttaactgctgtcgaggacaggtcgagcacttctttaccgtgaatattctagaggaccatcatcaagcaacatgttccattttaaaaccaaacttgtcatagttaagattctggcttagaataaatgggattgacatttttcttttatgttcagggcccgggggccatccgtttgatagcgattttaaaagaaaaagttcactttagttctcttatctaatgattgaggttgattgaatcgggtcccacaacggtaaaaccgggacatccattagctttgcctccatgccactggcctctacaccctccgccaccgcaggcaaccaccacaaccgtgcgcagccaagggagagggaggggttgcgctagaggaagacggtgacgaaacacgagctcgacatctagcgccgaagggaggggaaggaggcgccgatggccgcatccggggaggtaggggagaaggggaagaggcaccgtctcgctggcctttagacccctccgccccccaccggccaccaccactaccgtgcatggccaaggaaaagggaggggtcatgttggaggaagatggtgacgatgctcaacctcgacatccgccaccgtccaaaggggatagagagggagagagggtgatgaagggatacgggtaggctacgatagcatgaaataaaaattttctacgtagactaggaaccatgcgagttagggatcacaaaccttagtgtatttgtgtacgaaaccatttgcctcatgatatcgattaagtttaaggctagatatgtgccatcttttaaattgcttaatcatccactcgatcatgtattagattaagtgggatgaggatcaagtcaatccaaccacgttaaccgaaaccgccatccaaaccatcttgggacctcgtttgtggtttagcggttgtgggatgctattcaaactcgatcgggagccaaattaaactttttgtcatttcaaaacataaaggaaaaagtataatttgactccctcaactatcgcccgagtatgattcatgtcctccaactacaaaaccgggtatatcgactcctccaattatcaaaaccggtgcagacaatatccctaggtggttttggaggtggttttggcttacgtggcgcctatgtggcggtcttgaccaagtctttgtcctatgtggcgcttacgtggaattagaataaaaacaaaaataaaaaaaatgtgggaccccatatatcattcacacaaaaaaaagtattgtgggacccactaacatgtgggtcccacatgtcatcctccctctccttcccttcttcctcccctcctctcccttctctctctctcccccctgcctttctcttggccggagtggcggcgaggatggtagtggggagcggcggcggtggcggcggtgccggtggggacgagggtggtgccagccgaggagtgcaacgccgcggtggcgtcacttgccgagtgccatg

SEQ ID NO: 7756 - DNA, 13019 bp, Oryza sativa
ttcatattggaatcggttgtcgtttgccgatgtacaatggtcgatattgttatgtcgcccttagttcaagctataattttatcaatgcttttgacattgtaaaattaggggggcacatatatgaaaaattgcaaatttttgacaaaatatggagttatgttgaatcggcatgaaagttattaagataatttcaatgaagagtcaaagttttgttagccgattacaaaaattcctaagacctattatacaagatatcactgagacaaatattgctggatagcccaaatagctctttgcctgatttgttgtacttcttcaatggcttgggtatcttgagcatcggttctaaggatgacttttaaagacttggtcagatcaacaacattcttgatagccgattttagtcttgccttctgctcttcgacaaactttgggagattggctagctttttatgttccatgtccaactcggcgttgcattcttgaagttgtgccaaaagctcaatcttgcgagcttcgagccgatcaatattagatttgatcaggccctcagatagctaatcaagcttggccttctcttcatgaacaagctgccgattggcttggattgtggcctcgatatctttgcgctcccaacattcagctagtctcagcttggctttctccagcttgaattgatgctgctcaagatagacggcaggagtaaggacatcggctagttcatctgggatcagagcttgaacctcatgtagccgagtcctaattgatccgcaatcaaccactaagctatctaacgatgatgcctctagccgatgagagatatctttgagaattttcctcacatcatcggataagggggctaaagctttgcttgtggtatcttcttctgtctcatcaagataatctctaatgtcaaaagagaaaagattagctaagacctgcaataatgatttaaagagagttagagctaaatagacatagccgatctaaattcttgtatcaaaaggaaacttactgggatagcaggagcagttggttgttcttcttcctcaacatgatggctccctatagccgatggagtttggtcactcgacgatggttgtgcaggagaagagggaggaggaggaggaggttgtaaaagagacaaatgttagacaaaattggctgagatcaactagtgaaagcattaaagatatcttactggtggagccagttttagagttgttgatgccgatttcttcttcacagcaattctctttttctgcaaggatgagattagtgagcaatcggctgaggataaatagttataaaagagaatcaaggaaagatattcaccctagagaagtgagctggagcagagggggtcggaggagtttgcttaggtgaagccgatggagttctttcagtatcgcttatttcatctgcggcttgatcaacatcctcgccgatttcttcttcatccagagcttgttcaatggatggatctagggcaggcagatcatcggttggtttaggcttctttaatttggccttcttctttggagtaggagacgatgtatccatagccgatgacctggttcttctctttttactggcatcggctggttctctgatgagcccttggagaagagttgaagtctggggggcatgatagccgatgacaggaggagatggcccacctccatttggaataaggcctggtgcatactctatgtccctgccactattggtctggtgaggaggggagaactctgtggtctgcaagtcagaaaagaaaattaattaagttatgaatcggctaagcaattatttaaacggagttaattaaatgaagacatacctgagggataacatctggaaagagatctgtcatgtacatagaagccgattgatggaatagatgcaatttccattcaccccaccatctgtcaaagtttttgctcctgaactttgccatctctatattttcaatgatgcccagaggaggtccttggagattgagcagccgatccgtcatcaaggttgatgaaatttcccctcagcactggatcttgtcagcaaagaataagccgattgggagttggcccattccaagttgtctggctaagctcatcgggtgatagaattcataagaaacttggatgtttcttccctgatggatgccaacaggaaggatgcatgggctgattgcagctgagaaaacttccctggacttttggtatctttcatgattgatgtcttcaaatctaaagtccgatgggagctcaaggtttgctgaatcttcataaggaaaccaaactcaagcatctttttgaaagccctcatagaaactgcagaaccggtccttgagcagttcaaccaataattttgctccagcatcggctggtgtggatgcatattctctatatgacatgcatctgcgatgagtgcgctcttctccatcatcttctacaatcggctctagtcttgggaattcggcttctgttacagatggccgattgacaactttcatgaccatcagatttagccaagtctgcagcagacaccatggtccacctgctccaactactgagccgacagctatcttggccgatgcattattcaacatttggtatagatagccgaggaggattttgcctagaggaaattgtttctttgattctagggcttcggctacaaattgccaattggttgtaggaccacaactggatccacagaagaggaacttttctagccacattagcaagaaagctacatgttcccgagaattgacaggccctttgcccatatatgccgctacatagctagaccaacctcctatgcttttggtcttgaaatcaaattgattcttggtgttcatgctcatagggttagccaatgaggttacatctaatccaatgatcatggtgatgtcaatcagtgttggagtcatcggcccttggttgaacaaaaaggcattgatgatgttggaccaaaaataagtggcggcggccatcagaggttcatctttagctgaattggctatggtaagggcaagtgcttggccgattccaatctcgtcccagtgaactttctagctagccgatacgcgcttgtaccatgtaatccaacttttctcgggtggagttttctcgagagatggccaagatttgaaggtatttttccagtgacctagatctgggttggccaatctgaagggaatcctattggtttcgccaatgatgaactcggtagggtcagggttgccgactgggccaaggaagtagtaattttcgtgcgacaggctgggaattgcaactaggttggagagatgctacaaatccaaaagaaccgagaggaggaaaaccagatgaggagttggaaaatcaatctgttgcgaggaaaagagatctagccgatgagaacttacctcagcgtactcggccgacggcgcggcagacgggctggcggaggacgacatcgccgcgggcggagatctggccggagatggagtcgcttggggatcgccttgtgcgtcggagaaatcgccggagagagaaaggacaaagttggcttaggcggtaaaaacggaagtaacggagtgaagattttttagggggcaacggttagtatttaaagcattggaataacggtcggaaaacgacaaggtgtgaatttcactcggagttgatatatggcaaatccgaaacattaccaaatattccggacttgggggcatgtgttgacgaccaaatttagtaatatcagtatcgaagatgaaaaatagatcgaagcgaaatcaaagaagaagattgattcgggaacaaagtaagaatcggctggagtctaaattggctacgatcaggattggctgagtccgagtcagactgggtaagccgatatagccgattccgacaatacgactcggtatacatcatcgggttgagttaatgtgcttcgtgatgattgccacacatggatagagtcctgagaaggcaattgtatctattaattaggatattttatgtgatttccttagagatatatttgggcaaaagtctgccgcaaagacttatgatatcttacagtttgttagagataagagtcgtgtccgatatggacaagttttgtaattctcgggtataaatagacctcgagccctgtgtaatcaaaaaacacacgttcaatacaatctcggcgcatcgccactcttttaacttttgttttgtttcgacgagttcttgctttcgggttgagctgcatcggtttcgatcttcaacaagaggtaaaacttgttatggcggcttacgttatcgagattagtgcttccatcgttatgatactctaatattgtttatgtaattcgtcgagttatcatatatcttatataatctctgacaatatcgacatctaacctataatcggctaacatctgtcagtagaaggcagtcgattaggttagatagcaacgttggcttagattatatatgatatccaccactctatgaaacacatcttgattgtctagatattgtcctttttttcatacttatagctgcatcagttgagtttgatcttatgagtcgtgattagaatctcaatctctagcctgcttcttggttgccgattagggtagtatcggggttttagccgatcttacttgatttaaccatatttatctcgtatgcttcattgacatgttaaatctaccctttatattaagatctggtggcatttaagtatattaggctctttgtttggtatattttacttgctttaatatctttacatagagtagtatcggagtattagccgatacatgctagatccatctgatcggctatgctatgaacatatatagtctcgttgttaatatatatttcgatctaagtgatttatactgtctcggcatggcaaccgatctatcctaatcacttgatttaagtatatatcgacataaggattatatatcgttaatatctatagccgatctagtagatttagttatttcttactttttaatgattgccgatcgatgcatatatgacatcggctcaaagataaaatgatatgtcatcagcacttagccgataggctatcgtttatggatttaaccgcggtttctttgtctttgctcttgttgattgcatgatcaaatcaactggcatgctagcacacctgaaggcgagttttggacctgcactaaagttaagcagatctctcaggcctcgtgttttcacatcaacacaacgctaattttattggagtggattggagttctcccatggatccttcaccgattttatgtgggtgaaatttggctcttgtttctgccttatgggttgtatggaactatcaaagtctaagtttggtaggtgcttcatgagattagattattgtcaggattatcttgttatgagattagattattacccgggacaattttggtaagtgttttttttgtctccgattggaaaaatcggacattgacgacacaaatgcacgtacaaaacggattgacaaacgaaaaattttggtggccaacaaaagttagtagttattaagattagctctgattatatttacttttaacactttttattggccataacaatttaatttttattggacataataattttaccttcggtatgatcatttagcttgctagtgttaaggacgtctatagaaataatcaacaaggttgagtgggagtgaattattaattgtagggacaaaatggaattttttgtattaaatatgtgtggtgacaaatgtttacaattttttttaaaaaagtaacaaataaatgagaattaagagatacgatatgttataaagagtacacaataaactgaatttaggcaacattttggaagcgcattaccacgtcaaatgatatggtggttctcaacttttagttaatacccatgttttcatggtcaactacatttgattagacacacaaaacacaaaattaggcaatttaacatttgaaacaagtacgacatgtgtcatgcgaacaactcggacgatagatactttcaggagaaaattctttgtgtcctctagagtacgggcctatcctttccatactcagttttcgcctcatcttgctacattgctatcatttaggtcccaattgagtttttgtgattaatgataacatggtgtataagcattatggttctgatgacaagatgttctacaattttgtttcgtcctaattgagagatagcatggtgagattaaaggctatatggcactatatgagtttctcgcattcaaggagttcgaaggaatacggattagcctaggttccttttttcatttttaaaggaaaaagtacgaattacccctctaaactattgtggttgtatgatttaccctcctgaactgtaataccggacattcgacacctcaaactcctaaaaccgaatgaattaccctccccctccgcagcactattttgggcagttttgggtaggttggctgacgtagcatttccaacgtagcaaaaaatattttaaaaataatgggtctacttgttagtgcttcatatattctcacctcttctcttctacctcttttcacctcgatctctgtctctacccttgaaccgagtagggaggaggaggaggaggaggcagcgacagcggagactagtcccccgtgacgcttgaggcggaacgtagtcggccagaaaagcctagggtgatgacggtgcatggtcagcggaagaataatcctaaagcggcggcggcggtggtctcaaatccaagacaagggcattggcgcgccgtccttgccagtgcacaactccgtgacggccttcccatgccgcaacaacctctctaacttggccaggtcaagcattggccgcccgtgttgacgacgaccaacaacaccccgaggagaggcgaggacgttgccagcataggaggaggccgagccgcacgctgacatgggaggaacgccgagagatgcaaagaagggggagagagaaaaagcagcgctcacaagtgggccccactggtttttatttgtttttgctgactgtatcgccatgttgacgaaaaatccgcgctcgccgatggtgccggatttgtgttggctcgaactaagttgacgaacataacaagttgggagatctgcttagctctagtgcaggtccaaaatattgttgagatgcgggtgtgctagtcattttgattctgcaactgacaagatatgtaaacaacagatcaaatagccaatcgactgacaagccgatggaatggttccagccgatatcgatagggtttgagcaatcggcttatatatccaatgtatattctgatacctgagtaaataataatataaagacaatcggctgttgatgataaataacaataatataatccagtagaaaccaatcgaccaataatgatataatagaacaaatgatgatctggaggttaaagcatacatcgcctggaggaccaatatcgtaaaatccaaacgattaggtaaatagtgaaacctttgttgagatcggctaaatccaacttgtatgtaatctttataagtcgatgcaacattgagataactcatcggctgaatcctcgataaaatccttactggcaatcatgaagcaggctagagattatgattctaagcacgacttagtagatcaaacttaactgatgtaacactaagtatgaaaagaaatataatatctagacaatcaagtttttgactaattttcagggtggtgaataccttggctaatatagaacaatgaatcaatttaactaataccaatgaaaccctagaaaagatatggccgatataggtaaattgaaacatcgatttagattaactataagatgtatgataaataggtgtttacatcaacaatattagagtgtcatggccctaaggtgctaggttaggccagcaaccctgataaatccgctgatgatattagaatcaggacccttgagcagatataagctttcccatgaatgacactggacaactgcataaaggaaaaataacgctttcatgccgatgtaacaactctgaacaaacaaaaatattcgtgctcagaaataaatttgtcattgtaccagaagatccagatgcaacaacaccaaaagagtcaaagagatgaattttttacatctgaagagataatctcacctataaatgtcataattatacaaatagcacgtccatggcaatatgacattggttgggcagttcacgcagatggttctgctgtaaaatgataatacaaaagtttagttacaagcaaagcaaggataaagtgattttgagcagtttgcaaacagtaccactttcaatcttctaggcttctagcaaagcaaggaaaaattttcagaaccactcaatcactttcacacgttcataatctagagttggtgatttcgagcaccttgcagacaacagccctttcaatcttggcattcttacatctctaaaaatatcgagaagcaaatacaaattagttggagtgatcagtgatagagggagatcaagagcaaaagacatggagctagtggcatggcagcaaaagctataagagacatagcagcaaaatcattattgttatttagattgaaatatcttgaagagcttgtcctacttggtcagagatatgattgcaaaaattaaatttgaaatattgtcgatggaaaaaaggttatcgcaaaatttaagttctgtacaaaaacaaccatctgcagtctcttgagcatcatggagaaaattttaagcgtcttttgatcattagcttcatcaaaaattacaattcaaaacaattgttgagcatagcatctgttactggatttacaataccttgatgatgccccacaatactttcattgtaaaaacatatacactcctcattggcaggagaggaactgaagtgatttgtgttgtcagataaataatccaaggataacgaatacaactaattaggcagtgtaaatccaaaactgcaatgccgtcatacactcatacatgaataagtagtaatgccaaaaaagtcataaaagcccccagtatcttggaaactactttgcaattttcttcaaactgagtggcgatggattcatgtcagtcaccaataatggcgtagcatcaaacttggaggactggatacttttgcgttctagcctcttgtaacactgcagcattcaaaaattcgatttagttgaaatatgccaacagaccccatatgaacacggtgcttgcctttcactctagtgtagtgcagaactttccactgatgatattgatctttgatggaggctagtcattagtacattgagtaaatttcgacctaagttgaatgaacaacttatgtttcaggggaaattacacgcaaacatctcttaattcagcttttttttccctcctaaaagatagggaaacaaatgaaactaacttaaactgatttttttacattttggttctttttgaaaacttattttacaaatggacccctggaaaaacttaaaccggaaatggtcttttttaggacgccagaatggctggcgccgtcccccaacatggcggcgccagcaacactgttgctggtgccgcgctcgtgccaccgtggcaatagggcgtacgtggatggtgtgacgtggtaaaggagggcgccagccacactggcgccgccccttctatcacggcgccagccaggctggcgcactcgtcctgtgtgggcctcacccataaagccgcgcgagccccactccctttctcctctcccactcagtttcgcccctctcccagcccgagcagcagcagcagttctctccctctctctccccctcacctctccatctctaatccactcaatttgaagctgtttttcgcgggaattttttgtggaaatcgaagagaaaggtagactcctccatccccctatttttttcgtttttattggttgaatttgtagatcggagggtaaccctagaaccccttttttgcccaaatttgtgatttttagaatttgttcttgggattggcttgttgtagtgctacatgtttgcaatgtactcattggtgtcatgaatttttgaaccatatatgtggtaatgttaatttttggatggtttagttggatggatggatgaaaaattatggttgaggcatgaaagtaattttaatttgatggacttgatgctatagcctataggttaaacttttaaccattaattatatgaaggggagaaaattttggttgcattatagaaattttggttgggttgtttgacggagtatttgtaatattttgatgtgtaatgcactagtaaacttgttgatagttgtaggtggattaaatatttttttggagtagtagctttgggacaatttaagttatgcattggttataatatgtcggtttggactacgtttaggaagaaagatttaatttttgttgcaaagttacatttgattttttggtgtagatggatagacttgttcgtgtttactacggtggtagagtggtggaaccttatgttggtgcacatgttgagtttgaggatatgtcattgaagaccattttgtttcctacccacccaactctagatgaactaaggtcacgagtgaaagaagttcttggatggaccgaggataatgtggagattcgtttttatgggagatacgatgttggtcaagggcataagtatatattaaatgtgataggtcagttggaatgggaagtttactttgatttggtaaaagagtctcagtttagatctctagaggtgtttacatcaaagttggtacgtaccgtagaaaatttggatctaaacaaatctccttcttatcattacgttgagaagaattttgtgacatattcttctcgtcgtgaaaggggtgcaagtaagactgagttggtacgagaagacttggaggaggaaggagagaagaagagacctttgtttggaaatgaattaggggaggcaggaccatcaaagagacattgcggtagtgatgatatggatgcagcgagaaagatgaaaagggagttagtacaagaggggcttgatctaagtgaacatttgtcggagagtgtgcattggtcgttgtacggaggcaaccctgaatacccgacgcaagtagcaggccaatatgtgaatccagatgattactttgatgtcgaattgagtggtggtgcaaatttagttgttaacaggtggtcacgattctgtctcagtagaagtcaatagagaggaggttgacgaggaggcaagtgttgagcaatatgatgttgaatttgctaaagactctgatgatgaccgtccattccctccactaactaacaatgacaagttagcattagagaaatgtcgtgcgtttgagaaggtgtttgggaggaagccggacattcctgagtttagggacctaacacatgcccatggtgcaatactagatggcggcatcaacctagatcaattgccagaaccattccagatggatggtctcagaaagggtttagagttcccatccatggtcgcattgaagctatgactccaggagtacgccatcgtgcaccatcgtccataccgagttgtcaattctgccgcaaataggaggtacactgttaaatgtgaaaacccacggtgcaaatggaaggtccatgcaactaagaggtctagtggaacgtggaggatatcacaggttggtaaggcacatagttgtgctactgccaaaggttcagggagccaccggcagctgacatccaagttcatagcaaataggttatgcaatgccataaaactacaacctacactctctgcttctacgttagctttgtatatatttgaagttttccagtatagggttaagtatggcaaggcttggagggcacgagaggaggctatgaagctcatttacggtgaatggggtgaagtgtacgtccgtttgcccactttgctacaagccattaagcagagaaatcccagtatggtctaccacatcgatactcatcctgataggattgtcaacattgatggagtgaccaagaaaatttttatgcgtgcattctggtgctttggtccttccattgaggcttttaagcattgcaggccagtactagctatagatgcaaccttcctagctgggaaatacggtggtgccttgatgactgcattatcagctgatgcggaggaccaacttgtacctttagcttttgccttggtagagaaagagaattcatgagactggtgctggtttatcgatcttgtccgacgggttgtagttgggccgcacagggaggtttgtattatctcagatcgacatgttggtataatgaataccatgaggactcctgttccaggattgccaccggtttaccaccgatagtgcatgaggcacttcagtgctaatttccacaaggccggtgcggacaagcatcagacaaaagagctcctaaggatatgtcagattgacaagaagtggatatttgagagggatgttgaggcactaagacagcgtattcccgaaggtcctcgtaaatggcttgaagatgagttgttggataaagataagtggtctcgtgcatacgatagaaatggccgacggtggggttacatgacaaccaacatggccgaacaattcaatagcgtgctagttggtgttcgtaagcttccaatgacggccatagtatcatttaccttcatgaagtgcaatgattactttgtgaacagacatgatgaagcagtgaagcaagtccagttaagggagcgttggtccaccaaggtcactagtaagatgaagatgcaaaaaagtaaggcgaacaaacacacttcaaggtgtttcgataagcagaaaaagacatacgaggtcacagagaggggtggtataacgcgtggtggtgttagaatcggcgcaagagtcttcaaagttgaaggtgaggggaactcatgttcttgccaaaggccattgctctaccatatgccttgctcacatctcatccacgtgtatctgattcatgcaattgatgaggaatctcccaa

SEQ ID NO: 7757 - DNA, 3439 bp, Oryza sativa
tttttgtacttgcataatggttttttttttgccagatacttcctcctaagcatattttgccacagtccatcctcattgattagtttaaataaccatgtacttaacatacacctattttggatttctaagttttgaatccctaggcccccgcattccttagagcaaggtcaatagtgtagccagctactagctccaataatatccatgtcattttatagccaataccaaaattaactagtacaataggttggctattatatcaacatgatctcattattcaaacaataaactttacatgtgcatgatcagaaacgccctcaactctgtggcctatatggccatttgtattatgcaataaacatgggttatctactactctacctgaaaaaataacgaataacaacacacttgataattcacatagtatatcacaacccactgccgcccaactgcataatctatacatgaaaaaaggagaagaacaaaagggaaaataaaaggagctataggaagagattagaacggactagatgcaacagatgagacgaagaatcggtagaacagacatagacgacaagcattcaacagaccaagggagaagaaaagaaaagaattagaccaagccaattcaaatcaagaagttgcttgttgctttgggtgccagctgcatgcccgcaccaagcgcttctcaatcctcctctcgctttctttgccgctgagaactgggattactaactttttgggcgcactggagctttcacggcggagtttcacgtcgcgggagaaaattccggcgagacaagggtgagcggaggcggcgtgaagcggagcaaaatgcgtcgggcggatcggaagaggcacaacaaaaacaaaacgatacacgggatcgcgtggtggttgcgggacccacaaatgcatgcgtatctgtgtatcgcccggcgctacatctagcgcccgctctgttccctctctccagttatactctcctccacataagaatagtctgagttggaatattttggagcctgctgattagacttattgtacctgctcttaggtctgcaaagcacactccatttggctaatctgtatttctttttatgctcgtcacattgctaaaagaatctggacctataatagtccagttttttaaggatacctttagggatctcaaagaatgaaagcatatacattgctaaactactcaacacggagttaataagaattaatcttcctccggtcgatagcaacttccctttccaactactgagtttcttttggattctatcctctagttccttccaatcttaattggccaatcttctgtaatgcattgggaggcccaaatatctaaatggataagatcccattttgcatccaaacaagctttcatatatgtcttccctttctttagccttgccataacaaaacatttcgctcttatggaaattaatctttaagccggataacttctcataggcacatagtatcatttttaagtatctggcctctttcaagtcattctccatgaagagaattgttcttcagttatatttaatttcaaaaccttatgttgttgcagcaaatcagtaagaaacatcttagcatttgtgtgaaataggtactcaactaaaataatatgtttttttgaagaaaccacaaactaaaataatatgttactgtattaataaactgtagtgaataaaacaaccttgattaatttccttcatttatgttgtttacatttgttgttttgtgcagtctaaaacaagcagtttgtccccacttgtctcaaatttgcactataatacgaagtgactttgaaattttaagttgcttttaagaattcttagtatcacaaaaagagtgcttgccaacagaagtaatcaaatagtcttattcgtcacttttaaaatctgattcagattgtaatccaaggattagccaagcacatatctaagtagtgttggctcaatacctttttagctacttcatcatattactgacacagattatttgcttcacgcatttaaaaatacattttatcaaaaaaaaaattcttctactcctttgactagaccaattgctctaaccatttgtgttaagttgatttttcaaatattgaatttgtccctacaatcaagtaaataatccacagcaataatccgatgaataatttgattaacgtaaatttgaatttatgtgctgattttggcaagtaggtgtatctttgttctgtatttggttatactatgagcctttatttataggtatactataaaccatttgatgtaactgatgattgatacaagatagtacatttcatcccctgctctgtttaatgttttccgcgttccatttactccaaacttatatcatacagttttttcgtccatcaaatacaacttcctccaagttcactctgtcctaaaaaaatcattatttcaagacactatttcatttgttattcatattaagatatgatttcagaccaaagaagaggagggaaccgggatgtggacgaccttgtttctgctgaaaaaggcatgttttaacttctgtcagtggaggcagcttggacgcttactagttcgtgctgtatcgttgtggtttttgctgttgtattcactattattttcgtatactttattgtcattttattcacactaccatatatggaaatgttgtgcctgatgtgtaatatttcggtaggcacaccggctaaaacattaaatggtcttaaataccatgggaacacatctgcccttctatgttacccagataaatacattgttattttgtgattataattgtaaggccgcaatgaagatttgtgctatatattctgaccaaagagtaaaaaaactatttatagtttcctcatgtttttgcaaaacataatttaaataagtggattgaaaccaaattgaccaaatctatacttgttgtcattgaccacgacagtaaactgcaaaccatgggttagcacgactcacacaattggccttacccagtacccactgactcatggtgcccctgtgggtgaagtcatggttagtagtttcagatgcgtaataagcattaaagcagacaaaccgaagtgctatggcataagatgtgcaagcggcaaacaggataaactgaaatgaactctctctcccaattaacaaatttagagttgtatcccttttaagttagctgaaatttttatattttggtcctttttgaaaacttattttacaaatggacccctggaaaaacttaaaccggaaatggtccttttttagggcccagagtagctgcgccgtcctccaacatggcggcgccagccacaatggcgccgcggccgtgccaccgtggcaccagggcctacatgggcttgctgactcggcagagcggggcgccagccacactggcgccgcccctcataccacggcgc

SEQ ID NO: 7758 - DNA, 17438 bp, Oryza sativa
tattgttgaagaaattttgatgatttgatatggatctaatggttgaaattgttagttagggtgtgtgtgattcactaattaaagtagtttgcaacacttgagttagtcatatttgatacttgatgaaacccgtgctgcaggagttttgtatcatttaagatagctagatgacaactttatatactttatacaatattcatctttgatcgactatttaaaaaaaactatgaacggtagtttataacaaaactaaggtggtgtggctcaatgagaaagaaaagaagggagataatatacatttatcatccaaaagcaaaactaagttgataggagaaaaaggagggaataatttatatatttttttatctttggttgactattgaaagaaaaaacctaaacattataagatgatatggtttataacaaaactaaggtgatgcggtgcaatgagaaaagaaaaataagggagataatatagatttatcatccaaaagcaaaattaaggtgatataatttaataacaagaaataaagaggaaaataaatttggaccgtagatcaatcatccatgtggcttcatgacgaaagagagaaatagcattaactacacttagtggggatgaactggtgtttagtacctagaaacaaaataatattcacttttagatgacttgagctaaaatgaaaagaaatacacattaaaggaatcaagatactatttataatatttagaatttcttatgatagttttaatttttctttgttttttttaaaaaatagatggttaggacaaaaatatgttgatgattagttatgcagatgttttaatattgtgagaacatcgtcaaatattgttggtaccatcctaatcacaataatgtatttttaccaacacaaattcaagccacaacaatagtatgatacattcataatgaatatcttaacctttgtggaccatggttgctcaaaggaattgacacatgcatggggaggtaacattttagggtcataaatagaaatacttaaaggaatttaatttcttagttacacaggaagataagagtcatctctctcctaaacaatccaatagatatcatgagctacatgtgcatttcaagaatgatccaattgttaaggtttaaacggtgacgtgggtcaatgtatgttgatgagcttgcttagatgaattgacacatgcattgggaggtaacattataaggtcatgaatagaaataattaaaggaatttaattcctcagttacacaagaagataacagtcatctctctcctaaacaatccaacagatatcatgagctacatgtgcatatcaagaattaatgatacaatggttaagatttaaagggtgatgtggctttatgtatgttgagcttttggtcccaactatataggatatatagatatataatttgtagctagtgttttaatcatttactacaggttggggtttgccataatttcttaattttgatctgactcgtcacatattgtttgccttgtttttttatgaaatattgtttagcttgttttaccacaagtgtggccaccaattttggtgccacaatccatatataacttaaacatgtcgtggttttgctacaaaattgtggcaacttctggaagtgaccaaacaaagccccaaaattaggctatttggggctaatgttctgttgatggccatacactaacctgtagattgtcatcttgttggaaatgcaggggtacatccaagccaccaattatcgggcgtgacgaccagcagcaggaactagaggcaatgcttctcagctccgcaggatgcctcgccgtaatatatgtcgtcggcgatagtggtgttggtaagacgatccttgtaaacagtgtctgttcaaaccctctgtcagagaacacttcaaagagcgaattggagtgaaggtcggaaaagatgtggtatatccaacatcctgagtttgataagcaaagaactgaagaaagaaaataacgaaagtgacaatgagaatcctagaagcaagatacaaagacgtcttggtgaagagtgctacttgatcatcatcgatggcaggcagatgtccatcgctgactggaatgctgtgatccatgctcttccgaagaacgaaagaggtagtcgggtagtgctcatcacgaaaataaaaccacagtttctagaccacccaatgaatgatgtccatgagataaagctgacatgcctcaatcaaacggactgcaggaagctgttccacatgaggctccatggcaaagaggaggatgaacaaaaccaaacctacctgccaatatactaccagcgtgtgtatgacattaccgggggctcgccattggcagttatcctgcttgctggactcatgcacaacaaggagtatccacatgaatgggatagggtgttaaaatacctcgagtcagccaaagagaagcggctcaacaggatactgtccctgagcttcgatgacctgcaccatgagctcaagctctgcttcctctacttcacagcattcccggtcagctacaaggtgtaccagaacgtgcttgtcaacttgtgggtatcagagggctttgtggtgccgcggcacgggaagacggtacagcaactgggacagctatacctgaggcagcttaccactaggggactagttactgaagcatcagctgatggtgactacgacatccgccactttttcctccatgacagtgtctacttgtttgcacggtcagaggcacatgaggcaaacttcatggagctgcatgatggtgactacttcccatcgccggacagggctcgacgcctcacactacataacagtatggacagatacgcggcactagataacaagatgcccaagctacggtccatctttgcaatcttcgaagagataccagccagcacagcagaagaaagtgtatcatctcctagctgcttccccacctgctgttcatgcgagcagcacagatcaccgaaaatttcaagatttgacctcaccaagctgctgaaaagatccaagttcctacgagtaatcatgatcgaaggcctgaatatcggcaccgagttgcctgaggcaatcggaggcatggtgcatctccgttaccttagcacgcgttgccgatctctgaggaggatccacccgtcgattgggaatctcaaaaatcttcaaacaattgatgtcagacaaagcttagtgcatgaactgccgtgttccttttggaagatcacatcgctaaggcatgtgtttggctctgagctgatcgtgccaagatggactcgtgaactgaaacagctaaatacactcaagtcggtgagagcattgcaggattgggatggctctatgttgagaagaatggttaacctcaagttactggatgtgactatccaagagaagctcaaagaggagaaggcgcgcaagttatcagacaaccttaacaatctcaacaaccttactacactgatcttgaaaggagttgacctcccaatctctagcatttttacggcaccttccctgcaattcctcaagactatagaactaaccggaaccatcctgctcacaactccatcaccagaaatagacaagatgaccacttcaccttctgatttccagctgccgaacttgagcaaattgtcattgtcaaagacgtgtctgcaacaagggttcattggaaagctaggcaagctgccccttctttccaatctcacactcaaggatgtttcttgtgacggagaagagcttgttttcaggcctgatgggtttcattgcttgaaaaaattggaagtaaacgacacgtccaaacgtgttgtgatagaggagcatgctttgcctgtattggtctctttgcatatcattgggaacagtagaaattaccaacactcgatccatcctactcacaagattatcaacaagattagacatgaggacataaatctttttcagcgtatctgcacttgtcatcagaaagagataaccaaaggctaacaagcatatatccttgtaagtttgtcaaattatatcgctttagctctgtatttttccatcatatgttgtttacatgcatgtaacaattggatatccttctttttgctaatttccagtgttaggaagagtccttcgaagtgaaagttgtacgatgtcatcgacgaagagtcagtttcctcttcaaaatgtcatcgacaatcataaaccaattctgcaatatgacattgcgaaagtgatttccttctgtttgcaatttttacacaatgcgcaaattacctgtaagtagacttgtacttcgttttcttgttttcgtttttctcaggagtcgggtgttgacgtgttgtagttcgtcattaatttcgtttccttgtgcgcggaaatgcgacccgcctcctggatcattctgtactattgcaacttacacaaccactgaataaactcgattagtgatcatatgaattgtttgtttggatctggagcatctggaaagttgatagctagaaatatggcatgcatggactacgatttttttttcgctactttgtgcgtgcctcttcatcagggttatttttttcgtggaatatttgggtgcgattccatctttaatacatcaccaaacatattgaggtcgaatataacaaacttgattaagcaataaattttaatcaaatggcttgtttgtttacatggctcgcaaagttaacggaattaattcatctgcagcctttcatgtgcaaaggtattgcgaggtacagacttgcatttatttgcttcccatagcttatgctccccctctcattttcttgtttctgttatgagtggcaatcctgttatttgtcatatggactaaatgcaaaccgtgatcaccctggattaggtatggtaggcatcaatgcctgatttttctttgatgtgtctccttgcattcgctggtaaatgagtatttattagggttaattgatccatgccattataaattcttcagttttgagatatgccattactattcaactatttaaggtcatgccattataatttttcaagtattgaaaatatgccactacatactcctttgatgtgtttcacaaaatttttagactaaattgccctcgtcgtcttctctcgttcatcttctacctcctatttttccctaagccagatttggatctgacgatgggagaagacgacgatgaggccaaggaagaagatgagggcaatttagtctaaaaattttgtgaaacacatcgaaggggtatgtagtggcatatttccaatacctaaaaaagtataattgcataacactaaatagttgaatagtaatggtataaatcaaaactgaagaatttataatggcatggatccaattaaccctatttattatggcacatttttcatgtccatgacgtcatcaacaaggggaatattatcgtagaagtctagaaacctggttgaaatataaaagttttctagtgtggcttggcatgtgttctaagagcagtacgataatcctagtcaggaggctccaaaaatttttatattgtttttttcatagatggaggagagagaatcaaagagagaacaacgcaggcccggcgatagcacgcgttttcacgcgcactcgcgattaaaaacatattttgtgggtcccatggtgacctatccgatcccgtgcgcatcctccttcgttccgccctccggtgcttcgtcgaccgacggacgatgtcttccgcagttccgctagtgttattcattgtcagcgagcgagaaaaccccaccgcccccacaaatcacgcagtctcgtcctccatcctgcaccacgcacactcatcctcagttcctcatcctcgtccatgaagtcttggcggcgcaattgctaccgacgagaagcatctcatgcgtgcgccaaatcctgataatttgggtacgtggtgaggtaagtagcggtgaccgtccctcgtcttgtgctgtcgcataatctgatcactgatcattcatgaagacccggtgggatcgatgtatggatggagctaatccatcgcgagcttgctttgttgtgttcaccctcatatcacaacaatgaccacaagaataggatccacttatgatcatacatgtcaatacctgtatgcacaattaattgtttgattacaaaattatagtcagcacaatagctaatctattgtaatagttggctttagtagtaactacgaaataatataagaatggttggagccagcagccggctaactattgaccttgctctaagcgccggtcgaccggcagtttccatgcttgatatatataatagttgtatgcaatattatatgacgcagagactgtgacttttatattattattgttatcttaaaaatgtgtaacccatagaagaggaagtgctgccttcctagtttgcatgctctgtttctcgtctttaatttgctttcatgcatgacaacatgttctaactatcaactacacactgtaggcagttgatgacatgtaaaagtccctgcagttgctgacatatatatcctcacttgattctcattccctattacatttgaattaagagtgctctgtgctcatactgggtttcttcctgggagcaaaacaatacaaatacctgggcatcgaccaccccagcgcaaacccatcacaattataccccccacctctgtatttaaaatgatttggtttgcgcctcggtggactgagccttgtcagttgtcactttggtcctgtttggaagattagcccagggctaattttgagagctaatatttagtcttgaattggtaggctaatgtagggtgacatgtttggatccttagactaatttggggctaaaaggtggaaagagagaagagagagggagatagggctgctttttgatggtctccatagaaaattagctccattagcaccccttggaggggctaatgttttgaggggggctaattcactttagctccaaactagcccacctgtttagatcctttagggctaattcagggctaataattagcccatggaaccaaacaggacctttgtcagcctcataaaaatatatagtacaaaaaaacgaaatttctaaacaacaattgactacaataagagaattgttcactcaatttttttgaacagcaatccaacaatgacgtagtcgatttttttcctctattataagaaataaaaacctgacggaaataatgaactaaaacagctgagtttcccttcatgcatggaacttaatacatattatgggtcaacttgtcattggtcaaaaatcgactgatgttcgagatgaaataaaaatagccgagtaacatctaaatgctccaacaacattttttttttgacaagagctcccacaacattttagaaaaagagcgagagaagaaatgcacatatgttagaaaaaacaataaagttgtatcatgaagacaaaatataaatgcatgtgctaatttcctgtaatccgaaacaaactcagaagaccgaaagtgtccaaggaaaaacagtatgcatttcaagtaacgaatatcttgcctagcagatccacatatgatgatatgcaaacaccatgttctatttaattatcgtaacatcaacctagaggactataattcccctaagtaaactgctccagattcctagacagtcaagaatgacagcacagtccaggggtccttgattagaaacacgaaaaacacttcagcttgaattaaaagagaaattgatataaccgcattgcagcatactagtggatgggaaatctggagaaacattgttcataatttcatatagacaggaacttaaaacacccccacaaccaagagtgcgaaagcaactaaaaatccacttgttcacataggtacatgaaaacaaattaagtatgcataagtttttctactataaaaatcagtgcttcatacattaagactcagtaggatcggggttgatatgcagcagttcattcaggaggaaataaccatgtcgaattcatcagtcttccatctggtgtctaaattttgtcctctgacatgtctgcagtaattggtgtcattgtaccatctttcatgttgtacacagatttatcaaaagagcggtcatgcataaaatagataagataatctttgactacatcataatgagataaacgaaaagacttgctgctgagttggctgataaagttgcagtcgccatccaagctcttgatctcagtgaatgtggcagggtttgtgctgcagtccacctcatatactctaatctcaataatgttgtgcccaaattcaccaaagtatgtcacaactatcagtagtttcccgcgccactctactatgctccaagtctcattagcggtacccatgaccccaggcagtttgatcacacaagactcaacacgagaaaccatcaagccattgtcatcttcacagatctcaaagactaagaggttagtggtgaatttgccgaaactgagcatgtggaggttcccttggcatggcagaagacaatatcaatggacctaatgatagtatcaccatcacacacgctccacgacttcatcccaggccgccagagagcaagcttaactgcatccttgaccatggaggtggcggccacaacacacttggagccagagtcaggcgacgaggacaagacgaccttccagaacaacatcacgcacttcgctgcgttgatcgtgcaatgcaagacaccagagccattgatgatggggagagacctagtgtaggcatcagcggagcgggaggctcccgaaggtagcgggagtcggataacatcccgggagaaactgttcatcaagaaacgccggcggtcaccgaagtagcgacctttgttggccttgacgccaacgagccatccctcgaacgagcccacgcagcagacgctgccaccagccgccatctccctctccctctccggcagcgggacacggccacgcactcccatgatggtctctcctgcgcagaagctggagaaggagaagtcggccatcacgagcaggggcagcggcggcggcgaccgctggtggaggacgcgccacgcgcggcagacggagcgcagcctggcccggtcctcgacgagggggaggcagccgacaacgaggccgaggatgtccgccgggaggtccgcccacggccggcctcgcgcgtcgtcgagccatggcgcctcagaagccaggacgcattccgtcgaacaccttgcctacgccaccgctgtcagcggccgcgacacctcgacgccatcctcactgacgcggacaggcaggggcgcgttcgggctctgatcagccggggttcctgtcgcggcgtccatggccgccggacagtgttgtggcgccaggggctactctcgcctcggggagaacagcgcctggagctctcacgtacggggtcggcacggaggcggcggcggcgtcgatcagcttggcgaggtgcctatctccatcgagcagccgctcgcatcgcgcgggaggaatgagggcatgagggcggcgtcgctcaggggaatcgcgcagtcgcgtcgcacctcgcggagtcgagtcgcggtcgttgcagcggcaatcaggattcggctactttactataggacttacagatttatatatgaatatatgtcaaatataaaaattaggatcgttttatattaagatattataagagttatataagaaataattatttagcatgtttatatgttataatttgtagatggtatcccagtttagtagtctttctagcatagaaatgacaaaatatagtgttgtaaaaatgaccaatgtgcctttatgttaatcatttcaatgcttaaaatttgacacaaaactagtattacgcctaccattacatgtctgcaacaaacatggagaaaaaaattaataaaactattcatgctagtggctcacctactagctgcccacgacatggacaatgacttaaattcccagcgacaagtaaacagggatggagggagtagtctagttgcaattaagttttactacgtactaataattatcatgctagtatatgttaagtttttgtgtgttagtaggttgatgtgccatgcttgcatactaataattgcgatgcttacattttgtttaatgtgtggtagtaatgggttttgctcatgtgttgtgatgagctatacttgcatccagccccatgggtgagtttttagttcccatctccgatccgcttaaggttgttttagttgcttatctccttagacccagctctcttcttcaactccaaatttcaacatcctcatttttcgtaagtacgttttttaaattgttaaatgatacgtattttgcagcaaatttctatatagaatttgttttttcaagtttataataattaatacttaattaattatgtgctaataggctttgcgtttcgcgtgagctgtaaatcttcctctaccgctatgcaaagaacgcagccttagtctagcccatctttttcgtccaggctgaggttgggcacgataaggagatatgtttggttccttgtgctccctctattctaagatataaaatacaatcattttttatgtgtcataatataaacgtatatgcatctatatatttaccatcaagcacctcaattatattgcacgcattcatcgatatgatctaaccgataaggtgattaaattatttatttgtattcatgttggtagtgtttatgccttatattttagaatgaaaggagtattggtttagcgtgactagtatgagattttgtttgattacttacatatgagatacacatatgagatacggtttgaaatatattttgtttgattgattgtatggatttgaatgtactagttaggtgatatcacctctaacaaaaaaaaaatcagatttaactataacgtgatagttaggtgatatcacctctaaaaaaaatcagatttaactatcacgtgcaaagaacaataatatatattggtgttcaggatcggtgaaaaaaaaaagaaattagcacaaatatgatcggtctatagtaactatccttagaggactgttttcttttgcctctgaacagtcaagcttacaaggagtatctcaaattggaacatgaggtctctcttctcaatttggacgagggcaagggagatgaatggagctacatatggaattctactagatatactgctaagagattttacaagcttatattcatgtctttgcagacgccaaggccttatgtttggatttggaaaacacgtagtgttatgaaaattaaggtctttgcatgacttctttttagcgacaggttgaacactagagatatgcttaatcatcggcattgtgcaaaggaggatgatgatcttacatgtgtacttcgtacaaatggtcatagggaaataagaggacatcttttcttcttttgtcctttcagtcagagatgttgacggcacctaggcattctttgggatcctaatctcaatttctttcaaatggttgtggtagcgtgactgcgtttccggcaaaagggcttcttggaaatttctttattgctgcccggcatatttagaaagaaagaaatggaaagatatttcagaacaagaattcttcctttgaggcctggagaattttgttcaagaaagaaggtcttctgcatatgtgcggaatgaaagatcatttaaagtaaagagtttttgattggttataaccattataatattttcagtgctctctttgtaattatcttttgtaaatacttttccttttaatgaaaatcacactgcgagacaaagttctagcagtaatttaaattaaaaaaaactatcctatagttgtcataccactaagccaattgtgtcactgttatccaaaccttactaacaaaaactgcatgaactaccacgcatgaccgtgcaaatagaggtttcttcggtttcaggagaaggcttggtttttattttgaaccgcttatgtgttcggtttatatctcacataaactgaacttccgataaaaccggagacgttgttcttgtggatggagcatgcaacatttcgcatcttgtcgcgtactatagctgatgctagctgcacttaaaggatgcgcggccgcattttggtggagcgcccggtacattcacaagcccattgtgtatataatatccttatgaggtctatgctgacaacggcctaacaacccaacacgtaaaaccacatctttgtgttggaattaatatgtgggttaagacctatatggagattaatttttgaaatcaccaaagcccactgtttgagaaacaagaactggggtcctcattcctccgaggccctaggacactgtgggcccacaagatcactttctcttacatatagaggtcagaaaccacggaagtggaaaatgacaaatggtgtggagcaggaaccaaggcccctatagaactggggctgggggtatcgacgccctataaggtttacatctacaaagtctcaagaagagtattgagacatacaagatcgacatattcaaggtactggagtagatgcatctggatattggcatatcgtccaaggtcatgtccatcatgaactccttcatcaatgaaatcctcgagaaacatgtcaaagttaacaagacatctcatcaagcagcatgggagtgtgcaaggccccaggagtacatgtgggccctaggcgcggatcgtgctccgggagtacagtctgccctggggatacagcggttcatggcacagatattgccacaaagtaagacttaggcgtatcattatcatcttaaaaggcgagctttggcggtgcttgttgcttgggcgctcaacctgaggactccgttggcaacgctcgctgccccgggcttagcctagcccaggatctcctcccagcgttctacgcagggtggtgggcccggtgattggacggcgagcgatggcattaagccgtagcagagcaacatccagagaattacaacttgagattacaggtcaattacatgcaagaaggaggtggaaagacatgaagtaatcaagctagccacgtcacccaaaggaacaagggcatagtgacatgtacatgactttgccgtgaagtaataaggtgggcggccaatccaccatgccctcatctgggcccaccatgctcggtttcagaataggtggtgcaagaagccttctctagctatcctaggccccttgctaagccttttcggggcacaaagcgtagccccgatcaacagcaatgatcacgttcaaactaatgtgacaggggaacgatgacaagaccaagcatagtgccatagtcacttccccgtgcaagaatgtaattgtaggctccccttagggtataaaaggaggagtcaggttactttgaagaggattggatgtttgaaagaactaagcttgaatagaactttgtatcacattcatcacacaaagtcccaaacacgagaatatgttgttacgcttccaagtggtccgaacctatatatttgattgtgttctttgtttaccgcacgaacaagctcgatctaaactcaccccccggctgaatatctcaacagggagtacttgttcccagctagaggagatccactctttgacaccctcctcatgggaaggcatgcttatgaaccttcaataccacctttgcttattctaaaagattgagacctccttaaataggagagtgctctcctagccacttgagacatgtataatggagagaactagagggacacacatgcacttgcttgcctcgccaggctcggcacgggccagatcggacgcggagggctcctcatgcttgtgcaaacgtggtttccttttgctgtagaattcagtttggtttttggaaacacatcgaataatttgatgcatggagcggcgtggagtttggataagatatgcgcgatttatccagtttgattacgccatgtggagatcttgcaagtgtcctgatcacgcgttctgatatctctatataaaccgtccgccgccgcctcacaacatacacaaaattaatctagggtttgcctcctcctctgtaccgtgccgtcactcgtagtctactccgtcttgcttgtcggcatgcactggcgatcgggagagcagatctccagaacctttgccctcaacgtcctgcactgagagaaggcgacaataaggtttttggcaagtgcttcacgcgacggcttgctggtcttccacgatggctcatcttcctctacgcttgagggttgcgcgatgatgacaacacccagcaccacgcgttgttcctatgatgcgtgctactctttgtcaatccgatccacagcagaagcaaaaccctcggtacgtgttcaccatattccatttatttgacctgttcatgatttacagcctggtttacatatatgtatcacatgatgtggttgtactagtttacatgcttcatatcatttgatggaatatggtgatacatgatattaaatcaatatgcttatagttcaatataagcatatattgatttaatatcatgtatcaatgtatgcttatattttcaaaactttgtagagtactccgccggtttcttcggtagaaaccgacaccgaacccaaatagtgtggttttccttggcttggcttcctaatttgttactaatgaaatcggttagtgtttataaaaagccgaacatgcacaaaatagtacaaatcgaaacgaataaaccaaacaatcattcctaattccgacaacttgctctgtagcagcaatggagggaggagggtgggtggtgccaacacgtcaggctgaattgttatttccgtgctactctctctgtcccataaaaaataaatctagaatatgatgtgattctaggttcagattcatagtaatgtatcacatcttgctctatgtttgttttttttcggacggatggattatttgggagtgacgctggcaaaaaaaaaacaccaaagttcatatataagcccggtccacatcgcttaaaaagaattagtattccctcccatcattaatatatgacgttagtgtaaaaaccgtcatataatgaccaaaatagaattagtaccatatgttcgtgaatgaatctgccgtgcaatgcaacgacacgcggtccacttgtattgcacagcccgtccccgcggcccgcggtgatggatgatggtctattggtctggtccccaagccccgcgtccccaacgcgttcttcgtccggttcgccgtcccccgtcacgcattcattcccactcccaataatcatcctccctgtttctcttttataaaaaaaataataataatcatcctccgctccgcgacgctcgcgcccacggggaagccaaacccagccactttccccgtctccttcctcccctactccggcgccctcccctccttatccatccgcacccacctcctccatcctgctataaaccaaccccaagatttgtcaccctccggtaggtagtaccactccaatcccaatccaagcctgaatcctcttttgatgtgatggcagtggagcgcggcgagcgccgtggcggcggcattgggtgcctctcctgctgcttcggcggcggggacggggacggggaaggagaggagctggggcagcgcgcggcgagggcgctgcggacgtcgtcgcggtgggtgcgggaccgcgccgtggagctgccggagatggtggcgctggccggggggcggcggaggaagccgcatctgcagcatcatcagcagcagcagctggccggggagttccgctacgaccccgtcagctacgcgctcaacttcgaggaggacggcgacggcgaggcccagccgttcaagtacatggccttctccgcgcggctgccggcgtccccgccgccgccgccgccgccgacggcgctgcccgtcgaccggggttcttgaattgattgttaggccgttcggatgtacatacgtacgggagattaaagtttgggtttctttctcttttttttttgttgtttgattccttcgatttttgttggcgactacgagcgctgatatgtgtacaggaggatttgaatcgtttcttcttttggtttttttaagcagagatttccttttctattacaagttatcttggctctgaagaacgttgtttttttgttttagtgctagtatatgcttctgagaagaatgttgtttattggggtagcaaaatctcaagccattgccttgttctttgaaaatactaagttatccatgtgttatattgccagcacctggaccaatagattcggtagattcatatttaaaagagttttagtatctaacatatgttcacatgcttcagctgtcagaatcacacaacctactgcaactgaaactacagagtacagactacagtttgtatacagatttaaactacaggttgtatacagatttaaagaaggctttaaagaatcacagcatacggttagatgacaaacaaaccattagcacatgattaattaaatataattattaaaaaatatatgtttctttgattttaaaataaattttatataatatattaaaaaatacagtttaatggtttaaaaaacataatgtaaacgaaaaggttgcaaaacccagactctaacgaactcggctcatgtcatcccagctctaaagtaggcaaaagaagcccaacccacagctcactagcccagaagcaatcagaatagaagggtcactcaacattatttatgtttggaaaaagtatactttggctccctcaactatcgcccgagtacgactcatgtcctccaaccacaaaaccgggtatatcgattcctccaactattaaaactggtgcagacaatatccctcggtggttttcgaggtggtcctacatggcggtcttgaccaagtctttgtcctacgtggctcttacttggcattagaataaaaacaaaaaaaaaatgtgggacccatatatcattcacacaaaaaaaaaaatgtgggacccacatgtcatcctccctctccttccctacttcctccccctctctcccttctctctctccccctgtcctttctcttggccggagcggctgcggggatggcagtggcgagcggcggcggcggcggtcgggacgatggcggtgggagcggcggcggcggtgatgggaatgaggatggcggcaaccaaggagtgcgacgtagcggcagcgtcactggccgagttccacgcgtcgcccgccggtgtctgcggcctcgtcgagtctggcgccaccgccgtgccaccgtcgtgccaccgctcttcctttcgccaggctacggccgtgcgcgctcgccgccacctccaccgctgcgaccgacggccttcgacagcagcggcggcggctgttggatggggatggtggagtaggtgacgcctcctacgggtgctagcgagtaacacagcgagcgggaggcgatggggggctgcagg

SEQ ID NO: 7759 - DNA, 7009 bp, Oryza sativa
tcatttctcttggcaaagatgtgctaggaccccagttcttctttatatccaggactttaaggtgatacagcctgcatatagcttctggtagctccagcctggggcccttgtagaagcagcccagttctagatagcgaagattgacaaatgctgagatgttgcctatcaatgaatccaagtcaaagaagaccatctccagtttcaacacacggattgaccttacctcattgagttcttgccgaaacgtgtctgcaaaatccaagtcatgtggcccaaacagcatcaatgtgcttaagctcctttgttgcaactcacggaaggaattagagaactcttggaggaaagaatcattaggatacacagtgccattcaattttgttttgtactcccactctgttattacactgacatgacgaacacatggcggtgcattcctaggctcattgccctctatggtaaagctttcgtcagatgaaaccttctgtgccagatcatgaattagatcatgcatgatgagtaaggttgagtgctcaaactgtttttcgaaaaatccccaatcaagtagatcatcaaagtattcatttccaatgtcctcaggtcgtgtgtgaatatcagcggaacatagcaaatcttgcgctatccacatatcgatcagacgctctttctcatacctatgatactttgggaacacagcacagtacgagaaacaactttgaaggtgagctggaagatatttgtagctgatcatcaaggccggcatgatatcattctcatcatttttgtacttccattcaccggtatgcagaattctcctccagtaatcaacgtcaaagctccttctcaatactttgcttacagtctttgctgctaaaggattgccctttaacttgtcaactatctgctgcccaattttttccagtcttggttctcctttatagttctcatgtccaaatacacattccttgaacaaacaccaaaagtcatcttttttcaaaccatccaggttgatgtgatctgctgcttctatcattgttgccacagatggtttacgagttgtgacaagaacactgttccccataacatcgtttttaagcaatggatttaacagctcatcccatttttcctttgtgctatcctcccacatgtcatccataacaagtagcactcgttttgacttcaataagtagtcaagtttgtcttggagttgaagctccttcgatttcttgatttcatcatgctcatccccgcaaaaggagtccaacatttcctgcataatcttattttgatcaaagtgaacagatacataaacccataacagaacgtcaaaatgctttgacactgttgagttgttgaagactagcttagccagagtagttttcccaatacctccatcaccgatgatggcaaggatagagagtttcttcctagcacattcctcacttgttaacttgcttattatcaagtcacgctgttggtccctcccatgaactttgggttcactttggcatggtgatgtctcccgatgatctgttcttgttctctggtatttgtgcgcgtaaaggtaatccagactttcaagctcaagagcttcactcacctgtttggctatcctgtagcatttttcagtgtatttacttatctcattcgagatgcacttgttaagagtctccagatagggtactggactactgctactagcaatgtacgtagtaacctgaagagcagatgcagatgaatctgtgttgctaagagaactttctgtggtgtctttgtcatcttttgctgcatcattgttaaagaactcaacatccctttgaggcatggagagaagcaaatttccatttgcattgtcatgcaatagctgaaaaaaaggggcaaaagtggatttaaacaactatcaaaagttgctatgcatcataatttagtataactctgtacccacaagaaacgataattctgtaaagcatgtcactaaaagaagttgtatttatattttggtttgacacgtcacagttgaagagtccactacaaagtagtgtcaagtatttcacatataatagaaatttgtctgcattgaatacatacattattatatcataatgtatgaaacagagcatttgcacaagacagcactttgcaaatccagtcgttgaagtaaacggatagcgagagaacaaaatatggataaataccaattcctattactggtaaaaagatacagattactggcttgaactgttgtaattctgtatcttatttgttttaataatagttttaactgcaagggcctcccctgcagtatcattctcaacaaaattataagttccccaattagttaatcagtgttttagctgtgtgtatctccaggcacacaggccaggatattagttctagtatctaaaaagtaaatcagtgttttacactgtcattaaaatttgtttcaaatttacttgagtaaattgtgcctcaagtatggcaggtggcttacggtttagtgcaagagcttgaggactaaccaatacttcctccgtttcaaaatgtaagtcattctagcatttcccacgttcatattaatattaatgaatctagattatatctatctagattcattaatatcaatatgaacgtgggaaatgctagagtgacttacattgtgaaacggagggagtacatcacaaaagcaatttgcaaatgggtatttagtacaagaatctaaacactgagcaatctagtgaaccaatttggtgagttagtgcattcttaggacagttttgctaattttgtgtgaacatgtgttttccaaccagccattttctcatttggttccaggcctgtgagctcaaatctttttgccttgttccattttgattgcaagcaggtgtgctgttggctggaagattgattgtggtttacttcatacatatgcatgttgaaaaatctgactattttttgatacaaaatatcgaggtaaatataggaagggcctttttaaggatgaggaggctttatcgaagattatgtgccattatgattgctgttatctactgcaaaatgaagatgacaaatcagatatcatcatggcatgtagcaaaattgagatggtcgtcatcaaaactctacacatggttggagatttagtagtaggatttgtgtttgattttcatattctcatatagtcagtagttatgtttagcaactcatgttgcaaagctgtaataaactagggtcagatgcatcttttgatgcagatgctggattaatttcaattatcgcaaaaagaggcatgtacttatgatcattcatcatggattcatggcataggtttgtaatccaccgtaaccggcataacatttttcactagtcacatcaaaaccaaagtatggatactgcattctgattgggtgagaaatgaaagaaagcatatcgagcccacgaacatgccacagcctgcttcgtgcacgaaggtaccatgggcatgtttggtttgtattgcgaaagtaaatcttatcaaacttcactaaagccaatttttggcattcccgcaaaaattttggtaaggcgatgtttgacttgagcaattatcaaatttgttgctattttaacagttgaaagctctgaaattgccaaaatttagtgggattgtgatggttgaaatatgcagtaatttgccttcgatttgtagtacaagtacataggaggattggggaacaaaacaaccaggacctcaggtgaataaaaaaaaatccagaaaacaaaacctgcgctgaccttatcgtggtcgtcgcgctccacctcctcgcggatgcggtagtactcgagctcgccgaggaggtcacgggcgcgggcagcatcatgcgaggcctccctgaggcgccgctggagctccttgttccggatctccttcccctgcgtctccgcgagcaccgagtcgaggcgtcggtgggcttcgacgaggcgccccacctcgcctccgaagccgacggtggaagcccactgctgcagcgcagcagtacgatcgtcgttgactcctccggtgattggaagtggaacaaccgccgccttgtccatctgccagctacaactacagctagggatcaacagagaatgggtgtggcactgtggcgccgtcgaggcctcgagggcgaggtggcagtgcgtgccgacgccccggggcaaagctctgctggttgcaaacttacaatcctctcctccttttccctacgcacgtttttaaaccgtgtattttcttaaaaaaaatctgtagaaaaattactttaaacaattaaactaacctacttattaagtttctttaactaatatataattaatcctacactaattcatcgctatattttccgtatagaagctgaggaatactcaccgaagaacacagagcgcggctagtgactgaggagacgacagcgatgtacagaaaacacaaggccatagagagatactacgacaggagtactgtaggtctgtgaggcattgacaggtcaaacacacagccgagaggtagtcacgttaaattatgcgccaacttgcacatagctacatacgcgcgtgttgtcacgtttcttttcatgctagctacagctagtagtggctgctagctgttgctagcatagttgataagtgaaggtgaagactcgccaatccacccagcactaactaccatatcttcttggggaactctaatactgttggcaagcgcacaaatttcagtttgatcttcgtccatgtggaaatcgatatgtgggatccacgcagagaaactattagtctcgcccgcgtctacctctctcgtgcacaaccgaacctagaatattttattgggtcttgtgaaaaagatccaaatatcctctacatctcttgtgtttccactttaatttcttccatgcaagtcattttctcttctagctttccccctatcttgctttcgttgatttattctcattgtttaactttcttatttcaacttttcataccccatatacctttgtggtgggtctttggaaacctttcacaaatcccgtacaagcgaggtaatgatggcaaaacatgatggctcaacttgctaagttgtgagctagctataatttatactataccaatctctcgaggtgatatgagttcttattgtcccatgacgcgggaggcccatcggtccttacaaattgaagtaactagacaaaatagatgaaaacggggtattagaaagttataagataaattgatttgcagggaagtgtatgagattgaggtgtaggggggaaatagacaaaacactagtgagttgtagggggtatttagatatttccttttttttctttttgaatgtcaatttttcaatgacacactattcgactcccaaaatgtgttcggttttagtatgacattggagctccccttaaacggaggaacagacagaaataaaaaagaaaattccttatgtgcattttaatttagtagtattccttcaatacaaacttaagctttatagagcaattttaccatacaatattagatttattttaccatccaacatttggtatctacaggtaccatgttttgtacacagaattttggtacctcagatactaagtagcttgagataccaaatttataccggaaagtacctcaagtacaaaaatttcattatatatgtccttcatttttcatttttaatctcctcagggcatggcaaaactcaagggtgaaaaggacatgacatttcttatatttgatggaaccagctttcagttaatgagaaaggtaaatcaaatcggtaaaggctagttaatttggtcaagtagctagcattttttttttacaacaggcaacttccattacccagcttggaaaccaagcccaacagcacaaaaacataatcttaataaaacataaaagttgtctagctaccagctcgaaacttagagacaaaagggaaagtagctagcatcgatcttgatcaataggccagatatgatgtaacctataattcaaaattagcattattatatatacggaacgttttattttcactcatactcctgcgcagttcagttaactcactgctgcaccgatatatgtccatttcctctagcgaagacggcatgccttcctccggtagtgaggttatacgtggacaatgtaggatcttcaatgttttcaacaattgaaagtgacgaatctctgaggacaatataggatcttttatgccccattctttcttagtataaatttcatagacatgtaaggtaaaacaaatgaaatgttttatgccatcagtatgtcctttacggaaaatataaatacgatactccagaatacttcgaggtgaaacatatttatgattatgtgcactcgcggaacatttttgtgagggcataagaaatatcaacactgctcccgcattggctacctacgtgtagttgttctagaccattggtcctactacactgctcccgctgtcatcaatcgttacgcctccaccagtcagcctaacccattggcaccgaaacagagggaccttcaggggtccatagtctagttcccatatgttgtcgatgacaccgtaatacatgctagttgtactatcatatcttatggcattgatacgaacatcattgttttggttcgtgctctttttgtctttggctcttgtgtaaaatgtgtttccattgatttcatatccttggaatgtcgagaccgagcaagatggtcccctagccaagaaggctagttgtcggtcaatcatctcgttacccatgaggtgttgtcgcagccaagcggggaaagtatcaatatgatagcatgtaatccaggcatcggacttgccaatgttttctgagcgaacaatcgcctggtgctcctcgatgtaaggagcaaccaacgaagattgttgcaaaaccgtgaaatgtactttacggaataaatcgttgtctgtagtcataattgctctccttccaagagtgccctttccctatagtctcccctcatggcttga

SEQ ID NO: 7760 - DNA, 7498 bp, Oryza sativa
agtggtttgttctttatatcagtccatccatcagacacaatagaaacaccttgtgtgcacctgcttgatgcaaaaataaagaagtgatagtcaataactcaatattcagttaaaaggttaataaatttgcacctatacaaggatgaaaaaggttagcaactgaaaattaccatgtacttttgactattgccaaatcatgttctacgcttcttttgcatgcatctagcagagttgtccttgccttctcagaggatggacctttgtatccactgggagctttgttaatggctgtgaccatttcagcaaattgtgggcttctcaatatattaaacggaatgccgttagcacataaaaatttaactattttcatatctgcatcatgtcttttcccttctccaaagcaatcagccaacggattgccctgcctagtaccaactgatttcgaaccatctccattttgttcagcttttttaacctactcaaatgacaaggatgccaaaataagacacatttctacttgctaagaaagttgaagagtaaagggttaaaggaatacttttgtaccttatcccgcagagctttgcacttgataggatcttttagtagcgcaacacagcgtgctacctctgcttttttgccaggtggaggcccaagcaaatgaatacgaattctcgttaagctacccttcaatttcttctggcaatgcttacactgccactgttttgttccactgtcgttctttccttttggtgccttaacgacagttacttcatcgtaaagagggtttacagtaccactctttttagatgatcctgcatcttcttcctcggagccatcagccccaagttcatcgttcgtgttactgtcatcttcgtggacgacaacgtctgcatcagctcctcctacatcttcatgtgctgcgatctcagatcgcctgcgtttcttggaaccagatccaaatgccattgtatctacagatggtttgtatgaagattggagaccttatatttttctaaactgaaacacggtacctgggttgagtttgccggcggccggcctgacgtcgtgagcgcggctgagcgcttgacagcttgaaccctggactggatcagcagcagcaaacaggaatgcagtaatgcttgatctcctttgaggtgactcttcctgtgaccaacaagctctcctattaatatagtgcttaaggtgacgcctcgtatttcaattatttcttggtttcagtccacagtccacactcatattaagagcaaggtcaatagtgtagccagctactagctccaataatatccatgtcattttatagccaatatcaaaactaactagtacaataggttggctattatatcaacatgatctcattattcaaacaataaactttacatgtgcatgatcagaaacgccctcaactctgtggcctatatggccatttgtattatgcaataaacatgggttatctactactctacctgaaaaaataacgacaacacacttgataattcacatagtatatcacaatccactgccgtccaactgcataatctataatctatacatgaaaaaaggagaagaacaaaagggaaaataaaaggagctataggaagagattagaacggactagatgcaacagatgagacgaagaatcggtagaacagacatagacgacaagcattcaacagaccgagggagaagaaaagaaaagaattagaccaagccaattcaaatcaagaagttgcttgttgctttgggtgccagctgcatgcccgcaccaagcgcttctcaatcctcctctcgctttctttgcagctgagaactgggattactaactttttgggtgcactggagctttcacggcagagtttcacgtcgcgggagaaaattccggcgagacaggggtgaggggaggcggcgtgaagcagagcaaaatgcgtcgggcggatcggaagaggcacatcagaaacaaaacgatacacgggatcggcggggtggctgcgggacccacaaatgcatgtgtatctgtgtatcgcccggcgctacatctagcgcccgctctgttccctctctctagttatctctcctccacgtaagaatagtctgagttggaatattttggagcctgctgattaggcttattgtacttgctctaatgaccaagtctaggaaactgaaaatacgaagagacaccatcttgtgatcctgtcacgttctcaacaacatagaacattagcacgtacagatattggattattgaaccatatttacatcattttatagtttgcattctttgagtcatactgtgcgtagtggtgcacaatgacggatccagaaaaatcgattcgttggtgtctatcagtgtcatagtgtgctaatctggggatgcgggtggcaatctgggccgtacgatccggtgatccgacggtttggtttcgctataggttttaccgaaagtcgttgatgtcactatatatagtttgcattctccgagtcctagtgtgcatagtggtgcgttcgaacgttgacgttaggaatttatcgatggttttcatctcttagagtgtgttatagatgccactaccgctgatgtatagatgtgttactcaggtatagtggagcatgatcggttaatgttcacatcgaacatagcctatcatgtactccctccgtccaataaaagggcaacttagaattggatgttgacacatcttaccattgtccaatattagatgtgtcaacatccaatactatgttggttttttataggacggatggagtacacagtgaggctagagatttgccattgattgttgccagctcgagcgtgttacaaaacacattcgctgatatatgcatgagttcgtgagatttgggtgatgggatatggtcgccacattttgtatggtgtttggttcatggtaaaggtggaatatggccgcccacataaaaatattctataaagatgttggataaggctatcccatgattcctatccaaccttatcctccaagtaaatgggtatattcacggatatatacacatgaccttttttttttattctaaagcacaatacaaatgtagttgaccacaacactcacaccttatttttatgagcatctccggaagattgggctagtatatatcttgatattgaagaagtaacaacgggcgttttgctgtcataccttgagaaaaatttgccataaatactatttttttatcattttctttattaacatagttctttgtttacttaaaaagtattattttacaacaatattaagtaaaacttgttataatatcataaaaaataaaaaaactaaaggtttaaccaaaaattgttaaaaaataatttacacgtttctatttaagttatttaagtaacatacacatttcactcaaggtgtagttgttagcacactggtcatggcgcctcataggcgaagacgacgtcgcgtggtcgaccctctggttcttttttttttgccattcatgtgacagcagaccatttttttttttttgccattcatgtgacagcagatttttttgccattcatgtgacagcagaccagcctagaaaatttttgggccatgcgtgcaaacaagcccatcaagagaacgtaaaagtgagccctagcacttcgttcgtcctcaactcctcgtcagtggtccctatcccccagccaccgccgccgtctcctgtagtccaagtctccaataccacaagctcgatgcaacgacgacggctgcgcgatggcttcatcagccgtggcgccatctgtggagaaaagcggttgtggcgcgccgcgccgccgctcgctggccggccggcgcccctctatttctccaacggtccactccaacctagctgcgtgatggagggagaaacgcggctgcggcagcggcgcgcggcgcgccgcttgccagcgcccttctatttctccaacggtccaacctcccatgttcgacggcggcggcgagcagcgaaggaacaactgcgctgctcgccctgtctccaccaatgtagatccgggtgagtctccactctccactagcttttgctcaacatacctcgttcctccatcgtaccacccttctcgttcctccattgacgtaccaagtgttgggtcgacgatccttccgtttttggaacgaagttccgcttcgttcccgttcctcgtttcgagacgaaattcccggaacgtagaacgcacccacgttccgcgtttcctgtgacttagaccggctccaccagtaagatgtccttaatttctcattagccgatcatagtcgatattatcttacacttatctttttgtagcctcttcctcctccctctcctgttcagcaaccaccaaacaatcaaactccatcggctgcagggagtcaccatgttgaggaagaagtacaaccagctgctcctgctatcccagtaagtctcttttaaacaccaagtcttggatcggctatatctgtttgacatctaactgtcttcaaatttctctattgtaggccttagccgatctgttctctttagatattaaagattactttgatgagacagaagaagaaaccacgagcaaggctctagcccccttggatgacactgtcaagaaaacacttgaagacatatccattcggctagaatcttcattggataatctggtggctgattgtggtttgatccgggcacgatttgctgaaatccaagcctcaattccggacgatctggcaaacaccattactccagccgtgtaccttgagcaacaccaattcaagctggagaaggccaagcaacggatagccgattggcgagaacagaaggacattgaagccactatccaagccaatcggcagcttgtgcatgaagagaaggctaagttagatcaactctctgttgggcctattcagtcgaatatagatcggcttgaagctcgcaagattgatttaatagctcaactcgaggaatgcaacgccgagctggatcttgaaaaacaaaagctagccgatcttccaaatgttgttgaagaacagaagtccagattgagatcggctatcaagaacgtggctgacatgactaagtctctcaaggtcatccccggaaccgacgcccaagacatccaggccatcgaagaaatagatcaaatcaggcaatgagctttgtcggctatccaacgctatctgtgtaatagatcttaggaattttttgtaatcggcgaagaaactctgactctttatgtaactcatcttaataacttttatgccgattcaatataactccatattttgctcaaaaatttttgcaacttttgcatatatgtgcccccctaattttacaatgtcgaaagcatttataaaattataatatgaactaagggcgatataacaatatcggctattgtacatcagcaaaccacaaccgattacaatagaaagacaactaagggcgatataacaatatcggccatctcaaagcgatgtaaacacatcagctatcatgtatcggcaacaccagccaatcatgcattaacccaaacacttgggtaatatttcttcaggtacttgccatttagcgctcgtccatagacttctccatcgagtccttgcaacatgtaagctcccttagacacaaccttatagatttggaacggtccttcctaattcggcgaccacttgccgaatttgttatcccgagtcccaatcggcaaaatcaacttccatacaagttcaccttccgaaaaagtcttggacaccaccttcttgttgtaatgccgagcaactcgttctttatccttggtaaccttcgcaagggctcttaatctagattgaaccaagtcttccctttcatcggccatgagatgataatattcatcggctgtcaaatcattttgtaactccgttctccttgagccaattctaacctcccatggtaaaacagcttcatgttcataaacaagcttataaggagggacttggatcgatccatgacaagccatccgataagaccacaatgcttcggccaatcgagtatgccactgccgaggataatcagaaatctttctcttaatcaatttgatcaaactcttgttagatgcctcggcctgtccattagcttgtgcataatatggtgaagaagtcaacaatttgatacccatgctatcggcaaactgaacaaactcatcggacacgaagattgaaccttgatcggttgtaatggtttgaggaatcccaaatcgatagattatatgctcttgaacaaattgtatagcatcccccgaatcaactttctttaaaggaattgcttccacccacttggtaaaataatcggtcgctaccaatataaacttatgccctttactcgatggtggattaatcatactgatcatatcaattccccaacctctaaacggccatggtttaatgataggattcatagccgatgccggtgctctctgaattgctccaaatttctgacaatcttggcaccccttgtaatgtttgaaacaatcttccagcattgtcggccaaaaataccccgcacgttgaagcaaccacttcatcttatgagccgattgatgagtaccacaaattccttcgtgaacctccccgattgcaaccttagcttgatcggcactaaaacacttaagcaacaccccatcaatcatccgataatagagctcatcatccaacaaagtatacttcaacgctttgtaacgcaattttcgagaagccgattgagatggattatgtaaatattgatgtacatcatatctccaatcatcggctgttaatgcagcaacctcaaccttgacatctttgatcatcggcttatatctcgacgccccttgggccaaatcattagcttcaatattttgctctcgagatacatgcctcaaagtaaccagccgaaattccttcattagctctcggcacttctcattataaaccattaatgtatcatttttgcactcatattcccctgccaattgactgatcactagcaaagaatctcccataatttcaatagcatcggcttcaacttccttgaataattgcaaccctttgagaactgcttcatactcagtctgattattagttgcataaggtttaatagtataggcaaactcaaaacttgccccccgaggggaaattataaccaagccgataccacaaccataagaggatattgacccatcaaagaacaaagtccatgggacaacctcaaccgagccgattgaatcatcatgatggtcaacaataaaatcggctatagcttgccctttgactgccttcggtgactcataccgaagatcaaactccgttaaggaaaatatccactttccaacccttcctttcaaaattggagccgataacatgtacttgacgacatcggctttgcatatgacagtgcattcgttggacaatagataatgcctcaaccttgtacatgacaaatataagcagcagccacttataccagggggatcca

SEQ ID NO: 7761 - DNA, 19907 bp, Oryza sativa
ggaatcaatcttcttctttgatttcgcttcgatctatttttcatcttcgatactgatattaccaaatttggtcgtcaacacatgcccccaagtccggaatatttggtaatgtttcggatttgccatatatcaactccgagtgaaattcgcaccttgtcgttttccgaccgttattccaatgctttaaatactaaccgttgccccctaaaaaatcttcactccgttacttccgtttttaccgcctaagccaactttgtcctttctctctccggcgatttctccgacgcacaaggcgatccccaagcgactccatctccggccagatctccgcccgcggcgatgtcgtcctccgccagcccgtctgccgcaccgtcggccgagtacgctgaggtaagttctcatcggctagatctcttttcctcgcaacagattgattttccaactcctcatctggttttcctcctctcggttcttttggatttgtagcatctctccaacctagttgcaatcaatcttcgtctttgattccgcttcgatctaatcttcttcttcgatactgatattaccaaatttggtcgtcaacacattgcagtataaagcaattgaaaaatcccttcttatatccaccttgaccttgatctacttcttcaagcccaggactagatcgatggcaactagctcggattgaagatgaacaacattggaccacttgatgtcgtggtcacaccattgccgcctgtgcctgcgccttcctccgccgcaacctacaaccagatccagagaagatgtggtcgtcgccagccttcgcattgctcgttgtcctccaccaatccaccaattgccagcctttgccttgctggctgcaccctccgccagatccaccgtcgccatggacactgctaccgccttctcgtcctctttgtcgtcgttgttgcgatatccctagcgctgatggggataaggagagatgcaccgcgggtggctgatgtgatgtgtcttggcattgagcttgatgtgccacatgcggccgagcggggcgcggtcgagcgacaccacgacgggcaggaggagaaggggcgctcgaggcggagaatgagaggaggaggaaaggagaaggcaaaggtgtggtggaggcaaaggcggaggtagcgaactggcggaggcaaaggcggaggtaacgaaccggaggctgcttgctcggaggattcgagattgggacgaggagtagtgggttggtggcggctgaggttggtggagagtgcggacggggagggattaaagactatgggcgctttggttttctcttttctttttgttttaatgtttttcgagcttctttcagttgatttttctccaaacgattcgtctcttgtgggcacacatcactgttgctacgtcatcatttataattgtaaactaaatgatactagcgctttgttgcgggatatatgtaaggtattgtgaaatggttaatgatttgggttgaaatattttaaaaatgatttgagaatgatgatttagcatgtgtatgtttagttctagaatgaaataaattgtaaaaataattactatatgctttgcatgtataactttgtgtgtttagtgggttgacgtggcatgcttgcatgttaggttttaggaatgctaataaatgttatgcttgcatgttgagctttaggtgtttagtgggcattagctttatagaaagaagagattagaaataagtagatatagtactattatatatttgacaatatattcttcaggtactaataataatttatatcttctaactacttaaaaaaattagtaatgtttcaattgtcaaaaaaaatcaaacggaaaaggtagttacttaacatgaaaattaaatagttgaatcggtttattcagtattttttaaagaaaaaaaaggtttattataacgtgattgattagctgcagaaattgttttcggtattgctaaaaatatgtcgccacaaattacgatagatttcagtcggttgtttcaaccgtcggatgcagaaatcgcgcatgtgtacgcatatccctccgattctgttctcttctgttctcttatgttgttttaacgtttgtatttgctaagtaggattactaattaaacttaaaagctaaatatttgtgtcatcacaaatttatagttttgggaattacatcaacttacacatgtaattttgagaattacatatgtaattttaggacttacatatgtaattttggaatttacatagtaaatacactaaaattacatatgtaatttaggaacttacaatgtaaatacatagcgactattttttggtgaaaaatatggcgccataaatatagctactccctttgttttttattaaactgccgtcaagtccgatcgagtgacgtcgtctgtccctgcactgattaacacatcgcgtaaggctttccaaaatttttttcttgggctttccttgcgctaaccctgatcgaactcttccaaaaatccctaagggcatcagcgatgtttattcccaaaccaagcagtaagtgtgggcccacctccaaccagcctatcacaagccttgttgtgacttaaaaaagtgaggtgggacccatcatattcccttactaccagcaataagtttgtaatctggtagtaactatttggaaggccctaagcgtcgggcgcccgatttacgtgcaaaaactactttcaagtgatttttctcttaaattacttattcaaatcatgatccgattgtaccattaaattcgttgcaattaaatcttcaaaacaagaccacacatggatatattccgacaaaaaaattttagcttattattgaattatttttaaatgttgcacgatgctccaccgggtatatcagaattgtttcactaagtagatcgaaactgtttcactcgtttaaatcgggtgttgtttcaccttatataaaaacaatgtttcagcaaatagcgaaataatgtttcagttcactgtaacatttgatccatacatagtgatatattataagtacactaggtgaaacatttttcggtggaacaaaaaataaaacgaattcccttaatatagggtttccaaaatatgtgggttttttgttacaatgaagtatttcagttcactgcaatattagatttatacatagtgaaacattgtgagtacactaggtgaaacatttttggtggaacaaagaataaaccgaattcccttaatatggggtttctaaaatatgtgaatttttttttgcaatagagtatatggtgaagatatgtggcaattagtatgaacacatagtggggtcctaggagaagcacatggacacgttgtggagggggggagcgtccgattttctccccctcccccgggcgaccgagcggcagcattttcgcaactatttactactctcacaatgtttattacctgataataagcacctatttaatgcttactcctactctagcactacattatcggcgtggattctctaacgggcgagagcaaagtcagaggctgacttaccccctctccgatgccgtccgaactccatccaagggctactgagtccctcaacgtttacagtgtgcatcagttagctcaggcattgttttagcccaaataagggcccagtacgggacacaaatgagcccagctcgagaaagaggatgcagagggttcagaaacaagcagcgcttggtacagaaagaattaagcaagcatttcagtttagaacttggtacagattcatgtcccaaataaccaaaataatatccaccaatggccaaaatggatttgtacatattaccctagagttttgatggtcactgaatttccatcaaaagcactgaattttcgataagtgctaaacacattcatgccaaaagaacaaaagagccttcctcatggagcagaaactaaatcagagatctaaacaagatcttggacagacatatcatcaatctcactggcaccctacaaagacaaaacaaaaaaattaaatacttattactaataagcatctggatgcaatcggatgcaaacaaaatccatgaatttcgaatgtaaatccaacttacttgtttggttctgcttgtgccatcgaatctccactggaatctggttccaccacctgcgatggcctcccttccaggcacggcaaccacgaaccctccggcgtcccggccacaccgctagccatgcgatcgacgcgcgcaacttcgccctttcctcgtcgccaagccgcgctacgcacgcgttccccgccaaaaatattctgcgcgctctgttccggcgccaaaatggcctctagtggcggcagaggagtctaattgggctttatttgggcgttgggccaacaagcgaatgtgaacagacttgctctgatagctgaacctgggcacgcccttggatggagcacggacggcatcggagagtggtaagtcagcctctgactttgctctggcacgttagagaatccacgccgctacattatggatgtcctaacgaaacacacacgaacatatcctaaaatcccattaaacaatcgaatctctggaaaaatcatgacttcacctggcaaaaataggcaagtaacttcaactaaacaaacagatggaggtgagaaataaaaaccaaacagactgctccttatcgctgcccggaatgatccacgtcgtcggtcgctgttcccaagctctgacgcgcggcgttttgatgggcccacaagccgcgtgatcatctccgccgccgctgtcaagcaaccgttgcctcccaagactagatccggcaagcctcaggacggatctgacgaggagggggcgaggagtaatcgtcggcagagaaggtcgaactgtcgccgtcgccgccaccgttgagggggtggcattggcaaagggggaggaagagcggcgccatcgctgactcggtggggggagagagagcagcggagaggggaggaagaactgcagctcgcgatgggggaggagaacagtgctggcggtgggggagggagagtgaccctggtggtgggaggcagggggagcggcggtggtgaggggaagggttggagggagtgagagcaaccgtatgagggagggtgaatttattttgtttatgcttttagggtgtttgaagtaaaattttggatttctctacaaattacaaaatacgaggactaaaaatagaaaatgataggggttgacaagcaaaattagaacacccctagagccactttgcactatggaagaaactgatttgagtccgcagtcttcatcttatgtgataatctgacggagccattgtacgttatatttgcaaacgaaaagtaatttgtgaataaaccttttatacacgtgttcttagcgatttaaaagcaaaaactgaaaaataaatttcgatgaaaaaacctcaaaataaactctaaatttaatgttaaaaatttaaattttggttgataagtataaatataaggaaaaaaatgaggccgtgagacttctcatagcagtgtcttttgtactgtgaattgtgaatggcctgatggagcactctaccactacggatgcaagatttcgtggtgccatagatatggtctatggaccgttggcattgacacatcgaagctttgaccataaaaccggagggcccattgcacaccgcggtgaaaagtactatctaactttcaggttataaaattttataatattgcctatattcatatggatgttaatgaatctagacacatatacatattcattaatatatatatatatatatatatatatatatatatatatatatatatatataaatgtggacaatgctataaagtcttataatatgaaacgaaggaagtaacagataacacacacgtacacgtttatgttcattggttatgccccatccaaggagctaagacaaaattaggctacaagatcaccggtgttgtatgcttgtgtacatgggtttgcctattcctctcccggacagatcaaagttttggaaattacagtaattttggtttgaattaaatttaaatgttaaacaaaatttggtcacatctatataaattttgctaaattcaactttaatgaaagattcaaaaaataattaggagaaatagtttcttgtcagaaggggtgacaaaatccagaaccttgatggtttagatcttgctgacgggtgggaatcaaccatacattttagggatacatagaaatacaaaacagtttgaattttttaagttattattatccaatatatataagtgaagaatattgtaacgccccgcaataatgtgaatccactttgaatttgataaatgtattgcttgtgaagtatgtgttcgcgtttgaggaaaaagaaaagagagaataaaagaaaaagagcaaagcagcccaacagcaggccttgggccttggcccatgggtgcagccagctcccagcccagcaagcaaagctagctagcagccaagcagcagcaacagcagcaaagcagtagcagcagctagctagcgagcacatgcaaggcaaccggcaggagctgtagcagtttagtgccaatctccaaaaaaaaaaaaagtttagtcccacctccgctagtttggagagatggcgagcacattaaatagaagggctgctcagtgattgtaactccaattctgaaatttttgcataaaagcgaggaaaaaaaacacagtgagttgtagtgctaggtgtggtccaactgtacgagatggatccaatatcgtttttgggcccggtgtggtggccgtcgcagattaggtaatcgttaggcttccaggatctctccctgcaacgtgtggtgacgtcgcaaattagataatctctaggcttccagtgatctctcccagtggcgtcacatattaggtaatcgtccagtggcggatctaggatttaggacatgggtggtccgactcaattgtgttttcaaacaccgtaacgtcgcagattaggtaatcgtcaggcttctagtgacctctcccagcagcgtcgcagattaggtaatcgtgaatcgtcaggcttccagtgacctctcccagcagcatggctgaaacgacgcagggcggcgtggccgaaacgatgcagggagaggcgtggccgaaacgacgcaaaaaccaaaatgacacagggagagcatggccgaaacgacgcagaaatcagtcgagggagaggcgtggctgaaacgacacaaaaaccagccaaaacgacgcagggagaggcgtggccgaaatgatgaaaaaccagtgacctctcctagcggcgtggccgaaacgatgcaaaaaccagttttctctctgaaagaactaaatgaagttagttctcaaaacttatctatgaaacaagttttttaaaaaatactaccaacttatcctatgaaaaaagattttttttaaaaaaaaaatactacctcccctatataaaatcggatgttattaagtacgattccgtttcgtttttgttgcgaatgcgcgcgcacggtgacgtggatcgatcactcgacttaattagcgcccacgcaccttacggacgcagccattgtgtgctgtcctatataacttcactgctgccgccacacccacaacataatctccccctctcttttccagcggagcaaaaagcctagcaaaatcttgcttaatcagtgagcaaatcctagctccttacttgcttatctccatcatattgatcggagcaagaagaaggggaagtcgatcgatcatggagggcaataagtccagcagcaacgatagcctttgtcgccatcatgccgaggacatcgaggagggggagatctgcaatccgggtggtggtgatgggtgctacgttttgggctccggcaccgaggaggacaacgaggaggagaaggtgggcatgcagccagtgacctgcaagtggtgccgtctcaaggacatcctcgcgctgccttcgcccatgccatcttcttctggttctgaggggacgatcaacgaccatggtgccggcaacgctgccgccgtgttgcgactggaggcatccccgtgccacttgtgcagcagggagttcggcaacatgaaggcggttcacgggcacaagagagtccatcaggtagagaactgttaacgaccaaatttggtaatccaaggatcgtaaatgaagaagaaaccgagatggaattcgagatggaaatcgtcccagaaacagagtgagtatcggctgaagtccgaatcggctacgactaagatcggcagggttcgagtcggactgggttagccgattgagccgaatccgacaaaatatgacgcagcatatgttgtcggtttaggttgacgtgcttcaagatgattgccacacatggatagagtcctgagaaggcaattgtatatattagttaggatattttatgtaatttccttagagatatgtttgggcaaaagtctgccgcaaagacttatggtattttagagtttgttagagataagagtcatgtccgatatgaacatattttgtaattctcgggtataaatagaccacgagccccatgtaatcaaactaacacacgttcaatacaatctcggcgcatcgccaccctttttactttcgttttattcgacgagttcttgcttttgggttgagctgcatcggtttcgatcttcaacaagagataaaacttgctatggcggcttacgttctcgggattagtgcttccatctttatgatactctaatcttgtttatgtaatacgtcgagttatcatatatcttacataatcttcgacgatatcgttatctaacctataatcggctaacatctgtcagaagagggcagccgattaggttaaataccgatgttgacttagattatatatgatatccaccactctatgaaattttcaacggcttgattatctagatattgtctttcttttcatacttatagctgcatcagttgagtttgatcttatgagtcgtgattagaatctcaatctctagcctgtctttggttattgccgattagagtagtatcggggtttcagccgatcttacctgatttaactacatttatcttatttgccttattgacatgttaaatctaccctttatgttaagatcttgttacatctaagtatattaggctttttgtttggtatatcttacttgctttaatatcttaatatagagtggtatcggagtattagccgatacacgctagatctatctgatcggctttactgtaaacacatatagtcttgttattaatatatatttcgatctaagtgatttatactgtctcggcacggcgatagatctatcccaatcacttgatttaagtatatatcgatataaggactatatatcgttaatatctacagtcgatcgagtagatctagttcttattaatgactgccgatcgatgcatttatgacatcggctcaaagataaatgatatgtcatcggcacttagccgatcggctatcgtttatggatttaaccacggtttctttgtctttgtttcttgttgattgtaggatcaaatcaactggcacgctagcatatccaaaggcaagtttttgacctgcactggagttaagcagatctcccggacctcgtgttttcacatcaacacgcttttggcacgcctggtgggactgatcagaagtcagaatcacaacaacgttttctcatggctgagaaaccgccggcatcaccgtcttcagctagtaaagatgattcttctaaatctaagacccagaagcctggtctatctgaagttaatgagagcaacatcatgcccatcactccggacaagttgaaacccgagcaacagaaggatcttgaggcaatgatgcagcaagcatgaaaccaattcttgaattcattcatggagacccaaggttcagaagtataaagtaaaagtaattgttgatgttcccgcaacaggttcttccaaggatggagaggtacaacaagttgcagatggtgcagctcaatcaagtgataaaggtgctgcagatggttttcaaggggttcaaggtgatggctctccaagggttcaaggtgtttttttcaaggaattcaaggtgacggttctcagggatttcaaggtgaaaatcttaaccaagatggcaacacggcacagctacagtttaacaacttccaggatcggattgattatgttgtgcaacatgctttgattaatcaatctggggtattagtcaacacattatcaaacatggtgaagtcgatggttgatggctcgatagctgaatatcaggctacaggactggtttatttgccaggaggggttttttcaaattatcggcccttgatcactaacaatcagccgactgttcagccagttcctcccaatgtaccatcggctcaaccgacagcaccagtatcggctcctgcacctgctgcaccatcatcggcaccaggtcaattaattaatccttggttgttggtgagagagcagccacagcatagtgggcagaatatgaatcggctaacctaagatcaagttacggctatgttcttatcacctcaacctactgttgacacaatccagcaacaaccgattcaacagacaccaccaaggcagcaggttgtgcatccgattcaacagacaccaccaaggcagcaggttgtgcagccgattcagcaaacgccactgaggcaacaggttgttcagccgatttagcagcaaggtttgataaatgcatcagctgggtttggaacacctaacaatcaactagcacgctagcatacccaaaggcaagttttggacctgcactggagttaagcagatctcccaggcctcgtgttttcacatcaacacgctaaggcagcacgctgcgaatcaagttgtcccagagcatttggttcataatgtccaaccagaccaaacggtgatacctcaagttgttcccgaacatttggtgcgcaatatacagtcaaactttcaaaattaccaggggccaatttgaattatcagtatcagcctccatcgccgcaaactcaatatcagcaaggaggaccggctcagccccagtttattcctcagtacaatcaattcgagcctgttccacagcaagcacaaggagcgcctcagcaacgaccatggacagatatgattgcagatgtaatgagggaacagtttgggcttaagccgaaagatgctggaaatttgtatcggcatccttaccccgagtggtttgagagagttcctctgcctaaccgattcaaagttccagacttttcaaaattctcagggcaggatagtgtttcaacctatgaacacgttagccggtttttaactcagtatggtgaagcatcggctgtggatgccttgagggttaggttgtttccattgtctttatctggatcgactttcacttggttttcttctttgccatgtgggtcaatcaacagttgggccgatttggagaagcattttcatagttatttctatagtgggattcacgagatgaaactatcagatttaacagcgattaagcaaaggcatgatgagcctgtgcaggaatacattcagaggttcagagagatgaggaataaatgctacagcttggccttgactgatgctcagttagccgatttggcttttcagggtatgatagctccgatcagggagaagttctcatcccaagactttgatagtttgtctcaccttgcgcaaaaggtaaaccttgcatgaacagaggtttgcacaggccaaaaagaactttaaaaaggttaatcatgtctgtccttacatatatggatcggatgatgatgatgatgatgactccgaaatagcaacagccgaatgggttacaagcaagaaggttataccatgccaatgggtaaagaattctggagaagaggagaggtatgactttgatatcaccaaggctaataagatttctgatttgctacttcgggagaaacagattcaacttcctgctggtcatacaatcccatcggctgaagaattgggcaagaaaaggtattgtaagtggcataattctggatctcattctactaatgattgcaaagtcttcagacagcaaatctagccggctattgagggaggcaaaatcaaatttgatgattccaagaggccgatgaaggtcgatggcaatccttttcctgttaatatggcacacacggttggccgaacaacagatggaggaagagccaaaaggtttcaggggaattcggctaaattatcaagaagtatcacaagaagtctgacaaacaataaaagaggcattatgaagaagatgatggcggttttgatcctcaatggggctgtaagttctttagattttgctggaattaaggtatgagggtgccatttattgaagactgtccttaaggcaagaattgtgcaaaaatttccagtggatccatttaatagaagcaatcggctaaagcaaacaagggttcctgtggatcaaaggttgggcccagtgaaccaagatcgtaaccaaaaggacaatgaagacaggaagactcaatggtgtccttctggtatctttacaaaaaatcagaagagaagggtttaaaggttgaggaactggaagcgctttcaggaggttgagcaagaaatcaatcatcggttgaagaaggcgaagccgagacaggtgtggcgtgttagaaatcaagctcctgtagccgatgaagccgcagccgatgaagcgaagatgttggctaaaggaaaaagtgttgtgaccgcatcggttaacatggttttcatattgcctgctgaatttggggtcaagcaagccgatgtcgatgaagttgaagaagaatcggctaagttgattttatcaccagagcaagcagtcttcgagaagccagaaggaacagagaatcggcatcttaaaccattgtatataattggctatgtcaatgggaagccgatgtctaagatgatggttgatggtggggctgcagtgaatttgatgccttatgctacatttaagaagttaggtagaaatgctgaagatctcatcaagacgaatatggtgctcaaagattttggtggtaatccatcggaaaccaaaggagttttaaatgtggagatgatagttggcagcaaaactatccctacaacattctttgtcatcgatgggaagggttcttacagtgtcacgcccggaatttctatcgaaaattccaaacgcttacatgtgtgtaaaccctcatccaggaatcagccgaggcacacaataacaaattgataatagagtgcaattattactctaattaataagcgaatataaagtcattacagtggtagatagttcctctcaaacaataaagttctaagcatcggaaaataagataaacggcgcagacgactccatcccacaagcagcttgaccagggctacacctaatccaccacaccttcggcatcactgtagaattcctcctctgatgaatgattgcaaggtgagtatatgacatactcaacaagccacgcagcaaatatgcaaatgcaagggataacaagggatggcataatatagtctcatttgcataaatggcatttaataaatacttcagaatttaataaaacaataatgtatttaattaagcaatattaatccatcgctatacaacatacccgttgcataggcccaaccattccgaacaaccaatcccggctgcacagttctatctccaaaccaggaacataccattccaaacctggagctaaacaagttattaccaagtacaacatcatttattatggtgagaggtgtgaaactaatcacgaaagacattgttagaccggcccataaccgcgggcacggctattcgaatagttttactctggctagaggtgtaccactgtacccacaagacacaatctcaacgtcatgtcaaccatgcgtcgcgatacttaacaagtacccgaatagagattgtgacaataccctctgcataacacaattcaaagcaatgcaccgttcctggatcataatcacccccttaaacaaggcatggactccccagcgacccccgtgggcttatctctgccacttcacagtctggtgctctacaatgaaccatactatacagaaagtaaagccgttgcccacgctggcttgtggttggcacggttaatgtttcacaaccaaaaatcgtgaaccggtccttaattgtcatgagcacgaccatcaaaaccatgtgctcacaacccaccattatcagttttagttggcaaattaattaatcatcctatcatgattaaccatcatgagctatcattaagccatcattaaataatagtgaatcataagttatcccatttatatgagctaatgtctctaagcatggctaagcatcctaagcactttagctaaaaccatataatgttctagctaatccaaatattaaccaaacgataaagaataggtaatcaataacaaaaaggctataacaaggcaatgggttattcccacccaatgacattcaaaaataaatgcaatagttgaatagaaaaaaaaagctttaaacgggatcaacatgctcaaagggttgtttggaatctgtgtgacttgccttgctggccttgaaactcttcaaagtcttctcctgcaaattcggactctccgggaacgtcggaatctaaggataaaagagcaaaatcaccaaaacagcacataaacaatcaagaacagtacatatggatatttttaacatgtagctctcaattttagaaaaatttagagacttgaccaactaaatccgagctaagatgaattagttatgaatttttaaagattaaatcagattaaatcatttatatagattttaattgaattatgacgcaataaagaattatttttgagaaggaaaaaggatttattgcgtcagcgggctcggatttatggtggaccgggtgcacggagacggtctacggaacggacggccgagattgaatctaatccaaaacgaacggccaagattgaatcagtctaccgcgggtctacgggtgacgcggcgctgacatcggcgatgacgtcatcaccggcggcggctcacgctcgccggcgaacgacggcgcggcggcgcaaatggagggcacctacgcgtagagggcgatgcggcgaactcaccgaaggctcagacaacggcggacggcaacgaacggtgacggctgcgaggtcgaagtggcggcggcgtttgcgtcgacgacgacggcggtgctccggcgatcttcggcggaaatggagggcgggacgaggacgacgacttggcgatcccaacggcggccttcccgagcgatgacgacgaccgtagcggcggcggcccacggctgaactcccctcgacggcggcggcgcacgggctctagtggctagggtgctacgggcgatggcgagctaaagcgagggtggtggcggatagaggaggtcccgggagtccttttataggggctagggggcggcgatgaaggcccacggtggccggcggcgagatggaaagtttagggttagaggagagaaaacgaatccgaatcgaactcgaatccaccgatttccaaacaaaattagcaagagattccaaaagagaaaaggaagaggggatcggggaaggcgtgatcgaattttggaaggaggcggcggcggcttgcgcggctagggcacggctgcggcggcgcgaggtagacgacggccctgacaggtgggccccacctgtcagcgggagagaggagggagagcggcggctcggctcggcgagctgacttgggccgggcgcgcttgcaggccgaagagagagagagaggggttttgggccgactttcggcccaaagccaaaagagggattttaaaacctttttctatttaaattattcatgaaatgcaattccatttattaaaaatacttccttggctcaaataaatcccagaaaaatctaggaactatagaatcaaatgaagtatttaataaaattttatctagcccatttttgtattggaatttattatttaaaattagatcttttcttctaggcttttaaaatcatttctaataattccaattaaacaaaaatttatacatttagggatttttagggtgtgacatacagcttgttgcttggaagggattagattcatgccaattgttgtattccttcaaccatgcatcaatgcttgattcagtggcaaggcgacaagattgaaattgtgccagctgacaggtcagttaatgttgccagtgacgatttagctctttgggagatggatggtcttgattgcttatctggaaaagtttgggatggacatttttttaatcaatttttttgagggtgtcgtggagggttcaaacgtctacaccaaggacacagtagatgatctcgatgacaaacaaggacagggtttcatgtcggccgatgatttggaggaaattgatataggtccaggcgatcgaccagggccgacatttatcagtaaaaacttatctccagaatttagaaccaagttgatagagcttttaaaagattcaaagattgctttgcttttgtatattgtgagatgccaggactcagccaatcaattgttgaacatcggctacctatcaaaccaggggttagaccgcaccagcagcctccgagaagatgcaaagccgatatgctcgaacctgtcaaggctgagattaaacgtttatatgatgcttgttttattcgtccttgccgatatgctgagtgggtttctagtatagttcctgttattaagaaaaacgacaaggtccgggtgtgcattgatttcagggatttgaataaagctaccccaaaagatgagtatccaatgccagtagccgatcagttagttgatgctgcctcaggacacaaggttttaagttttatggatggtaatgcagggtacaatcagatctttatggccaaagaagatattcataagacaacttttaggtgtcctggtgcaatcggcttatttgagtgggttgtaatgacttttggtttgaaaagtgctggggctacatatcaaagagccatgaattatatatatcatgatctgatcggctggttggttgaagtctatattgatgatgtggttgttaaatctaaagaaatagaggaccacatagccgatttgaggaaggtttttgagagaaccaggaaatatggcttgaaaatgaacccaacaaagtgtgctttcggtgtatcgtctggccagtttttgggatttcttgttcatgagagggggattgagataactcaaagaagtgttaatgcaatcaaaaagattcagcctccatagaacaagacggagttgcaggagatgatcgacaagataaattttgttaaaggtttatttctaatttgttcgaaaggttagagccttttacaccattattaagattgaaagacgatcaaaagtttacttggggggtagagcaacagaaagcattggataatattaaggaatatcttagctctcccccagtgttgattcctccacagaaaggggtacctttcagattatatctatcggctggtgagaagtcgatcggctcggtcctgattcaggagttggaaggaaaggaaagggttgtattttacttaagttctcgactcttggatgcagaaaccagatattcccctttggagaagttgtgcttgtgcctgtatttttcctgtacaaggttaaggcattatctattgtccaacgaatgcactatcatatacaaagccggtgttgttaagtacatgttatcgcctccaattttgaaaggaagggttggaaagtggatattttccttaacagaattcgatcttcggtatgagtcactaaaggcagtcaaggggcaagctatagccgattttattgtcgatcatcgtgatgattcaattggctcagttgagattgtgccatggactttattctttgacggatcagtatgtactcatggttgtggtatcggcttagtgataatttcccctcggggggcatgttttgagtttgcttacacaattaaaccttatgcgaccaataatcaagctgaatatgaggcagttctcaaagggttgcagttactcaaggaagttgaagccgatgctatcgaaattatggggggattctttgctagtaatcagtcaattggcgggagaatatgagtgcaagaatgatacattaatggtttataatgagaagtgccaagaactaatgaaggaatttcggctggttactttgaggcatgtatctcgagagcaaaatattgaagctaatgatttggcccaaggggcatcgagatataagccgatgatcaaagatgttaaggttgaagttgctgcaataacagccgatgattggagatatgatgtacatcaatatttacagaatccatctcaatcggcttctcggaaattgagatataaggcgttgaagtatactttattggatgatgaactctattaccggacgtatgatggggtgttgcttaaatgtttgaataccgatcaggctaaggttgcaatcggcgaggttcatgaagggatttgcggcactcatcaatcggctcataagatgaagtggttgcttcgacgtgcgggatatttttggctaacaatgctggaggattgtttcaaatattacaaggggtgtcaagattgtcagaagtttggggcgtttcagagagcaccggcgtcggctatgagtcctatcattaagccatggccatttagaggttggggaattgatatgatcggcatgattaatccaccatcgagtaaagggcataagtttatattggtggcgaccgattattttaccaagtgggtagaggcgattcctttgaagaaggttgattctagggatgctatacagtttgttcaagagcatataatctatcgatttggtattcctcaaaccattacagccgatcaagattcaatttttgtatctgatgagtttgttcagtttgccgatagcatgggtatcaaattgttgaattcttcaccatattatgcacaagctaatgggcaggccgaggcatctaacaagagtttgatcaaattgattaaaagaaagatttctgattatcctcggcaatgacatgctcgtttagccgaagcgttatggtcttatcggatggcttgtcatggatcgattcaagtccctccttataagcttgtttatgggcatgaggctgttttaccataggaagttagaatcggcttgagaagaacggaattgcaagatgatttgacagccaatgagtattataaccttatggccgatgagagggaagacctggttcaatcgcggttgcgagcccttgcaaaggtaacaaggataaggaacgagttgctcggcattacaataattcggagggtgagcttgtatggaagttgattttgccaattgggactcgggataataaattcggtaagtggtcaccgaattgggaaggaccgttccaaatctataaggttgtgtctaagggagcatacatgctacaaggactcgatggagaagtctatggacgagcactaaatggcaagtacttgaagaaatattacccaagtgtttgggttaacgcatgattggctgatgttgccgatacatgatagccgatgtgtttgcatcgccttgagatggccaatattgttatatcgcccttaattgttttcatattgtaatcggttgtcgtttgccgatgtacaatggtcgatattgttatgtcgcccttagttcaagctataattttatcaatgcttttgacattgtaaaattaggggggcacatatatgaaaaattgcaaatttttgagcaaaatatggagttatgttgaatcggcatgaaagttattaagataatttcaatgaagagtcaaagttttgttagccgattacaaaaattcctaa

SEQ ID NO: 7762 - DNA, 111839 bp, Oryza sativa
tgcatccgggcatgagcacattttctgggggccatgtgtcactcacaccttgaaccttatattcaaggatttctcaaaaaaatttgactggatgagtgatacatacagcaaagggaaagctattgtcaagttttttcagaatcatcagcattgccttgcaatgtttagaagtaattcaaagttggacctacagaagattaaaaaaactcgttttgcttctcactaccttttgcttttgaggctcactaaatgtcaagaagcacttgccaccaccatagtcaccaatcaatggaaagattggatgaaaggttgcaccaatgatctgcggcagcaagcaagagccattgttcaagaaatcaattgtgaggacttttggaataatgttgagaatattcttgctatcacaggtcctatatatgaagtattaaggttcagtgatggagagggtccaaaaatgggtgagatctatgagagaatggattgtatggttggagagataaaggatatcatgatgaaagatgacaatccatacaaaagttcctttccagagatagagaacatagtcattgaacgttgggaaaagatgagtatcccacttcattgtttggcttatgctgtttgcccaaggttttatgatcaaaattatcttcaaaaacctgctcccggtggcacattaaggagagcaccgaatcaagatgttgaggtcatgacaggtgtgctaaaagcatttgagagaatagcagataataaagaagaggaaaaagtccttcgcgagcaactcaatgactttattatgaagaagggattttttgcactagaatatgtgcaggccgatgcagcatcgatggaaccaattgagtggtggtgcagctatggatctgagacaccagaattggcagaggttgccaaaagggttctctcgcaacctatcagcagttcatccgctgagaggatttgggggacttatcagttcatccataatgcaaagagaaacaaactaaacgctgcaaacgcggataagcttgtgtttatccactcaaacttgtgtcttcaatcaagatttactgaaagctataaatcagggcctaacgccatgtgggatgcacatcccgaagactccaccatctaagtggtaataagcatatgttaactgattatttatttatttatttttcataccttggcaataatgtgcatatatagggtgtgtttggttgcaagccacactttgccacagtttgccacgcctaaggttaggcaaatttgacaggtgtttggttgtagccacagttgtggcaagattcccctccaacaaattgggtcccacgtgtcaatggctcaaaaaagtgtggcaagattcccttaggcttagtaagttgtggctaacaatttgatcacctcaccttaggcaaggtgtggcaacttttgttggcaagtaatggtaaagtgtggctgggaaccaaacagccccatatgttatgtgtttacaggaacatggaaagatcatatgagtgctacactgctactacagaaaagaccttcatggtgctgttgtgattcatgaattcatgatgcttgctgccagcagccacccatatctataatctatatatgaagctcaatttgtaataatttattctaagagcttttgttacactttgctataaacttgagttaagtttcttgttaaaaaaatcattgaaacaatattcttgactaaggttccacgttccatgctatcattccaacaaatataggaacatgttcctctagtagggtataccgttccagataatcgttccgaacaaccaaggaacacgttccatccatagttccgtagagttccggattatcgttccaaaaaagctaggaacacgttccacctatagttccgtacttttggaagaggtataccccttcgttccatgtttttggaaaatggcgtcccgcgctccacgttctagttcctcgttccatcgatccgggaacttttgtgacttaggagccggtttgagagttgttgtttctgatttcttcttcacagcaattctttttttctacaaagacaagattagtgaataatcggctgaggataaaatagttataaaagatggatcctagagaagtgagctggagcagagggagtcggaggagtttgtttaggtgaagccgatggagttctttcagtatcacttacttcatctgcggcttgatcaataccctctccgatctcttcttcatccagagcttgttcaatagatggatccagggcaggcagatcatcggttggcttagtcttctttaatttggccttcttctttggggctggagccgatgtatccacagccgatgacctggttcttctgtttttaccggcatcggctggttctctgatgagccattgaagaagagttgaagtcttgggggcattatagccgatgacaggaggagatggcccacctccatttggaattagacctagggcatattcgatatctctaccactattgctttgatgtggaggggaagattccattctctgcaaaacagaagagaagattagtcaagttatgaatcggctgataattgttcaaatgaaattaataagatcaaggtttacctgaggtataacatcaggaaagagatctgtcatatacattgaggccggttggtggaacagatgcaacttccattcaccccaccatatgtcaaatgatctgctcctgaaccttgccaactctatattctcaatactacccaaaggaggcccttggagattaagcagtcgatccatcatcaaggttgatgaaatttcccctcggcattgaattttattggcaaagaacaaaccgattggtagttgtcccatcccaagttgtctgacagcactcatcggatgatagaactcataagaaatttgaatattccttccttgatgaatgccaacaaggaggatgcatggactgattgcaggcgagaaaacttctctggacttttgatatctttcatggttgatgtcctcaaatctaaagtccgatggattttccaggagagtcgagtcttcataggagaaccaaatccgagcgtctttctgaaagccatcataaaaactgcagaaccagtccttaagcagttcagctgatagctttgctcctgcatcggctggtgtggcatattctccataagatgtgcatctacgatgggtgcgttcctctccatcatcttctacaatcggctccagtcttgggaattcggcttctgtcacagatggccgattgacgaatttcatgaccatcagattcaaccaggattgtaataaccaccatggtccacctgccccaactactgagccgatggctatcttagccgatgcattattcagcatttggtacaaatagccgaagaggatcttgcctaaggggaattgtctctttgattccaaggcctcggctacaaactgccagttggttgtagggccgcagcttaatccacagaagagaaattcctccagccacatcaacagaaaggctacatgctctcgaggagtgacagaaccttggcccacatatgctgccacataacctgaccagccgtctatgctcttggtcctaaaatcatactgattcttcatgttcagactcatagagttggccgatgaggtgacatctagaccggtaatcatggtgatatctattagagttggggtcatcggcccttggttgaacaagaaagcattgatggtgttggaccaaaaataggaggcgacagccattaaaggttcatccttgtcagaattagctatggtaaggtcaagcgcttggccgattccgatttcgtcccaatgaaccctcttgctagccgacatacgcttgaaccatgtaatccaactcttctcgggtgaagttttctcgagggatggccaagatttaaaggtgttcttctagtgacctagatctgggttggccaatctgaaaggaatcctattggtttcgccgatgataaactcggtaggatcagggttgccgactgggccgaggaagtaataatttccgtgcgataggcttgtaattgcaactaggttggagagatgctacaaatccaaaagaaccgagaaggggaaagcgggataaggagtaggaaaatcaatctgttgcgagaaaaggagatctagccgatgagaacttacctcagcgtactcggctgatggcgcggcaggcgggctggcggaggatgacatcgccgcaggcggagatctggccggagatgagatcgcctagaaatcgcttcgtgcaccgaggggatcgccggggagagagaagacggagcttgcttcggtggtgaaaacggaggaaacggtgtgagatttctcggggacaacggttagtatttaaagcactgactaacggtcagaaaacggcacgagaggatttctctcggagtcgacgtatggcaaatccgaaacattatctaatattccgaacttggggggcatgtgttaacgaccaaatttggtaatccaaggatcggagatgaagaagaaaccgagatggaattcgagatggaaatcgtcccggaaacagagtgaggatcggctgaagtccgaatcggctacaactaaaatcggcagagttcgagtcggactgggttagtcgattgagccatccgacaatatgacgcaacatatgttgttggtttaggttgacgtgcttcaagatgattgccacagatggatagagtcctaagaaggcaattgtatctattaattaggatattttatgtaatttccttagagatatgtttgggcaaaagtctgccgcaaagacttatggtattttagagtttgttagagataagagtcatgtccgatatggacatattttgtaattctcaggtgtaaatagaccctgagccccatgtaatcaaactaacacacgttcaatacaatctcggcgcatcgccaccctttttactacgagttcttgttttcgggttaagctgtatcggtttcgatcttcaacaagaggtaaaacttgctatggcggcttgcgttctcgggattagtgcttccatctttatgatactctaatcttgtttatgtaactcgtcgagttatcatatatcctacataatcttcgacgatatcgttatctaacctacaatcggctaacatctgtcagaagagggtagccgattaggttaaataccgacgttgacttagattatatatgatatccaccactctatgaaatttccaacggcttgattgtctagatattttctttcttttcatacttatagctgcatcagttgagtttgatcttatgagtcgtgattagaatctcaatctctagcctgtctttggttgccgattagggtagtatcgaggtttcagccgatcttacctgatttaactacatttatcttatttgccttattgacatgttaaatctgccctttatgttaagatcttgttacatctaagtatattaggctttttgtttggtatatcttacttactttaatatcttaatatagagtggtatcggagtattagccgatatacgctagatctatctgatcggctttgctataaacacatatagtcttgttattaatatatatttcgatctaagtgatttatactgtctcggcacggtgaccgatctatctcaatcacttgatttaagtatatatcgatataaggactatataccgttaatatctacagccgattgagcagatctagttcttattaatgactgtcgatcgatgcatttatgacatcggctcaaagataaatgatatgtcatcggcacttagccgatcggctatcgtttatggatttaaccgcggtttttttttgtctttgtttcttgttgattgcaggatcaaattaactggtacgctagcatacctaaagacaagtttttgacctgcactggagttaagcagatctcccaggcctcgtattttcacatcaacgagaacgagaaaggagagccaccgctgccgctgcctgcggcggcagcgtgggttcatcccctggctcggttacctagagtatcacgatcaggtggaccgtacaggtgcaagtacgagggttgcggcatggagtataagacacaccaggggatgggtggccacgtggctggccacatcaaacagggacaagctggctgccgccggcggcagtggcggcgccggtgccggcaagacggagggcaagcacccgtgcaatgtgtgcgggaaatagtaactgacaggagtggcacttggcggccacaagagggagcactacaataagtaccttgaccttaccctctcctcgcgccacgcggacaacttgcggcgccgcctacacttgctccagcttcggcggccatcgccgcggcggtggcattgccactggctgagacagaaacggaggtggctaaacatggagatggagcagggacagtgttggcgcctccatcaatcgttgtgcggatttttggcgttgatgcggaggaacaagacggtggaagcgactaaagaagattaaaatatacccagtcaaacagtatagtagtggtgattttagatacttgatgcagctactgctcctttgttatttagatagtgatggggattatgtttatactttaaacaacgtactgatatcatagggatattatttacaaagagaaaatatatctttggttgtgtttagtccccttcaaactttcaaaaattccgtcacatcaaatatttgtacatatgtatgaagcattaaatgtgaacgaaaaaaactaattgcacagtttacatgtaaattgcgagacgaatcttttgagcctaattacgccatgatttgacaatatggtgctacggtaaatatttactaatgacaaattaattaggcttaatagattcgtctcgcagtttacaggcggaatctgtaatttattttgttatttgtctatgtttaatacttcaaatgtgtgttcatatacttaaaaaaattttaaaaaggaactaaacaaggccttcttttagaagttcttagagattatgtttttagagagagatagtatacacgcgcactatattgccgagtaaggaaggggatgcatttatctaagataaagaagtggattctaaactctcgagaagatatcccaaatagttatattatttttttaaaaaaatagaaagatatattaatatgtgatatatcactctttaaacacgtaagttaaaattcaacttttacaggtcttagcgaaaaaaagctatagcgttaatacaaaattatgagaaagaatcgtaaggttccattcttaggaatttggactagtaagcacactttccaaaagcccatagtgctccgatttttttttttgcaaaaaatctttcttcattagtatttcttccaatactttttcaaaacaatatttttaaactctgtaatactccatccattttatattataagactttctagcattactcacattcatatagattttattgaatcttaacgcacatatatatagattcattaacattatatgaatgtaggtaatgctaaaaaatcttataatatgaaacggaggaagtagttaatttatccatttgtgcctttgaaaaattatcatacacataatcatgtattcaaacattttttttaagaattacacttatagatattcctatctctttgcgagtgtaagaaaaatattaaagcataacaaaaatcccaaatacaattttcaaatcagagtgaggtgccaaacgcaaacttgaccagcggcagtgccaagcgcccaagcttctaaaaaaacaaattagactgcaaacaaccttggcacccacggcgattagccaattgcagccttggcacccacggtaattctaccgtacctgcccatgctgtcgtcatcccaccgaggggagtcaaacgcccaaaaccatcaaaaccctcttcggctcggcccaaacccctatctaccctaatccatccgccgccgccgccgccgccgccgccactttatgctcgtctgcctccggcgacgaggcctctcgctcctccggcagcgcccgccccgccccttcccccctctcccgcgcccgcgcagcagcccaccccgcgtcgcctccctccgccccctctccgccgcggcgatgggggagaactccgccgccgccgccgggaaggggaaggaagcgaaggggaaggcgacgacctcggcctcggcctcggcaccgaacgtcgagcccgacgtggcctaccttgaggcggtgacgcagaagcggatccggcagttcgaggagatccaggccaagcaggccctcgagcgcctcaacatcggaggcgagcccatcaggtgagccccgttctgcgattcgttgtgaatttgatgtagttaagaaactgggagggctttgattcggaaaccgtaatgcttgcggcgcgttatagatgaaaatggagttagatactacatggatggcagatgtctcaggcattgagatgtagatataggcatatagcacaccaagggaatatcctcgatagccatgctttgtgctgcataatttggagtcggattttgagtgttgggaatatttgaatgtcgatgcgacgacaaaatgggcgctgcgcaaactgcataataatgccataatgttattcaactttaacatccatctgtctttaataagaaaatagagacggcaagcatttcttctgcctaaatattctaatatagaaaacccttgattatatggtgcttaggtttccttttctcaatgtacctttgctagttacaatacaaatgtggcacactgtgacctgcaatgtgcagcacaatggcaatggcaattaattcttctcatgtgatttttttccctgcaactttcttcaggataactttgccagatggtgcagtcaaggacggaaagaaatggatctcaacccctatggatattgctaaggagatatcaagtggattagcaaatagctgcttgatagctcaagtgaatggaacactgtgggatatgacgaggccactggaaggtgattgtgaattgaagttgttcaagtttgatagcaatgaagggcgtgacaccttctggcactcaagtgctcatattcttggagaagtgagttaaagcttcataatttccttgtatcatgtttttttctttaagcaagttgtatggttgtctctttttcttttttgtttacacatcgagtgattttgcatgtctctctgctataagtccttttgaattcagtattttctaattgaagatgcacttttgcagtctcttgagagggcatatggctgcaagctgtgtattgggccatgtactacaagaggggaggtattgaattaatcaaaaatcgtgttcagtgcaagaaagataataagccctcttagtgattaacataatgtttctacttttacctgttaagggtttctattatgatgcctactacaatgatctgacattgaatgagacacattttggtatcattgatgcccaagcacagaaagctgttgcggtatgctcttattttgaactcattttaaagtttgtgtttacccttttttgtggacgctacttagcagttttactctttgacttatttgatattaatctgtcatgaagtgtgatatcgttattggattccatgattatgccatgttttctttgtaacgtaattggaatcatctatctgctaactcttggtttttaacccaacatggtgcaggaaaaacaaccatttgaacgaattgaggtctccagggcagaggcccttgaaatgttcgcagaaaataaatttaaggcaaaattcctgatttatgcttgttcttgatcttttcttgtactctaacagtcccattgtttcgcttattcatatgcttatccgaattgcttattaacaaacaaaaaaaatcatttgtgactaaaacgactcaaaagaaaatgctgtaaaataaactataatgaaagaaacaagaaaaaaattaaattaaattaagttctaaatttcaaaacttgacttataagcataagcataagcgaattaatgaggccctaaatatctatttctgcttatatcacatttgagattttattaaattttttatttgtttgaattgtgtttctaggttgaaatcattaatgagttgcctgaagacaagaccattacagtatacagatgtggtcctctagttgacctttgccgtgggccacacatccccaatacttcctttgttaaagcttttgcttgtcttaaggtaattctttggttgtcttaagcttttgcttgccaatatttttatggaactatccaatttgtacttgcatgtaaatatgtaggcatcatcgtcgtattggagagggaaagcagatcgagagagcctgcagagagtatatggaatttcttttcctgattctaaacgtctcaaggtatagcatatgattttggctattgttcagatatgggcgttcattaattaatgtggagtctgtttttgtgctatcatgtctgtgctactggacacaataatgtaccctctatgtttgcattttagacactagagtattaatatttcattgtgataagattggagttgatttggcaggaagtttagcgtgcactacatggcatgtaaattgcacaaaatatacaactatatctcaaaagtgtatctatgggctctgtgctttggtggaggttggggttgatttgcccaactgaacaacaattgtcattacagaagtatatggtttctttttattagtcagttattacgaatttcttcaattaatacatggttaggttcagacagtgcaacccttgtcagctattttacaagttactaattcctaagttcttttttatccatttgttttatcactggtacactatggttttcatatatgtttcctgctcaataatccataggaatataaacatctgctagaagaggctaagaagcgtgatcataggctattaggacagacccaggatctcttctttttccatcaacttaggtaactcaaggttttcggtttgactttttcatatcttaatttaccttggcttctattctgcctcaggatgtttgattcactttgactgtgcagtccaggaagctgcttcttccttccacatggtgctataatatacaacaaattgatggattttttgcgacagcaatacagagatagaggatatcaagaggtgggcattaatttgattggctggtcaatcttttgttcagattatgattagattactagatcatgggcatgcatttccactgtttctctctgttcatgatgtctgtattttcaggttttgagcccaaatatttacaatatgcaactctgggaaacctctggacatgctgcaaactacaaggagaatatgtttgtttttgaggtaagtctagtgtgcagaggatttgctctgtacatattatagattacattttggatgaattacgatctttattactgggtgcttgttggtcttattcttgcagattgagaaacaggaatttggtctcaagccaatgaattgtcctggccattgcctaatgtttgagcacagggttcgttcatacagaggtaaatctccttcataatggcatagttgtatcacaaaatgtatctcttttatcaagtgaaaattcctgctgtcaaagtaatcgcttcaaccttctgcctgtatgaactgtttttcttctatgatttaattctccctctatttctttgatattgtgcatgcacatttattatctagtggcttgtgctttctcattaaaattttcataaactgaaaatgtaggcagcaaaaacagttccttagttgtctggcaattaaactaggggtgggcataattaaccgtgacgaagaactgaacccgaaatgacccaaactggaatccagtaaaaatatcgggcttcagctctcaataactgaatttagtcctgttattttggttattaggctcgggtaattgagaaatcgaaacatatcaataagccttgtccagttcagcccaagagagaaaaccctaacttcccctcacctccccactcttaactccccagtccccacttctcctaccactaccccgactcctcccacacacggcaaacgctgctgttgccgccccgccctggctcccgcctgtgcccccacagcatgctgctgtctctgcaacactctgcctccgttgccgcaattccacgccatcaacagtggggaccaccttcaccagagatctcaaggaggctctcggtgctctgccacgccggagagctcaaggcggcggttgctggggaacactggtgtcgccaccgttgtgaacatgcggttccctgcccatggtcccctgatggcagcggattggtggacacgtctatgcccgctggctacatctcgtgctctttgctccaaattgtgttgatttgaacttcatctatgtagggtattgtgcatagatctaatttgtgttgatttctgttgattctgtggctgattttgggattatatgagttgattctgtggctgatttgagtattctatgatttctttttggatgtgtaaaacagcagttgtaatatcttggttagtttggtcacaaccggagaccgaactgaactagccgaaaccgaattcgtcagtattcatttttttttccaatgtgtttcggtctctattttcagatgaccgaacttttcaaaacaccgacgaactgaaccgaatgcccacccctaaattaaattcctaattcggcaaaagtaacggctctagaattacttagtgaattgttttttggtgaatgatgtagtactgaaattgttgtccacatgtacattttgaactattggcttttgctattgatataaatgatgaacttcccttttctaatattatagcaaggggaattttatatatgatgtgttgtgtttttgtgttttgacaacctttttcttaacactaacaacttaattaaaatgctgcagaattgcctctccggatggctgattttggagtccttcacaggaatgagcttagtggtgcacttacaggtttgacacgtgttagaagattccagcaggtaatgctaatgttgttttgtgggttgttaatttctatactaattcaatccagttagtaatctccttgttttaaccacttctgatgcattttccctgtaggatgatgcccatattttttgcagagaaagccaagtaagtttgaattctgcaccattctgtatatctgtttttagtagggaaggggtgccattgcaatcataatgacatgctactgaacagtgtatttacactgtgtgacataaattagtttaggcaccagaagctcataatatttagatgttcatgacttgcatactgtatggatgctagtttgtattcccatttgttttcacaatgtttcagatggtgttaatcacaacctccttttaacagctgcactgtgcttcggataattttaaatagtgtcccctgattgtataagggcctacttttcttaagagttctttctttgttgcagatcaaggacgaagttaaggctgttttggacttcatcaattatgtttacgagatatttggatttaaatatgaattggagctatcaacggtaatcatctcgttgttgctgtatgattaatagcatctagaaattcacaggaactaggattcttggaacttcaatatgtattcgagaagtcacataaatagatgcttagcaagtgttaggttgctgttataatctggatgaagttggttaagtatctttttaccatttctgcttcccatgtctactcctgcctaaatcccaacataccaggtaactttgtgatgattgcatttaagagaaaaaaaggttatctctatacaaatttttaaaggttaacaagtcatttcatctcctatggtcctactggaattcctgtgcacatttcttgaacaacgtagaaggaaaatcgaactggctatgaagtataactatgttggtacgatacaatccatttttgcactgtgtattgtgaacctgaggttggtgaggtttatgaaaggcctatgaacctgctagtctctgttttggcatcgtagatcatttcatactttttgtttaatttcaatcgttgtaggcgaatcataatttatcattgtatgtgggctttggacatgtgctgagaaaataagcatgccagatgttgaacatgttacttgtattttgcatctatgtactccctctgtccacaaatataagcattccatgtgtttgatatttgttcacaaatataaggcattccacagtactaattgttccattcctcctttaatgaggggcaccaaagtctttctcctcaaccttaatatctgctgaacaacctagaaatgcttatatttgtggacagaggtagttgttttcccattttcctatcactattgtgaactgctaatgtttgggaaattctcagcatcctacggaacaatatgtgaataactgatggttatggcttgatcctcagcatggttgtaatgttgcatatctttctcttttttttttttttgcagagaccagaaaagtacttaggtgatattgaaacctggaacaaagcagagcaacagctgacagaagccttaaatgagtttggaaagccatggcaggtactatgacagtcactcccctcagaatgtttgtttcagtctatgctattagaagtgcatttccaacattcattattttcacaatatggttaacgagagtttgcactaatttcttccactatttttaattttacctgcactcagcattatcactagagtcctttgtcaaaaggtattatgctttatttagttttggcttaactctaatgtcgttttggtaacaacatgtactgtatgttgattactattgatagaaatatatttttttaatactgatttctattgatacaaatatatttctttatgccggataatattgatagaaatataatttagtggtaatgttttcagtaaacatcttaggagagattattcttctttgactcaattggctggttcctgtcatttttaaatttcaaataatttcatattctcaatctgaagtttggatgtaatactggcggaatacccaatcttgaagtctggctcgcaagttgtgattactggttgtttcctagcagtttttttatcccttattggtgtacttatttagatgtctacatgcagatcaatgaaggtgatggtgccttctatggtccaaaaattgatattggtgtgtttgatgccctcaagaggaaatttcagtgtgcaactctacaggttatattgaatgtcattttgtttttaattgtagacagaatagaaggttatttatctaaacttcatttcctgttacagctcgattttcagctgcccctacgcttcaagctgacttactctgcagaggatgaagccaaacttgagaggcctgtgatgattcacagggcaatcctaggttctgttgaaaggatgtttgctattcttttggagcattacaatggtaaatggcccttgtggttgagtcctcgccaagccattgtttgctccatatcttccaattcagtggaatacgctaaacaggtaaaaggtccttgtgtcatagaatttactaattactattaattagtagctcttctccattgatcaaagtgtgaaaatcttctagtaccttctgattcgataggtggtgctttgtcttagttttccgtggtggtccaaactatatttcttttagttcaataaaaactacttgttaaatttgagttgcctgatgggttttaaacatgtataatttttttatatgttactattattttgacgtggaatttgtctggtgaacctatcgctacaacccccagctgtgaaatatttttaaactttttgtactgcatgatgcactgtgtcaacttatttcatagaatacttatgtaccgaactaaatgccaaacaatttacacgtgtcattagactgtagtatgcatgatgcaggtttttattttaaattatagcctgatgtcgttcgaatgcaagtccaatttgatacagattatccacagctaagggcttctttttgatttatcagatctcacacatttgtctgacataagttttttgatatgtttgcatgagtaactattcagctaattgttaatttaagtcccagacaacattagctttctttttgcaaggtgaggatggcttttaaaaagtctcatgatgaaatgataacaacagtacaagattgtctttggtttcttatttgatcatatatacttcctcgatttcttgatggatataaacatccatgcagtgctggaaatgtttattccttattaattaggcttcgtttttgtattgagtggatttcatcacacagcattggaagtctgtctagtccattattattttaattggctcaatttatcttaaatggattccagatgacacttgggtgtattagtaatgtactttttataaacataatacattttgaagttcgcccactaattccacgcatggtcaaatgaaaccttgcttacagtggagtaagaattttggtaactaatcagttctcttctgtactcaggtccgtgctaggatacatgaagctggttttcatgtagccatcgatgagacagacaggacaatacagaagaaggtagttccatcatgtcatagtgtaatttatgtttgtcctttattattgtttgctttcaactctttgaatagcaaaacggaggtatgcaacaatatgtggtatgcattgttctgattttttgttgcagggactgttccattttggttttgcccatgctgcaagaaagttctattattttagtaatttagtttacacggttctcaacaatgtaatctgtgaattggtcacgaccatttttcatctttgcaggtacgggaggctcaattagcccaattcaactacattcttgtcgttggtgcacaagaagcagagactggacaggtttttaccctttgcacccctgttttcactagagatgtggaataattatttctttctgccatccatatgtacaggtgaactagacaattaaattcaagagatgaagtagtcatcctcagataactaaaaaaaacagcccactggttcatatgaaatgtgtagtcctatattatttatacggttgccttatcattatggcttacgctattgcaggtcagcgtcagggtaagggacaaagctgaactagccacagtgagcattgatgacatcatcacacgttttaaggaggaagtagcagcttacaaatgattttgatttcacacccttttgctaagaatttactccaaatttgtgattttgatggtgtagcgggcagtgtaatcttgctattttatttcttgacaaaagtacatctgattgtcttttcttaataacgaaagtgtgctattcttcatcagcgacatatatagggatgggtgtttgatcaactcttgctaacatgaactgcgtctctaattggatttaccccaacttagcgtatatttccacttaaaccatttgcagatcttattttctcataatgttatgttttggagtaaaggacacaacctgtctagttgtgtcatctaggtgggtatgacttgtcaattggtgtatggtttggtaatgatgccacataagcgtccaggtggcatgcaatgtaggatcctagagcgctagtgcgctcgtggtagtttgggaacgaaacgatacaatttaatttaataagttttgtgtattttatgagtttggggatatagatgatgcatccgtcataagttaagtctaagaactagttgagcagtttactttggctgcctttgttcaagccggttcttaacccctcttccttgttttctgcgtgtgtgtttttcaatcggataaacggtgcatttttgtaaaaagtttatatacgaaagttgcttaaaaaatcgatctattttttaaaacaaaaattaataatacttaatcaagcgctaatggaccgtttcgtttttcgtgctagagagtagcgttcccaacccgtgaaatgaacgcagcctttgtatattacacatcttaggagacttaacaaaaattgctagttatacaacatcttaaatgcgctaaactcattctcatgtatgactagttcctaagctaaggcctcgtttgattcagcttaagattattataatttggattataaggagtaagctaaaacaaacaaatagatcattataataggttattataatctgcaagccagattactataatctaataatctcctctagagaagcttttttcacattattgagtggctaaagacccactactctcagatgtcttcaataatccagagaaacaaacaactcgcagcttattttatgttagcttattataatttagcttagagtaatctgatttagtaatctaggttataataatcttaagctgaaacaaacagggtctaagtattagtcccgcactttcatctatactaatattacacaaataaaaaaaggtgtaacttaaataaaatttcatattataactagatatagttacataggccgactagccagatataatcagatccaccaaagcttggctatccaatccacaagcaagctaataaggggtagacctccaatagagaagtcctaaacaaaagcaacagttctcgatcactcaaaataaactaagttcaacaccaaaaaaaacaaaggtactacctccgtcccagaatacttgtagctttgtggtttttttttgtaacttttgatcttttgtcttactagcaaaaatgcccgcgcgttgccatgggtgaaaaaattataatgataatatacatttttcatgaataatcatttcaatgacaatgtttgtattttaaagagcagcttgtttttttataaacaatgtttttttcttgcgcgattttctcaaaccattcagaaatggcgcatttcattctaaagtttttttttctaacatgtttttttttgcttttttatttacaacgaaaaccatatttttctcctctttttgcttttcttttctagtgtgtttttgcctttttttacaattattttctcgtgcgtttttttgcttgcttttttcaaatgttctttttttgctttttatcaatacaggagaatatatgacgaaataaaagccgtgtagtaggtggtaaaaaatcgatggatcctatccgactcagagcgatttttttaatagactatgtttttttcttgcatagttttttaaaaccattttttaaaatggcgcgttttttctgacagttttttcctcgcatgttttttttaagaaaatcaccgatgatggaaataatttttcttgcgcgtttttttatttttttatggaagatggaaaacaattttttagcatttttttgcgcttttttctgacttttttctcacgcgtttttttgaattgtttttattttttttgtgcattttctctttttaaatagttaaattatattagagatagagaagagatatatattgattagaaatcagactttgtttcgtcctttccatttttttctcgtgtgcattatttattttatacgaaccattttttcgccaatttcttagggaatcggacgaacttttttagatgttttttcggttttttcgcctttataggaatcagacttttttcccgtttttaaaggaatcgaatctagtattttttttcaccacttttttttttgccttttataggaatcggatttttttccgttcggatctacggtttttttccgccacttaggggatacagaacttttgttgttgtttttcttttttttttgtgcacctttcctttttttatgcacctttatgcttttgttctctctcttttattattacttttaacaaaaacaacctcaagtaccttattgcaagattatagggatttaaatgtaaatataaaaattatagggactcaaatgcaaaagtacaaacccaaaaattaaaatcatataaaaatggaatgccctccacctgtaggttcctttttgtaaacagatctttaatccggcacatcattttgtttcaccgagatatgtgagatatcacggtatagattgatttttcgtttttaaggaggaatcggatctatagtcggacttttttttcgtttctagagggaatcggataggagtcggacattttttttttatttttttgcttttttttctttcgcccgccggttttttttggataggactattttggtttttttttcgcctcttttttctggacgtttttctttcgcccggtttttttagatgggacaattttggtttttttcgccggttttttcgcctcttttttctggatcggacagttttggtttttctttttttagcacttttttcgcccggtttttttatcggataaatttggtttttttggtccggtttttttgacggacgatggaagcacctcttatttttttaaagtagtagagattaaaaaaatatgaaattattatttattttgtttgtgattttctttattatcaaaagtactttaagtatgacttctccgtttttatatttgcactaatttctcaaataagatgaatggtcaaacgttacaagaaaaaagtcaaagcgactactaatttgggacggaggtagcaaatatgtatagcaagagttagtacattggcaagcagtcaaacctagcatactaaatgcaaggctaaggcctggtttagttcctaaaatatttttcccaaaaacgtcatgtcgaatctttgaacacatgcatggagcattaaatatagataaaacaaaaattaattgcacagtttgtatggaaatcgtgagacgaatcttttgagctcaattagtacatgattagccataagtgctacagtaacccacatgtgctaatgatggtttaattaggctcaaaagattcgtctcgcggtttccaggcaagttatgaaattagttttttcattcgtgtccgaaaaccccttctgacatccggtcaaacatccgatgagacacccaaaaattttcttttcgcgaactaaacacaccctaatacttaaaggaaagctttatatagttcatttttagcataaagcaagttttagttcacaaacgtttgcaaggaagtctttaaagcatttttaaagcgtgaatataagtagataacatgaataatcatagcatatcatattattatccttgctgccctcctcaacaacatggcgcaaattccattacaaaatcatcaaactcaacacaaatctgcaattccaaatccacattccacaaacataatttaaaagcataaaactatactcatgacacttcaccaagtcgcttatgaccgcgagtacgactaatcgattagttttagactctacagagtttgcacaactttagtcacatgaaatgaacactctagtttgtctcgtactcgtgaagcactaccgcactttagagattgaatgtgatctagaagttgcaacgaagcctttacattacctaatgcctagtcttgcactagcacgataagtgtgaacccactctaggaatgacctagagtcgttaggtgacgggccaccaccttaaacttaaggccgtggcggtaaacgcatctgtttccatgaggcattgtactgtcatattggacaaacttagacacctaaactactcccagtgagcaaataggtagctcctctagatagccctgctataccattaacgggtcaataggcactgcccatactttcccggcctaccaaaatgcaaggctagatattaaataacttatttagctaagtccacaccataaaatagcacatgtcaatgtacgataaaacattagttagtggcacgaagttcagtccggacattccccctattagtgtacaactaccaccatttgtacaccacttgccgcccaagtctaaaaccattctatacacattttagttcacaaatacttaaccttttcacttctgtccagaaataaataaataccaaaactccatttgtaaagtgttaagaatgattatttgtatagttttaggcttggctaagcaaatggaagcatataaagcatttatagacccaatcgagcatttagaaaaaactcaaaccaaagctatggttacaaacagagggttgtcaatatttcaaggtggatcatgcagcaaataggttatatctaccattttaccaaattttaaatatcggtattaacaaaatacacgtgcgattttgcaaacaaacaatttcattcgcccaaatcatagggttcaaggtgataaagggaggaggggagaacctgcacgtaagtctctctttcaccgttatcgcaattatctatacaatttacacggtatgcaattaaataccaaaatatacaaaaaaaaaaacaaaatgctctaaaatgcatgatttgtgcacagtaggtaggtgatgaatttagatgaagaaatttctattttatctctttttatttaagacttatgaatttctaaagtttgtgctgatatagggtactccttccgtcccaaaatataagcatttttggactttgacacagtcttcgagatgctactttggccaacaatatctataaaaataagatgttttaaataaaaagagtagcatattatgatagtttgtttaatgataaatttacatgattgttcttttttattcttttgctattaatagtctaagttaaaaatgttttacttgatactatgctaagaccctctttgtttaggcttagacttattggcttagacttttaagtcagcttattggcttatatgatttataagccggtgaatttaatgtcctaagtttaatggtggagtcataatctacctcacataagccaaaaaaaaacttctccaatctagcttttggcttaggccctctttgtttaggcttataagccaacttataagtcgaaaagtctaagcctaaacaaacaagcagcttttccgtttggcttttttgaagccataagccactctaacactattaagccaaaagctaggttggagaagcttttttggcttatgtgaggtagatgtatgactcaactactaaacttaggacattaaatccaccggcttataaatcatataagctaataagctgacttaaaagtctaggccaataagcctaagcctaaacaaagagggccttaatagtgttagagtggcttatggcttaaaaaaagccaaatgaataagctgcttgtttgtttaggcttagacatttcggcttataagctggcttataagtctaaacaaagagggcctaaaaatgtttatattttgggacagagggaatatattatttatctaggtagtgtcgtgaaatactttttataggtgatttggttaaagttgactttgcagaggtcaagataattgttttctaagactaacccatttggtttcataattgttggagtttgtatgattttctgatgtattttacaatttgtagcgtgtccaatgttagtaatttccctatatttttaggtgtttatttgtacagaatgtgttactttatgttcttgttaaagaaagataatagttcttaacctaacaaaactgagttcacaagatttggagctaatatgaattttctacatattttacaaattgtgatgtgctttatgttgataatttgttataacaacttgagaggcattaaatgtactaaagctgagttctttccccaactataacaacccacttccctcgttttccacgcgcacaattttcaaacagctaaacgtcacttttttgcaaaaagtttctagaaagttgcttaaaaaaaatcatattaatccatttatttaaaaattagtaaatacttaattaatcatagaaaatatgttgctccgttttccgtgcttagggaatgagttcgcaactcaaaacaatgaacacagcctaagtgttttgagttttgggtaacatgaataatgttatagccttgctggcctaaccaagtcttattttagcttaattggagctatagcgtattttctataaattgcatcatttataatttgtgatttaatacttatttcacccattaaggtttagagatgattttcatattaaatgtactactttttattatttttattttactgtgattaaggagtacatgttttgtgcaactagcaggactccgttcactttattttgagttcactttactttcgtcgacgatgcggaggaagcactaggcctcgggggtgaggtgagtggctggactggctgggcagtggagacgccgaagtgcctacacgtgtttccccaggtggcggagtcggtggccatcgcacacgcgcaggccgtgtgcccctcctgcttcatcatgttgccgcccttcgcccgcgtcgcgttcatcgagtccatctccagcttggatgcctcaggcttcagctccgacggctcagacccggactccttgcttccatagcagcgatgggatggcaccaactgaggggaggaccgcagcgggaagacattcccactgaggagccgaggaggtcgacgatagaggcgacgctaccttcgcctccgatgtgtataggttggaggggggggtcctcttattctaggagcggtgattgagatcaatgcattgttatttctccacatgcactgcttgtcattggctcattgttgatttcatgtctacagtagttgttgaagctgttctgtaagttcgagatgatgaaggagaagatgcgagcaataatgaacctacagcacaacgtgtccgtgtcttgcctccacaattgttgctcaagtggcccaaggaagcgtcattctgtcagttgttgacgcaacttgtgccaacaacccgatcgaatgaagaaaataaagggggatgaggaagaagatgaatatgacaggtgggttccacatacagatgggaaagaagatgggaaacgtgacggtgatgccatggtttcgattttgtaaaaaaatgagttgcacggctacgaatagacgaattataatggcatttatctaaatagacacatttgcaatggcacgaatcaaattaacccaacttttttaggaaaacgctggggatcaggcgcccgacggtgccagaaaaattgcccccctcacgcgcgcctccgcctgcctcccacgcctccccaccactagggccccattacaacaaatccctcacatattacggaaacgctctattaagggatttcgtttcatttttttccactaacaatgtttcagctagtgtactcgtaatgtttcactatgtatagataaaatgttgcagtgaattgaattattcttttacaacaaatcacccacatattatagaaaccctttattaagggaatccgtttcatttttttccacaaaaaatatttcacatagtgtactcataatgtttcactgtgtatagatcaaatgttccagtaaattgaaacattctttcgatatttgctaaaacattgtttttatatagggtgaaacaacgcttaattttttttggaaaccgttgtttcatacgttgtagcaaaatgtttcatgagatgatttggttgtgtttcagctttttaaaaatactgaatttttttcgatttgtttagtgaaacatgttcgatctagttgatgttcataaatcgggtgcccgatttagaggcgcctccactttttaaggagctatttgtaaaataattttttaaaaggacctagaggtgaacaatccatggctaaacccaccgcgcggggcgcgcccgcagcgaaccaggcgcgcattaggcgccccccgagtttctccccccttcccttgttggcgtaaaagaaaaatctccccgtctcgtctcctccgctccttgcgccatctcgcggctgaacaggggagggggaggggcgccgatctccatccgacgagcagagcaggggaggggagggggatcctggtgagcatccacatcctctttctgattcatctctgtcccccaccggtagtacttttgtctggaatttgcttgcgttaaccctagcttctcttctagatctggaagaagggattaagagaagcatttcttaattccagagccttaatcttaatacaagtaacagtttgtttgttcccctaaaagtttgggggttcagtactgaacccccatgtcccaagttggatccgcccctgtggggagattgaatggtgcccttagggatctgtggtcgttcgtggacgaaaagcggttggtggtcgcaaagattagtttttaggtttctttttttctcctgaagtgattgcgattaccgtgcctgtgatgaagtggcgaagagaggtaatgatggcatagattttgcattggccgttcggggtgacgttcctgtattggggctcaatttgttgtttctcccagtaactaggtgcttcctggttgctgagcacgccgaggtgtagattttgagatatactcttttgactctttaactttgagtaattttggaaattatgatggttctcttgcctaaatgatgtttattattcaaatatctttatgtacttctcttttgaacttttattttttttccacattttgtttcgctctcaatacaacaaataagcagttctggtaattcttttattttcccatttcaggagatcatggagagtagttcttcagatgttcaaatgtcacattgtgctgaggacttgaatagtgagagtacaatcgagatcaaaataaagacattggattctcaaacatacaatttgcgtgtcaataaacgcgtaagtggataacaaatgcccatgccagagactatacagttgctttttacagtgctcttatggttccttagaaactattggctatttgcatgcacaacatgttgcaattctaatgatatttaattgccttctttcccgggaacaaaataccactcaatccctttcgcatagtttaattaaataataataagtgaatgtatgtcaaacttgcttaaatttccccaagtaattttgacaacccactactatatctcatatttttaccattttctgatagtttattgtgcagcctagttgcaagttcattttatgttcgaatgatgtaaattgcctttttctcaattttttctgttaatggtagttttgaatgtataaatagcatctaatgtagagcatgttgttatatgtatgttcttttgggcatgcactcacttctgatgcacaacttctgatacacatatggtgtgcatttagattcttttgagtagcagctggtctagtgttgcattaccataggagccctggatgaaatttatgattatataagattgttgtttgctagcagtgtttttcatagggcctttatgatctgtgaacgttggttaggtggctctagtagcactcctcaggtcctgggttcgactccttgtgggagagaatttcaggctggggttaaaaaaaatccccttgtctgtcccacgccaaagcacaggtctaaggcctggcccaggtcattggtcgttctcacacgggctacggtgctgctgtgtaagggtggggctggggttcgggggttttctcaacttgcgtgagaaggttttctatgcaaaactcccaggggctgtcttacccccccataggtcgattctttttagtggtctgcgaactggaatattatctttgaactccattgatcatttttagaacctgctcagaataattctatgtaccctttaattttcagaattaatgctgcattagtttgttcaatattttgttccagttctattttttgggtggacatgccatttattgttaatgctttgtcttttatacaggtgccagtgcctctgctaaaggaaaaaattgccactgtaactggaatattgtctgagcaacaacgtctgatttgccgtgggagagttctaaaggatgatgaactcctctctgcgtatcgtatcctcatctatttttggcttgtagcattttagttgttttgtcttccaaaatttgtttctccatctacaatgccatatcctacagtttcaaatgttagatgtcattcgacaaacaatattctagatcaagaaaacaatgcataatttttatgcacaattaaaagcataatattaatatttacaaatgatgatggtcccattgtttggaatttcggatgacatgttggaaataatggtattatatttggaaggtgttgtgtttatggtttagcaatttctttctcttctctttgtatggtatgtacactgatgttgctttggtgatttttgtccttttcttctatactatgaagaaagggttcagatatccctgtttactatgaagtctttgtcgccttttgattcctcccaggataagtcactaaaacctaactggtttgatcatattattggacagcacctgttttacatttgaagtacgtacttggcttaccttgtaaatggtaatccttaactgaagtttttattagacgtggaagatggccatacattgcatctcgtggttagacaaccaggacaatccgctacatcaggaaatgctggaaatgaaggtttgtaaactcattgtgtgtagttaaaaattgattgggaagtttaagagagcattctttggacacctgcattgtgtgatataatttatttagtttcttgggctgtttttcttcttggtttcaagatcgtgaataatttttattgaagcaaaaatcttccgcatttgcagtagttctaatggtagataatactgttatgaggtttgtgagtattatttaggttgtcagttttgactctatattgctttagttagcattctgaaagactgctgtaatggaacagatgctcgtatgttgtgattgcatgtcatgaacatcgaatctgatgtgttagcagcatactgcacttggtctattatgtcaactagttgctttgtacttgtcatcattacaattactttctatcctttccattccttttttatgtacccatataaagcagagaaatgtaccacagaccttctgtgttcccaccatcttcctaataaggattctatatgctattcttgttaaatacctaaaaggctaaaactttctgacacccatatgacttgttttgttgctatagaggcctttatgccttttgatgttatcttatacctatagccatgtcaattttgtattttgatctgttttgcatttgaaaatttaatttgtattagcttcatatttctgtaaagtcaagtcaagcacactgcagttaccatttggccactttgaactatgagctttattatgtggcatgcctagaccaaaaacttgtgacaacagctgcatgttttctatattgcaccatagaattcattcttccattttctccttccgtatttcttcattacgcaaaaactgtcaattttataggtaccacatcaaatcctgctcgtcgtcgtggtcccactatgactcgcagtattgtacttgaggctattaatgtgggtcaggggagtgaactcagtgttgcacaggttttccttgttcctatgcacctctatatcttctcttactgtgttcctttggttgacatataacttatttttcacttattttgttcttttggtagttgctccaaagcctgcttcgagctcctagtagcacacaagtttcggtaatccagcattctgaaagtctttggttcagattggaactaaaaggatcttatttgaaaataatttcccttgtgttagagtggaccagcaccttctgatgccagaccttcagaaggtgcacaatcttcaacgcaaaatggtgtcagggctgtacttgatcaaatgctggttcctccacttttccagtctgaaacgtcagttgggttatcagaaccaaacgttagtcttggtcttgtatccttcacaactcacatgccctgatgttgaaatattaataagatatatggctaataacatgttcttttgcaggtcattcctgattcgttgaccacaatttctcagtacattaactttttgagagactcctttagaagggaaggcttcctcgaaaatggtcttaccttgacttttatctgagttgcccacattctgaatcagtctgaaaatttagttatttacttccaatactctttacaggacaaactctgaataatgctgaccatggaactgcaggaagtgcccatggaggtggtactcaaaatcatgaaagccagcctgattcagcttcggcgcatgggcttcctactgcagcattgcttgctgaaactatgcactctactagacaacttcttgttgagcatgctggagcattgctatctgtccgtgccatttttttattttttctcgttatgaattagctaatataacagttatgttttagcttcatgaatagtttgatctcttttctgtttgttcttgctgagttgagaatactatgcatgtagctattattcttcaatgatagggaaagtattagtgaagttagatatatcaatttgagctatttgattgagggtaatatggtaaatgtttcattgggtacaacatatgagtttggcaggtccaatcaccctccattgtctcatagattccgacattcatagttgcactcaattaaaccctgtttcttataaattatccagctaatgttcatactccccaccaagagtcatggtactataaccttgtaaaatgtacaaaacgtgtacacatcatgtctgttgagtttttcatttctaaactatctttttttttgtgttagtatataacataatattgaggaatacgcggataccattatactttattttgttttaagtggagaacaagtgaaatggaaatttttgtaaccattcatgtatgcaattaaaaactaattgcaggataagttcatttcctgtgttaattatattattgtgctgtgatcacttcattatgattacttggtagtcaactgactcccatagatgctgaaatttgtttctttagtttggtttgctgcttatctgctttgttgagttgttaacttcggttttatacgttactagcgtgtctgaagttaagatgagttatttcaatgcagcaactaccaaaccagctaggagatattgtgaatgtaactgatgctacaacacggaggaaccttcaaaacagtgtagtcagatatggagttctcatccaataccttggttcattacttctagaacttggccgcacgacaatgatgctgcgtataaatcctgcaactgtaggtttttctgacagcttttttttttacctcgtttcacattggaatgattctgtactgctgtactgaccagtaagcattttactttcagtcagaagcggttgtcaattctggaccagctctttttatctctccatctggaccaaatcctcttatggttcaagtgagtaatttataaatcttataattttaatgagtaaatttcactaaacctcacctattatgatccaagttgcacaaagccacgggtattttggcacatgccactgccacatatccctgggtattatggtcctaaagtttcacaaaatcacactgttaaccattttgacatactcctatataaaaaaaaaacggatgtaacatttatatggtggatacaatgctcaaaaatttaagatgtgactgtagaactaaaaaagtatggtagaacaaagtcaaaatgagaagtaacgtagttttatgaaacgtttggaccataacacctagggttatgtggttatgtgccacatgccaaagtttctgtggtattgtgaagcttggaccataactgggggggggggtattatgaaattttgctcttaatattaacaggtagagaacccatttatcctatttccgtcgttgctaactcattttagtccagcctgctccttttgttccaggaacaggatctgttcaagtgggcccaatattttctagtcttacttcacatcgctctgttctgcacccaagagatattgacatccatgtccgcacgagtgagtaaatgttgctatattttgtttcttcagtctgactattgtagtttgaccagcatgggagttggatgtcacatttatccatctaggattgaccagcatgggagtttggatgtcacatttatccatctaggattaccatgtctattgttagctttgatatatacgattagtctgatcaatgatcaatgctctgatcttatcatgacaattaattgttgaaatacgagttgataagagctaatttagattagaaggttgtttgattggaggcatagtccagcatactaaaattaatcataacaaactggtgtgtcaactgaaaccagtttgctaatacctcagagttgatagtttagaatgagtgcaagtcccagttggtaaggttggtttagataataatacatttgaaccaatgaatgccgattgaatgctagaacgtgttcttttttaagcttctggacttatggattttgcacctttctacatcagcattacttagataacttgttctaagctatttattaggtttataattataattactcaattataatatttacctcatccctgtaagcaactgtccattatctgtccaatcatccatacagaacatgtcttaaacttattatggcatccatgaccacacttagtttgagtgtacatttttcctactgttactttggttgatgatggttaaatgcggtcctttttggttgttaggtgggtctgtgtctttaactggtactaacccacctgagcgggttgaggaacatcaaacacaagatcgtacagatagaagtgcaaatgcttcacctgcaaacagtagtgaagcatttgcaggggttacagctggtgctccattttctgttgaatctggagttaggctggtgccgcatagaacagtggttgctgtgcctgctggcatcagtcatcctccttcaatgtcttctagtggagttggtattatctacccactgtttgccagaattcaacaaagagcatacactaacgctcaagttgcccatagtgctaatcagataccgaatccacagacatctcagtatcatgaagcaggtgaatgagttttttttttttcactctatctgtattgtttgcccccttgctcgagtattttctgtttgctcactaaactgctatctactaggggtgcaatctggttggatagctcttgactgatcttatgttgaatctgaataagaccagattaggcaaacggtcacatttatagattttttttggataggtgttgtaaactagaaatgcagatttggatgagagatgtccagattctaataaaatctgaggtccaagattgaaatgggaggggagagaagtgaaatggatttatcaccgttgcaggaagtctatggcacgtttcttcaccgtaggttggttagcaatgccttggttggcctgccagtgttaagccagaggaaggagaggatgaggctagagactgctttccctgtttccttgtttgagttgtatgttcaatttgcctttttgaagtgctaagtagtgttcctccaagtgatgaggaacttgccacattcaggtgcactaaatatcacttttatttgctcaaattcttataagtattatttaagcatttaggctagcattttacatgcaaacttattgaacttcaatatatttgcaattgtattagcattgatgcctgtctggattcgtatctgtttttttttttaattttttacatttaactcattctggaatgccttttgcgtacttcatcttctagaatttgtctaatgatttctgcatgcctttgtttcaatgattcttcattctttttacgtatgggtactccaggttgacaggctcatgttttttgcgcatcaaaagaatgggttaccagttatttgccactgcaaatattggcatctgaggatttgccacttgatctgtcatggacatgtggtcactaatgacaaatcagtggcatattgccaagtgcataaaattcatctttctgtggcaaatactcatgtttcctctataacaaatgtatggttgacatattattccttttcttaccactgaagtatttgtctaataggtactctaggatctcctgttgatatcaatgcggaaaacggcactcagacttcccctggggagcagaatggccaggggcctttttctcagttgatggatagtatcccttggattgcatcactcttttctggggaaaattctcgagtaaatggcacaaatcagcatgcaccggcttctgctgagcaggtagatggtagaaatcatggagcaccagaagtgtcaggagtcagtgatgagggtctacggttcgctagcttagttcgccaaattatgccatttatttcccaagttgagtcacatcatcaaagtgcctcagcagtcagtagcagcaccccttcacaggtaactgcaatttcttcttattatggctgtaaatacagttaagctcatgatggactaatcagtactggcaggctgcacatgggaacttgaatactgcaagagctggtccaagtcattccaggagttcacatcaacataaccgtgatccagttgatggacctaattctaaaaggcaaaggtgtgtataatctgactgacaaatatactagtttcttgcattacgtctggtactgtaggaggttcaaatttagtcacaaattttatttaagcatatttattcggttaggtaacctcaacatgcaacaaacgcatgtacatgtttcttatgataacatactaccaattaatttcattatgttagtccaaactatctcttttttggtagaaaagtaggggtgtaggggaggacaaggaatcagatctgtacttttgctttctgttttgttatcaatagaatgatatgtgaattaattgttttacatgccttggaacatttttttttcagaacaagtgagtgataaagatcttcatgtcctccggggtcaccgttttgcaagataagccgagaattttgccgattctcactgcgaggatggactgtcatgaatgtcttgacagagttgagggcagtggattattattatttggcagtgtatagttggcatccggttcattagtcaaggcaccatctttttttttttgcccatttcctgcggatcggttgtaatgttattttactatcctatctgtagaaattcgattcaattggggttaaattatgcctgcaattaaccaaaagcttcgtttggtagtaattgctgtagcatgtggagaatttttgccacttaataataccctctatgatttgtacatttgagttccctttgttccgtatagggatggcaacaggccgggtcggccacgggcagagctaaaccatgcctgatccagcaccagagaatgcccgcttgaatcatgcctgatagggtaagcgtgtaaaacttggtgtccatacccatgcccaatgtacatgggcatgcccggtggatacccagtttgcacccgatggtcccttgcgtcgctgcccgccggtgttggccagagctgtgccacctgccgtcgtcaccttgagccgcctcgccgcttgcgttgagctaagccgccgtcatcggcctgtgacgccatcctgctcgctctgctccccattgtctgttgcctgtgccactaccgtcgtcacatgcccatgctgccactccttgcctgggccgccactgccttgcctgcgctggcgtcattgcttgcccacgccctacgcagccgccactgccgtggggatttgggtaggagtaggagaggtgagtgggggaattaggttagggtttctattagttgagtaagtgtgtgtattgtcaagagaaaagggtatgataattaagagatgagccaaatttagttaatacataggtaccgggttggacatggacatgtgttacctataggcaaaaatattacccaactgctgctcgctacgttctcgggcctgtccataggaaaaatattacacccattccctagctatgtagtaatatacactaatacccctattgaatggggccaaacattcctttttttttcagttataattttttccgtaattcagaaatttagatcagagtttatttgtcaaagcttagattaatgaaaattttgaaataaaaatgtctatgttttgactatctatataaattctgttttgttgtcgtttgaattcagtttgtgtatttctgggatttgagtttttttttctttaggagttatatttgtccgtgtttggagcatgtacttaatattcgaattccttttattcggaatttatattttttaataatggaataaaattcggaattatatggctacatactgttgatttagtttttgcgaatgtactactaatattcttcgttttttttcttgttacctgtcctcccgttatcagggcacaaaaccgacttgtcaggaccgctcccatcctccataagagaacaccatttttaagttggggcataggaataattcccttgaatcgtcccgtgtctttgctcactgcatctttccaaatcaccgtgcgctccttacatttgtttcagtcccctaaatcatagttgtctgacaattattaacgactaaatttggtaaggccatggatcgggttcaaagccagggtcaaaacaaattaggaggaattctgtttaggggaagcagaatgcgtatcgactgccatatgcatcggctgacaccaaatccgacgaagacaagccgatacaaccagtctcgaacagacggtcctgcaactatcgtcgggatcaattaaggcacttcatagacattgccacgcagggattggagtccagaaaatgtaattgtatctattaattaggatattttgttagtttccttagaaatatttttgataagagtccgcctaagggacttgttcgtattttaaattgtaatagagaaagagttgtgtctagcaaggacatgttatgtacttgggtataaatatggcccgacaccttgtaaacaagggacgacaattcaataatacttcggcgcatcgctacccttttctattttcattgtttcgacatgtttttgctttcgagttggcctgcatcgagttcgatctccgacgaagaggtaaagcttgttatggcggtttgcgttctcggaattagtgcttacatcttcatgacactctaatcctgtccatgtgaatcgccgagttatcatatacgctgtataatctagatcgatctcgtcatctaacctcattagctagcctctatcatcgaaaacggccgatagatttagatatcgacattgagttagattatacagagtatctactatataaaagaccagaaactatgtatacatctatcatttacctcaatcctacgtgcacatgatggaaaaaagaggttatagtagatgttttctctcatgtttttcctgtgaaatgagttgcaaaggaaaatttcctccaacttccctatgcctggatccaatgaatcgaaggctgctatagtgccaaatcctgaatacctacatattcctatgaaattcctataaatcaaaggaggccttggcagttcaatttgtttcctatggattggattaagccacatatcttcttcttccgtgctttcttgcatccaggaaggcttagggcatccataatattgtaaattaataaccataattaaaggccataagttggacgataaccattgtggctttaatcataagctgggccataacaaaaattaagcatatgtttgtgatcagtcacaagcgaaaaaaaagagaggagaatctctcttctcgctccaccgaataaaaggttggtttgaaatctttttcatttgtcaaagggttcacgtctattgttaactggcatagggttgagggttcaccttaaagttaggttggcaataaacattggccatatgcgcttagttgagctattaccttgttttctgttggcacgatttataaaccattaaacggtgtatcaattttgtgcaaaattttctgtacaaaaatcaaataaattattttttgaaaatttacaatagttaatacttcctccatccgaagttgatcatcatataggtttatgcatcaagattaaggataatttaaatcgcatcaattaagacactatgcacatattctcctactatgtatgcatcgattaaatcaccatgctaattacatcctaccatgcacacattctcccatgctgtattaatggtatttcaatggaattcgtgttcatacggttatatgataattaatttaagaaattttagatttgattatataatgatcaaaggagggagtactacctaattaaatatgcagtaattacctagctatttttatttgtgtatgttttacgtgcgactgattagctaaatcaacaagctctaccgaatgcataggcgcaaggcaaacaagcgaacaacactagctctgtaatttcttatagggtgctggtagaccatccagccatcatggtgcccggcatgaaagatccaccacacaccactacaacagaaccactcatttataatgggtggtaacctcgtcaatgattggtggacaatatgagaaaactgttaggatacacgtaggctacgatagcataaactaaaaatttttcaccgcgtaaaccaggaaccatataaatattagatcatagatcgttaccactcgacgcgctgcgcagcggaagtaattaagcgctaagaaggcgaggaacccgcgtgatgtagtgcgcatcgatgtagaggaagtagtcgatcacaccggctcgaccttctccccctcgtgcgttgtcctcgccgtgctcccacgccgattagcaccgcaaagcagcggggcctctaccggtatccacaaaggaacaccacgcgtagatgtgctagcatccacgcgcggttagggtttgctcggggaggggagtgacaactagggtttcacgtggtgtgttaattccgccggtcacatcccctcacgaatataaaggatacacgactgggccttcgaggcccatatgagtcctactcggatccctatccgattgagtgcatattagatctccatccaatccctttattccggccctttaagcgtgcaaccctgtaggttcatatacactcggttgcaacctgaaaactccttttcggtccacgtgtcaacagcggaccctagcagaacgtattgacccaccgagcatacataaagatcatatcggttgaacctctagtgtaaacttgtatggacccctttgcctcacgatatagattaagctcaaggctagatatgtgccatcatctaatagctcaaccattcactcgaacttgtgatagattatataacttgtgattaactcctcaatcacctttggcatgactatgcacttccataatctataacatcgagtggcccagatatatctctccataggaggagcaaatcccatcttgattattcatatcccactacatgttttatagtatacccgaaaactacttttataactacccaattatggagtagcgtttagcagtccctaagtaagctactacacatgttgggaaccatgataatctcaggtctaaggattcaataccaacactaaataagatcactgatgacacaacacatacggctcttgcagtgtctcatgttgggtctatctaacaacatgttcaccaacatgtgtccacattattaatttggtatctctataccatgatccatgagacatgatcatcaattaatacatgtgctgatcatctaaacatatttgttccacatatgatatttgatcagggatcctttagaaatagcaacatataatataaagagtctcaagaaagaatcacatattcattaacaaataatgagttatctatttcaaggaacaatgtcggataaatatgtaaacatagtatgtgatacaatcatctttatgatttcctctagggcatatcaccaataaaaacctcatccgtgatgagtgaataaccgttaccaataacccatcgatgataggttttaacttatcacacaccaaagatgactcccgtcacatatgagagttatctatgatggttcgtaattatgaaccttcatggatgagaatttatgatttttaaattataataaacaaaaaaacccttaaaatattcaaaatattattatattatttcaaccatggtcgtacatcactagccacaaattcatgattttttaagagatatttacaagcacactatggtgggatttcaaccgaagaccttccaaagcacataaagcatattctcagccacatgttgctaggtctttggatattgttattttggctattctggtccaaatatgaaatactaatttgactctctagatgacttaaaaagaaaacttttcaagtacaaagttgtagatctcattgagctcgtttgaaaaattcaaaaaatattgtgaaaatagatcacattacttataacacatatttggtgatgtaaacaatctcaaatgaaaatattgtcaattggaaagttgtagatctcatcgaacccttgcactctgatataggatatgtctccaaccgagatcatttgaaaaatttaaaattacgtttttcaaaatagatatcatcctaggtagtcatatcttagtcatatcttacgtgggatagtttagatccgttagacatgagtcatcagaacgggttgcattagcccatcacagataccgggatctgtggtagtgatagtgacgtttagaacgagcagaagttgctgcccttgactacctgggaagcctcatgatcatctcccttgattcattgtgatacggggtgcctgactttcttagattagaatacgccatacaacttgacgaactagatgaacgacatgcatgttgcctatgtaacgcacctttcacaacgaattcgcaaaaccacatacaagagatgatcatctacttgaccgcacaaaagtggatctttttctccctcaattcccggctagcaaaagtaagaacaacctatggcagaaactgccaatttctctttctaatttggtggtgacaggtcaaagacttggagaagaataagagcaatatttcatgtgaattttcttttcattaaatgttgtttaccctgttaggtcatgtgtacaaagtcatatattgccattacatgtgttacaaactaattaataatccaatacacacaatttcaaaacctgtcaagactatcgacagtgtagtgaaaccagaaggaaacctatccattatatcaggtgcagccataggagggttccctccgtgttgttgttggtatttgttacgaccacagataaatccgcaagcgtacggaataccgctatagcacttcaccttcgggtgacccctaaaggatatcgaactcagggaacgtgtgtaatctacgtaagcataagactatccaaggacaacaactataggtaggctggctaggcttgagaggactttctatgtgttttaattatctaagctaagttgaaggtaattttctatctgttgcttcgggcaccgactcctgctagtttgccagcgtggtttcggctatagctctatgatgtaaccgaacgtggaggattactaggacgggattcagggctgtcaccacctgctgtctacctctgacaaatccgtgggatacgcaacaaacaaaggtaatctctaacctagacaccacgcctaagttattaattactactctaatacttgcgtaggaactttcttctctatccggagtcctagtactaaagcacttagtacaaatactaaataatgaacctacaaagatggaaatctatcttacttaaacaaagtatttaaataacataagaaaagaacatgaatgcttcctttatagaagaagtttctccgaacccggagcagagtgtaccgacaactccggtactcctccagaattcttcctagaaagctacacccatcgaggtagaagtcggatgagcgccaaacttccgggcactccttcagagcttccctcccctctctccacctaattctaatgtacaaaagatacaatagagcctcttgtaattcagctcaaagttgtgtttattgaagtgagtgagagctcctccttttataagctccaaatgacggttacaagtatgggaaatgatcaatgtgccctccaaccatcattgggacttcattagcagcgtacatgtggaatgctggcgatcaacggccacaacactggtttgtccgaactggtggttcggtctaactagaaaaatatcatcctggcctctcctatggccagtaggtagcttaatgggcccccaacatcatgtactatgccaaagcccaattctaagtggttttgatagtcttatggggcctccaatccatgtaaacgcgtcctgatcgtgcggaggttcatcgtgtcgcatgacgggtgtgtttcctccttaaaatacctgcatacatatatttcaccaacactagttgaaatgattagtaataaatcctaccactaagttgaataccatattttatttcattatatgcaggtattgacggtcagatattataacttaaggaccgtcaacagttgtgaggagaagtggaggctcatttaggaggagattgagaggagaagctggcttgagttatcggaagaagaggatgtaatgaaggggaaaggtaccaagtagagaagtgggtaaggccgcaaggggtatgctgtacgccagcaataaaatacaatttatatattacgcataaacgaagctaaaatattttggattatactgtgattgttatttacctatgatttatgacgtaatactcttgctcgaagcacctaattagacatatagaaataacgtgtgataagtatagatgagacaatgtaattatagttcgatagttcagggtgtaaaataagtcaaaaaatagtttaaggggttaagtgctttagtgaaatagtttgggggagtaaaatgatcttttttcttttaaaaaatatggcagaagattcgtttgtgttaaacatcgttgtatatatgaaaaaaaatatattgttttctccttggaagttcgtactagtttttgagttaaattatttatgaacaaaaataatatttggaatattgttgtaacaaaataaaatattcaatccagttaaataaaatcatgattataagttgaacatattttattttctgtaggaaatatatttttttgttggatgtgaatatcctgatttttttaacggaatttttttggagtttattcggataattactgagttcaattcagtttttttttctctttaaataaattccgacatcatcttaaaaatctagtagatctcgaaaacccaaattccaaactcgcgggcaccaatcgccgcctccattcgaacttgcccccccccctcgcgccctcgtttactccacaaacactccctctctcctcaccgtcgccgccacgcgtttggctcgcgatccgcttgaaactacaaatcaccagtctctcccggtccaccgcggcggcgccgcctttgcagtttcagcttcactaccgtcttcttgctccggcgaggtacgtacgtacgcccccggccgatttattccatggccaacgaggagcagtacgactggtacgacgccgatggcgatgtcacgcgctacctgctcgacccgaccacggatatcgcgatgttctccgagccgccggtggttcgtgcccgtcgccgccgccatcgagtcccatcccacgccggcgattcacgtcgtcgagcgggagtggcccgctcaggtccagatctcgcgattcgatccctgctctcctccgcctccggcgaggatgcttcccggcggccagcagcagcaacctcatccagcgccggggggactggatctccgctcggatgagattcacgccctgaaacaacgacgccgtccgccgccaaatcctcagtcctcgtcaccgcctgaaggtttgctcggcgccgcaaaccctgaccggcctgacgatgacgagcttgatgctatcctaagcagcttccgtgatgaggccgcgcacggcgacagtggtggtggcgtggctcgcgtccaagtgctccccgtcgagcaagatgccaacctggtgccttccctgccgctccggcatggccaactggactgctcccgctgccaccttgtcaggcatgtcatgcacgtcgctggtaagatttttttttcatctatactactctttcttaggggtcctttagatcagacgagtgaaaaaacggagaaattgaaaaaacataggattctaacaggaatagagaattataaaacacaggaaaaacatatgaatgtccgtttgattgggccgtaggaaaaacacaagaatttaagaagagataataattaaaagattattttcatgaagttctaccttatgttaaattttctctaaaacttgtatgggaagaggcatttcataggtattttattggactccatagagttcagtcctttgattcatagggctatgtaggaaaaaaatcctatagaaataaaatcttctaaaactcctatgaatttcctttgaataatcaaagagggccttatacataattacatatacaccctgcctgatatttgaccatgataaattaaccgatctctgcctgatattgaatcagaatacggagaatgtatgtgatatcggttcgttccaatgtttacagcctcagcaagtggacgcaggaatgggctagcgagttcattgcgagaaacattgacacgatgagaaataatacaaacgggcagcttctggacagcggctactccaatttagttgaatccgtccgcaccaatgtgaatgtcccacacacggcggtggaagtgaacttgctccagacgatcatgtccgccccatcggctgatcatcatcagaatggtgagtttgtaaaaatgtatgcatgaaatgtttgcaggaaccatttcaattagttgtactgatatataatttgatattaattgtatgcactgcagctgcagatcaggtagcagccccagcggcgcaaccattctctgcagctcctccagtagcattacctccaaaggcggcgccgcgaaaagcgcgcaaggatcgggattatgctagcatgctggttgcagttgaagaattctatgtcgccgcaaccagtcggcctgtaccaaactcagacgtagagatattggaatcttctcatgtctcccagcagcaggatggaggtagagctatcatatacccaagcttgcaagccagaaggggaaagacgaagcaggaggtaccgagaaggaatgcaaaagatgttctagagtatctgagcttggcgaggaaggagactgagaaggaaatcaatactctgtcctccttcgatggaatttaccggaacgacggaacattaagctacctgatgacagaggtatatatcagctgtgtgtacgtgttaaaggaaccattttattttatgtgacatttggttcttaacttgtcatatcgtaggtacgtcgactcaacaggaagatatggaggctccagaagaatgctccgagtacactgtcgagtaggctgttggcgagcgtgaaggagattgatgatattaaagttgagaagggaaggctgtatgcgcaattcataagtgcgttaaagaagctttgccgaaagaagatggacgatggtggtagtgccccatctgccaacaattaagctagccgatcaacaatgattgcctcccagtgatcgaagtattatcagccagtgaaaattgctgcatggaaaattttgcgatacttagtgcaaatggagagtgattgcatgcagtggcttacaatccgatggcatgcaggaatttttccacgatcacctcatcacctccatctctgcgagatgatcagctgacatctgatcttacaaacactactcatgggtaaacatggataagtgacagtacagttgttccaactcgagagaaggtcttagccgcgtgcttctgagaatattttccccctttttcaaatgtttcatctggacaacaacaatgaaataatagaagtcatggtctatgcgaagcccaataaaaaaaaaattcaactatgctattttattttatttattgaatgtgtttcatgttcacccatagtaaattttggatgtgtttaattattagtttaattctctacaaacttcactaatagtaaatttgaatttgtaactcaagctcacatcttcagatttgaaaattttttgtccaggaaagacgaaggtttctttgaaaaggttcttcatgtctagtttacaaatttctaatttaatgacagtcttgcattttattttgccaaaataaaagctttctgagaagagtttaagcgtttggagtaaaacatttcgaaataatctggacggtttgcaaaacatggtcacttccttcacagacaagttggagggacagatgttgtgtttggatgaatttaattaaaggaatttaagaaagcccaaataatgagctacttcaattcaaatgaatatatattaacaaaaaaaaaagcactgaaaggagggttcaatctggtaagaaggcatactgcgcattcatgctataataatatatggctaaaaagaggggagtgagcgtaccgggtgagaaggaaatgagagagatgaaaataagggaaatgtcatcgtaagtggacaaattccgtaatattttcttggaatttgatttcagaagtattattttgattgagattttgattctagaacatgaattctaaatttgacggattttgaaaggaaattgatgattttattttcaaaattttaatggttttttgcatgttttatttcgagagggattgttgctggcctgggaggggggggtggcggggaataaaatgtataagtgcgtatgtaagcaagagaaccgtttctcattaggaagaaggaggaattcgactgaaccctggtgatcaccgtccgatttagggtttggtgtgcacggtctagatcctctcctgatggcggttgcagggcaaaaatgtcatttcgcataggcataaccgtcatacctgtcctataaatagaggagctcatttcacttcactcacgcactccaagcttgagttgaattataagaggctctattgtactatattgtatactagaataggaagagagtagagtagaagaagtcggaggaattttggagttgtcggtaatcctctccctatttctttatgctctgttaattactctgattataatagaattatcttttgagtaatttagttttgctcggtaagaattatttcttggttagttcctattcagagtacatgatcatcgttcactataatcaactaaaatatagtgatttggtttagtgtgtagctagcattaaagtaagtaattaatctgcttagacatggtgtctaggtagataattgccggtgtttgctccgcatctcacagtaggtgtgaggtgggttagaggtggtgacagccctcaagacactaaagtcatccctgtctgggtgcgcagtagagcgatatctaggagcagcgagctggccagtgcccgaagtacctcattaggattaaagttaagctttccgtacacactgttattcaccgacgaaacctctctatcctttgcctatctatagcttcgtgtccttgcatgaatctaaattggagatagcatacacgttccctgtggaaatcgatacctgagaatactcccgggtgaagtgctacatcggtatattccgttcgcttacggatttatctgtgatcgtaagaaataccaacaccctccaccactgcactgatccaccaccgccaccgctggacctaaagccctctccactgctccaagccttcccatgttggatctaggggatccagtcgttgatccacaacctccaatcaaaacctaggcgccacccctgctgctagcagtaggagtcgcatcgctatcaaggtcgtcgtcctggggtcgcctccgctggatcctcatgaggccgacgatggtggtggtggaggaggagccaaggtgcgcggcagccgctcccatcgctgccaccactagcagtcggggtcaccgtcaccatcgaggtcatcatcccggggctgcctccactccggctttcacgaagccaccagcactagatctagccatcgtgaggccaccggtggtggaggagccgaggcgcgtggcggccgctcttgttggcccatgcttccattacaagatacacccattgctggccactccagtcaccgacaaaatggggaagaaatgataggggtagaaaaaaggagaatgaagggggagtgagtaatagtgaagtgatgggggaaacaggagaggagaatgaaaataaataaagggtgaatgaatggaattgcgtccggccgtatgatcctatctcaagagcggtcgacgcctcgtcctgtcttctcagaatccccttccatcagcgcaaaatccttcggtctcgtcttctgacatcgttcacctgcacttcaccgaaagcaattgggaagaagtcagaaagaagcattggtggcgaaagtcttcttcattcattcaatccaacaaccaagtgagcattcaatccagaagagaaaaattccttaaacacatggatggcaaatgcttttgctgcctgagcacccatcatcaaatttttgattgcagagaacatgtccgttgttggttctgtctgaaatcgggacaccttgtggctagttgtcacaagcgcttgagctataagagcaaccctcccccacctgctatgtccacagaaaacttcccagcgcttggtcccctccatttccctcccaaatctttctctgtctctgcttcttcctccatggacgaccttactgcccggcctttgcttgactctgtggtcgtctctaccactggggagatagagaggcgcagggagcgtttctctgcctgctccttagtagcttggcaagtcggggctttgggtgataaggtagaactcaatgtctttgctgatgacgtccgttctgccttccacattagacgtgctgacatccaatttaccaaattccaccccgaagacttctttgtgacttgctccaatcagagtgatcgggatgccattctccgccaaccaagacttgctacagcctctggtcgggtctttctctttcgtccttgggatgaaagtctccacggtgtccaagtccgctaccgctatcgcgcccgtctatgtatcgagggcgtccccatgcatggtcgtattgacgagacgatgacaaaggtgatcggtcgcaagtgtgctatccactatgtggaagagtactcccgtcgtggcaactacaatcgcacctacgacttgtggatgtggacagatgagccgagggctatccctcggggtggctccttctccatcaccgctgctaatgaggaggtgctaggggctttccactgatatccctcttccggaactagagccgcaccgcaaccctcctccctccgagccaaagaagggctagacctacaatgtcctggtccacgtcgacactctggaagatcttctctctcgcaaagcccgtgcttacaaatgggactatgaagttcaagatgatggcactcgctacaaggagtacgcacttccttgtagagctgaaccagacccaacccgtggccccgaggatgaagatgaagacggagacagccactccaggggctagcaccgtagtcgctctctctgggatcggcttagtggtcgctcctccagtcacagcagggatacggatcggtgggacagccagcgccgtgatcaggacaaacgaggccaatcacggggaaaggaacgctctgatcataggagtcgcagccaccggtctcgcgatccaagtaaggtgagaccacctttttctgcccaacctgtctctcattcggatcaatatgctaaagctcctcctcttgtctccccctctgttgcggccacaccttgcaagtttccgtcccctctccctagttcgaagccagatggagatgcggctctcactgtgcgctgctctgcttctgaggaacttgcaatcctccaatctgatgattccctcccctcgcaggtccacggggatgttctgggaatcctggaagccacctcgatcccatgttgcatgaagcggtagttcagcattctatttactcaccggatacagtctcccgtcgtgtttcttcccctatttttgtgccatcttacacagggtgggtggcgacctccaacccatcctctcctgcagtaggcaaggtgtcacagatcgacaatttcatcaacaacatcgcaacaccaatccaatctcccctccttccggctcctgatgttaaagcgtggaaaccttcccgtgcaaaggtgaagatccgtgccattacctcagcccaacaccatagtgagcgtttgctctgtaagtgccatgcgggcgcaaagctagagaatttaggtcaggaaatactttcaaaaaatttcggtctcattgatgattatgcatccttcgatgataatattaaaaagttgtatttatagcgctacaagaagccgctctccccggcttctctgaagaccattgctgatctggttgaaaagggaggatgcaagacaatccgtctgaagaccttgaagaaaaaagcggctatagcgccgctgtgaaggtcttcggcatgaagacagttgctgtgaaacactccatgtcaagtttcaaacctttgtcagagttcctatgctcaagctgtctgtgttgttgtcacgccctgaagttcccctcccttgctttaaatttgctaaataaatcgcatgaagaaattggttcaaattaacctagagatgaatccctaattaataaatgcaaataataattggaataggcatatggaatttttcttggattctacatgtcaaaatatgttaacaggatttttagtggaattttcagagctccagagataattttaatcaattaaaattgagcacaagcattaaaaagtccctggaaatccttttattttcctttttccctttttccttccttttgcccctcttttctttctttgggccgccaacccatttcttctccttcccctccctaaagtccatccgagctccccctctcctcccgggcgccgacaggtggggcccacctgtcgggttcgcccctaacctccagccggagggacggcctccctcctcaaccgccgctccaccccacgcccccacgccgcctgcctttcctgcgcccacgtcgccgcgacgccgcccacgctctcgccttcccgcccgcgccgcgcgcccacaaggggcggattcaacttttgaatccccttccctctctcttcctccccactcccccacgtcgccggcgaaatcgggagcctccccagccacgtccgcctccccctccgcttataaaacgctccccgtgtccccctctctcgtttttcactttcgccgtactcccccgtgccctcctttgctcccacgccgcttcacccatcaccaccgccctccggccgcgctccggccgccgctagccgtcgctagccgccgcgccaatcctcaccgtcgacgccgccgtgttcaccatcccgtgagccaccgtgtccgccatccgcccgtccaaatccaccgtcggggcctgcttgtccacgcgcaccggtgagcaccaccattgccaccgccttcggccatgggtttcgctcaccgtagaacgtcaccctctctctaattttccccgttgtgttctttaggtcctcccggagcccttccgcccgtcgccatcgtcctcccgtcgctcgtcatcgccgttcgccgtcgctccttccctgcgccgaccgagcccctcggtgaggactgaggacccatctccctccttcctccctctcctctcctagcgccgggccgcgcagccgccttcgcgccggccgctgtcgcctcccgccgccgtttgctgtcgctggcaaccgcgtgccgccgccagctccgcgcgcgccgccgcccccatggccggccggccggcttggagccgagataagccaggcgccacctcccctcccttggagccgctgctggtggggcccgcccacatgccgccccctctccctctctttgtgccactgacccgtgggtcctgcatgtcggtgcccccccttgggtgacgtcagccttgggacatattgcgcaataaataattaaggctttttcttttatagtaataaacacagataatcttctaaaattcatatctaattcatccgagctccgattaagtccattcaagtctcagtaaattcataaaaatgcatagaatccattaagaatggttttatttcatgtttcagtagacttgtgtgctttgtttgtcgcgtagatttcggccgtttcgtcgatccgcggtttctcgaagacgttgttgtggtctcatcagtgcgagagcaaggcaagtcatgcattacaattgatcatattgtacccaatttacaaatgtcccgcatttctattaaatattgcattcttttacaacatcatgtgggatgggtcctactactcagccatatattgtttaccttatgccattgataacttgggtattaaaatgactagatgttggtttaggaaatgcttagccatgcttagttcaactagtacacaaagggggaatcatattaatgcatagactttgattattggcatagctttggaatagagccaccgcaatggtgttagttaattaaaatacactacatggtgcgttgtgggtgcatggttttgctagtcgtgcccatggcgattaaggaccggttcacgggataccctggaagaacttatcgtacttatcataagccagcgtgggcaacgactgggcttgtagtgtagctttcctctagctgacgtacccaagcaagggtgggcgtgatggagttgggtcggccggggtgtccggttgatcggcttccgaattcaccgtggcacgagaggggactgcccgctgccttgcgaggagtgggggtgaaacctgaggtgtggtgcgattggttagagggggttatgcgaacggtcctgtcacggcctctttccggtatgccgtggtggcatgtcggcgcacggaaacgtgtcgtggggctgtgtcttgtgggtacagttgtacacctctgatcagagtaaaactattcgaatagttgtgcccgcggttatgggcggtcgaccagattcaccgtgattagtctcacccctagttagctaatgaactggtgtaattcaggtggttggttgggcttgttgcaacgtggtgtagcgttggacaatgattggttaatattgattaattactacaactgttttactgctttcaactattgcttttaaatgctagctttatgcaaaatgacctttagcctcctttggatatatcctgcatcatacatcctcttccggtatgacttgctgagtacagtgggtagtactcagtcttgctctcttttcccccacaccagagcggaagttcttcccagtttgagctgtctcagaaaggttggtttcgtcgctgccgtcaaggatgcctatagagtggagtcgcccgctgtaggagtcaagtctttaggcttagctcgttttaccttttccgctgcatttgtaatcttttatatttttgtaagacatggatctgtatgtcaacaattatcgtttgtgtaccctggttggtcctggacaggggtttaatgcacattcagcttagaaattctggttcgtgaatttctgggcgtgacagttgtaggcttttgcttcccgtgtatgactggggtcagttctatgatgtgttacccccctgtctcaaagtctctgctctcttctatcacctactcttcaggctgtgtttcttctagactttctagttgtgtttctgcctgtttgggtgtgatagctgccactttaatttatgtcgcaagataatgtgtacctgttcaactggaatgtaaggggtttgaatgccaaagctaaacaagattctgtcaaattctgcattcaacaacatggggcttcaattgtttgtctccaggaaacaaaagttgcggcgatatgtctgaccaacacatccttaatactcttggccaacgttttgtacatcaatatgcatatctgccagcagatggttccaagggcagggtgattttggcctgtgatgaaaacttcttctccctctctgatgttcacctgggtcaattaccgccgccgtcgtcaaatggagaggaggagggcgccgctgccgcggcaccaccgtcgccgccgccgggccgttggaccaccgccgtctcccctcccgccgctgccgtatccccttctgccgccaggccgtcaccgccatctcccctcccgccagatctggcggagggggagggcctcaccgccgggccatcggaccaccgccgcctcccctcacgccgctgacgccacctctcctcctgccagatctggcggaggggagggctccgccgccaggctgcaacatcccctcccaccgccgcacaccaattcggttgagggagggagggggagagagagagagagggggaatggataaggagaggagatgaatggataaggtcgatgtggccgggggttggttcagctcggcttatgtgggtgtcggttttataaaaaactggcacctataatatattatacgtgtcagtttttaatgatgctggtttttataaaaaatcggcacctatagaataggtgtaggttcttatttagaaccggcacctataattggttaaatgtgccggttttttactatttccacccgcggagatagggaaaaagcttataggtacgtgttttagcacttccggcacctataatggcgacacctatttaatgttttgtagcagtaagattggatttgccaaaaatatatactccaacaattaatgaatggacaggaaacaaacaacgatcaagtctaaataatgactattattagttgcatcgaaatagtggtatataactaagcatgccgtgatgatatcacagccattgaagaaattatattggaaaggttgacaatttgtaatgaccaatcgagccagcctagcaagctagtataaattaactggtacctcatcgattgaacatatatatgcattaatccatcctgtagctggctactaactaaactcagagagagagagagagagagagagagagagagagagagagagagagagagagagagagagagagagagagagtgtgagtgtgtgtaaatacaatgagcaggtcgagcatgaccgccgtcctcctgcaggtagtgttgatagcgatcaacgccggcagcttatgcagcaaaggactgggtgaagctcagccttgagctgccaccgcggacgccgcctgggcaggagccctccccagcggcgtaccagttctcccgtaccatctgcagaatccccaaggatcctatctacaagatctgctgcttcggcgaactcctcccgtacgccgagtccttccaggacaaccaaatgaaggccacccaagtggccaccatcatcctgctcaccaagatccaggccctcgatagggaggtgggcgcggtaagaagcggggcatcagggacaagaacatcgacgactgcacatcgttcttcggcattggctccagcaattcagagtccaccaactcggtgcttgccgcactcgaccgcctcgccgccgccggaaaaggcagacgcaagaaggaggacgtggaaacggtgctcaagtggaccaagaatttggagacccaatacaacggggccacaagcaagtgcaagttaggttatctgttcaagtactgtgacatggttcccaccgttaaggagattgacgcggcgacgaccatcaccatcgacctcctcaatgccataaagctgtgattgatcatccgatcatcagttagtgatatgtcctgaggacaaaatcatagagattattgtattgcacactatatttatttatttgtaataaagtgttgcttaaatagataacttaggctgtgttcttaccttcaagttcccaacccctctccctcgtttttcgcgcgcacgattttcaaactgctaaacgtgcgtattttgcaaaaagtttctatatgaaagttgcttaaaaaaatcaaattaatccattttcgaaaaaaatagttaatatacttaattaatcatgcaataaggtgtgctccgttttgcgtgccggaaggaggggttgcgaacgcagccttatatattatccatcagtgagcatgtgatttgttaatgaagctctttgtgtatgttgctatttctaaatgatttctgattgtatgtcatatgtggaacaagtgattacaagatcaacacatgtaatgattgatgatcacttttcatggattatggtaaagatacctaatcaataatgtgaacaatgtgttggatagacccaacctaaaatactgcatgattacaatggccaacaattgtctaggattatcatgattcccaacatgtgtagtagcatttagatcctttgttgatgctcctcctcttagacgccacagtgccagatccacctctcctagcaccaccactgtcaaatacaccacccttgaggccagccggtggatccacgaaggagggggagaagctactgtccatccgccaccgatggatccgcagttggctaggccaaccgtctgttggtatttcttaacgaaattattagaaatataattcccagcaatggggacgaaatattctcggtatactttatggctacagatacaatccgcaaacgtacggatatactgttgtagcatttcacctcggactattccaaggtatcgtatttatttaatcccaagggaagatatgataagagattattatgctaataatttatatcacttgtatatatcaaagtctaatgcagaggtaattaattcgtgggacacttttatagaatgtgttgacacacagaagtaactaaccaaaatttgagggtagaatgtgttgacacactgaagaaagtaaccagaatactctcattaatatgtagtccaaactaagtgaagaaataataagaaaagtgtcatttctgtacttctaatatatagtcaatttagtctacatttgctagtatacaactatgcaaccaataccacctaactatatcctcctggtgtatcgagaaaccatccctgattgccgacttccttatgacaacctgtcatagacatccaaccggtaatgaatacgtaggagtatccacactaggaaatttgtggaaattctcttagtattatatacacacatggaggatacccgtactgagctatcaccatcagcggtctacgtctacagaccagtagcacataacaccatttaatggtatataataatctaagcaccgcacttacattactaaatactactctacatttctgcaggtgacatagagcaatcatataaatgaacattaaacaaacaccattgcatatatccaataagctagctacataattataacgagacaaatatgaactaaagtcggtattcgaataattatacaagtgaagtaaaagaccgaaactatataaagaataatatttcattaatgagtaaagtcttataatagaaagaaaagctactagagccatatccgaaatcttttgaagacttgaagaactaaggaaactattctattcctactccactagcactagaacaatgtaaataaactagagagtgtcttgaatttgatccttcttggtgcactttggaatggagaagagaaaattccctgtgtacccctgaaacttcaaccaatcccttctatgtcccctgagatttgcccattcccttccatacctctaaatttcagtttggatcccttctataccccttccattagttgaccgttaaatttctatcataaagtccattttgctatttggtatcaagaaaatataaatttatgaagtatattgataaagtgtataaatttattatatgcgactattatatgtatgagtttattttgtgagatattatttaacaaatgtaatattttggtttcgcctcacgaagggaaaaaataatttttatctatgacaaaatttatttgagataaaacaaaaaaaatattttttaccattaaaaactatatatatagcatattttgttagagtagtatgaaattttttataagataaatcttgttatgcgagataaaaattatttttgttaaataatatctcacaaaataaactcataaatatatttaggagtataaaagggatccaatctgaaatttaggggtataaaagggaatgagcaaatctcaggggtatagaatagaaggggttggacgaactttcagggtacacagggaattttcttgagaaggtgagctccttttataggctgctaatgacggttgtgacagttgaaattgtcctaaatgccccgtaaccgtcattggggagtgaccaggaatgtccggtattttacaattggtcgtagcatcatcgtttcaaacacacatatacactcatcatacaaaaaatcataatgagagggcattagccgcctaagattcttccatcgcctaccatcggagccggtcctcaaagtcgttgcgtgcttatcgtggctcgaacctttgcccttcgtgttggccgctggcaacaagcgtggatgatgcccgggtcgaggacgactaccaggatagcattccggtggcatcaccaccactggcagaatcttctcatgttctttttctagtttcctgaacacaaactaattcataatttaaaagaaaactcagatatgagtgaggaaggatgtttggaatgagcatcgaccgtatggggttgggtatcgaggttctaaatgagcaacccaaaaaataattcagacatgaatttcttcggcggaccattgccaacctccaggcacatgcatcgagatgtgcctccgcctgtaagagtgcacacagcaactgctaccaccatggtcacaaataaattaaattcagaacattctagaatgaagaaatttattgtcaaaatattcagagaaaacctagcgtattcaacagtgttatatgcagtgagcaagctattaatcatattcctcgtaccattcaacttttatgttatgaggaatccacttcaatttctctactattcaaccagaaaatcacatcacattaacaaaatcccagtaaaaaaaaagattaacctacaacttctcctagaatcttcagttgccagaagctccctcaaacagttcagcttttatccagattctgagaatacatagttgtagtcttttataatctggaacatgaattagaagccggaagcttctccagatttttaccagctagcttctcagcagctgcttctcagaattttaagctccccaaacagatcctaagatgcattgcaatcacttacaaccggaagccaccagatcggagtgattaggaaaaacgacagaacaaacaaaagaaaaatgatcatcttcctttgctacatccacaggctgcattggggcaagtgcattggcctccttcatcgacagcctctgaccgtggagggaagtgccaccaggaacgagacctggttctcccggcggtatcgtcgtcgtcggggctcagggcctcaggggcgatcccccgtgttgtgtgagtcggaagcatcggtggctgcgcgcccacctgcatgaaccgttctgatcctcttacttgccttcggattttggtgtcgaggacacgtgacaaggcagaggcagcatgggcggttcccctgccgtcctcgccgaatccagcgtctctcgagccggtgccgctggatctagcgctcctttcttcttcctctccgtctctcttcctggggcaaagaagcaggtggctggatcggtgaggctggtgacaggtgccgagagagggatatggaggacgccgcttcatcctcgtcgccgctgctgctccttgacgttgccgcaattgctccgtgacgctagcgttgctgctacatggatgccgttgctcctagccagggtcgtcgccactgccgtcgctcaactgctccaccgagccgccggagccaccgccctctcacatcccaaaaaatatacgatcgggattgatagggaatgaatgtatatgtggttggttagccggggccgggggaacccaaaccttataatccagtccatttaactccctaaactgtttcacaaggcggttttgcacatatggcgggctgactgaaccgtatttgccacgttgtcatgctgaccaggcaattgcaaagtaacaagagggaaaagtggagcgatcgcgaaataacatgagggagggaacgcacatcagtctatatatcattcttgcctcatcgtactccctcatcccatcttctaggtttcttctctcgagtgttgcgcccatggcgaccatggctgcgtgaatcgtgatcacgcacggacgggaagatcaaggtgatcgcggagtacgtcttggagtaggtgagatccctgactccattgcagtgtttgatgcaagaaggtttcttccctttttatctagggttttgtggtgattgttttactcacattggttgacagcctccacgagggaggcatggagtcaagatataattatctttggtttctttggttttgatttctttagttctgtcattgaggtttagggctttgatgtttttctgttgcatagtgcagatcgatgtgtgtaggatgatcttttctaatcttgtcaagtctagtataaattaaattaatttcgtcttttataatgcagcacaagctagaaagaatgaataatttggagatacttcttgtcagattttattatagtggggagtttgtcaattctagaaggattgtgcaatacgttggtggagatgaagggatgtcatatatagaaaaggacaagatttctatgcctgaaattagaggccaccttgcagaccatatcgaggtcaaggatgccatgcagctccactggttgtttcccctggaaaagaattaagcacaggattacggttactgacagagtgatagataacaaggcatgccttgatatgtcaagttgcattgctgaaggtggagtggctgaaattttcgtggaggaaacaatgtcatattataattctgaagaaagtgattgggaaactgacaatatgaaatctgatgagatggaaaacgtggaagggacacaatacgatgcaaacaaagaaggaagcgtgggagaagatagtgacactactgatagtgactatcaaccagaaagtggaaatagctctgcagatgatgagtaggtagtaaaccttacagaagtttgctgagatgtataacaaaaagttaaaagcaatgaagctgattctacaagatcctgatgcaaacagtgtgcccgttgagttaataggtcatggagatgatagcttgaatgagataactgatgaacctacatatatgattctagtgaagattattcttgtcgaggagtgatcctctctagtgggaggttgtgagaccctccttttgtgagttcggccgggggataaggcgcgatgatcaagagcgcatctccgcttaaggtcgggctactagatcgcttacgaatccgtgagagagacaagggattatacaggttcgggccgccgggaggcgtaacaccctactcctatgtgtgaaattatcgtggagatcttacaagagatcttgagctcctgggaaaccctagctgtgcttcctttagagttcgagctattaagagtcgtccctcttttcggtgggtaaggtcctcctcttgtagttcaaggggataccacatgcaccgttcatccctacccctccatgggaggggggcccacatagcctgagtcagatcactatccgtgccttcaaccggaagcaaagtggttgcccgcccctaggtggggcccagcgccgtcctccgcctgacacggaggacatccccgtcattccctcttaaatgcatggagactttggtggattcaccatatataggggcacacttggcagcgtgccgatgggacagggcatacctgcccctactctgccagacacaaagcgggacatggaggcactgccactcgtcccatccgcctgcagccggtcgcaggccggtcaagaccgattgacatgcatcaatcgggcggcgccgcacgcccgcccatgccgcattaaatgcggtgagggacggttgcggcgccgcgcatttaagacgctggacagcgcctcgtgctccgcccactcaccccgccacgtggtggccggatgagggcctcggggtagtatgcctcacgggcccgagtggtgtgacgtggcaccccgaggccccctggccacctcataactacctgacctccccccgagggggtgggggaaaaggcaggccgcacgaccacgtggccagatgggaaggttattctcctctaccgtgcgtacccccgggtccatatcaccgacaattcttatgacgatgatagtggtgaagacaacgaccatatagtgaggagaaagagtaggtggagaaagtatgactctaattatgctattccccatttttcggggaaagaggaaatgaagaaagctttacttaagtaaggaatagttagtcttaataggtgcttattcaaaggagcatgtaatggagagatgctttgtgccttaagaagggatgcaaataatcaaatgtatcccatagcatgggctattgttgagaaagagacaacaagctcatgggaatggtttttggatttgctgatcaaggatctaaacgttggcaatgatggagaaggatgagttttcatctatggtcaacaaaaggtaatataaaattcactagtcaattcatgttttagtgacttgtaagtactttcaattaatatggccaataaattttcttatgtagggcttgctccatgcattcaataccttcttgccaagggatgagcacatgatgtgtgctaggcatatatatgccaattggacgaagaaatacaaagacctaaatctccaaaaacgattttggcgatgtgctaaggcatcaaacgtagaggatttcaactactacagaccaagcttgcacaaaagactgtccaaggagccaaggatatgatgaatactgaaccaaaacattggtgtagagcttggtttgaattagggtcaagctgtgactaggttgacaataacatgtgtgaatcatttaacaattcgattgttgatgccaggttttatcctgttatatatctcaatgctagaggcagttaggcgtaaggtaatgatcaaatttcaagagaacagaggcaaggcaaataagtggcagggcatagtgtgtccaaatatatttaagaagctcaagatgaacattgagaggtcaagtcagtgcaatgtattttggaatggaaaggatggatttgaggtgaaagaaaaggagagaaggaggtacacaataaacttgcaaaatatgacatgttcttgtagatactggcagctatctggactgccttgttgtcatgccttaagtgctatttgtaagtcaggacatgccacaaatggttttattgctcaaggctattcaattgaagagtataagaaaacatatgatcattgcatggagcctttggaaggagaggagaggtggcctacatctgatcatcaccccaagccttcgccacctagttatgtcaagatgcctggcaggccaaaaggaaaatctaggaagaggaagcctggtgagaaacctaaagaaactaaaatgtcaagagttggcacaattatgaggtgtgggctttgccataaaactaagcatagtagcaggggttgttcacccaaagagaggggcaagaagaaaaatgctcttgtcacaggagctaatagaaaaagaaatcaacctaatggagcaaaatcatcgactgctcatacagaacaacaggcaatcacatctccctttaacttttttagataatggaaataaatccggcctttgctcaaaaagagctacaaccacttattacacaaacttgttcaaaagcgaacacaaaccacagagttcacaagacacactccgaatttaacaatactcataacacaaactaataggcaccaacgcaagatagagaaaacacaattattaaatcctatttgtaaatctccacccgaagttggcgaaaatatgcatgaccgttgactcaagtttgtgacatgcattctttattagctaactgcaaatttaattttaatgtgatcctgtgtgtttcaaataaatgagattatagagaaaatgagattcagtatgacttgtgtacattaaaggcatcacatagcttgcaaggagcaggggaaggaacaattcacaggctaggaaaggtacctgtaaggagctccaagaaggtttcactgaagggcaagccaactagaccaacaatctgatcagcagtgttttttgtgtttatacatgtattcttgtcaagatctatgttccttactagtttactactattggaattaatagatgggtcttagctcacccgaagattaattctttggaaaatcacaaaagcccacctcatgggatagcatgcatggggagtttagtaccaccttgcttattgtaagagggggacctccttaaaaggaaagatgccctcctagccacttgaaccatgctcgccaggcctggcctggcagcgcgtgcacgacgtacgcatcaaatggtccgccaatgtgttgcaccgtcgctcgtagattactccatcccgctcaccggcgtgcactagctatcgggagagtaagtctccggaacctctgcctttgacgtcctactccaggagaagacaacaataaggtttttgggaagcactccgcgagactgctccctgtttgtccacgacgacttgcgtcgtcctcaacacccgcaacgcaagtaattcctgctgagcaactggtcttccggtactctcggtacgtgctcaacatgttgcacatatttgatctgttcatgttgtgctgtctagtttacatgtaaagattttatgatgcattcatgctagtttacatctgcaatgtcatgatttatttatggaataaattaaatcattatgtgcttaaaatttcaacaatccaaaaaaccttactataggcactgttgttttactatggctagttttgctgatgcactgaggttggataaattcaccggtgtgcattttaagagatggcagatcagggtcactctgtggctgacagctatgaaatgcttctgggtgagtattggcaaacctgtcatgcctggaatttctatccaaaattccaaacacttacatgtgtgtaaaccctcgtccaggaatcagccgaggcacacaataacaaattaataatagagtacaattattattctaattaataagcgaatataatatcattacagaggtagatagttcctctcaaacaataaagttctaagcagcggaaaataagataaacggcgcagacgactccatcccacaagcagctcaaccagggctacgcctaatcctccacaccatcaacatcactatagaactcctcctctgatgaatgattgcaaggtgagtatatggcatactcagcaagccacgcagcaaatatgcaagtgcaagggattgcaaaggatggcataatatagtctcatttgcataaatagcatttaataaatatttcagaatttaataaaacaatagagtatttaaaaacaatattaatccaacgctatacaacataccctgttgcataggcccaaccactctgaacaaccaatcccggctgcacagttctatctccaaaccaggaatataccattccaaaccaggagctaaacaagttattatctattacagcatcattttttatggtgagaggtgtgaaactaatcacgaaagatattgttagacccgcccataaccgcgggcacggctattcgaatagttttactctggccagaggtgtaccactgtacccacaagacacaacctcaacatcatgtcaaccatgcgtcgcgatacttaacaagtacccgaatagagattgtgacaataccctctgcataacacaattcaaagcaatgcaccgttcccggatcataatcacccccttgtaaacaaggcatgtgtcacgtcctgataaattcatcccgaaataaaaatcatcctctaaaaagaataatagaattaattaaaatttgaaaagaaattggcaaacactaaaatacgtgccagaaaaattcgaatgtggtccggagaatttttgttaaattctccttggtctaaaaagagccctccaattttacttgaatttttagagcaccggaaatatttattaagcaacaacaactatgatcaaagtttactaaaaagaaaagctaaaaataatccttcttcctccctttctggcccaaagtcctctctctctctctcggcccgcggccaaagtcctctcttcctccctctctttctctccctcgactcctctccctccttctcttgggcctcctctccttcccctcggcccagctccctcctccaccctctcttccccaggccgccactccctcttctcctcctgggccggccgcccggcccaagccacgccacctagctgccccagcctcccgagccgcccccccccctcacgtgcgccgcacgcgcgttgcatgcgcgctgaccgtgtggggcccacgcgccggtcgtcttcctcctcccgcacggcctcctccctctcccgtgaaccctagctcctttcctccctcaaatccgtgcgatttaatcatgggattccaaaattaaatagggggaattaatccccattgattcctctttgatttcccccgttttcccccttgaatggcgcccccaatcgcccggaacggccgcgccattcccggccgccttccatggccgccggccatgtttcccgtcgccgttccgccctctcctatgcccagctccctcccctcacctataaaatggaaccccctccgtgcgttctcttgttttagcctcttcccgagctcccccgtggccgtaccacctctccccgccttctccttctctctctccggcgccgatcggcctccagccgcctctccctcctcgcccgagcgccgtccggtcgcaccgtcgccgccctcggcctcgcagccgcctcctctcccccggtcagccctccgtttcgcggggaaatcaccggagacgcgtcctcgccggcaaaacagtggcgttgccgccactgtactgcctccagccgcccctgccgtgccgctcaggtgcgggccggctgcgccgtctcctcccttggcgtcaccgcgtcgacctccaccccggcctgccctcggtttcgccggaacgccgtcgcccgcgtcggtctcgccctccgccttgccggagttccttcggcaaccccttccgccgtgcccgtgtgccggccgacgtcgccatctcctcctccggcatcgcagcggtaaggtcgccctcggcctcgcctccccttcgaccgaaccccgccggtgttcgtcgtcgtcgtcatcgttcctcctcgccggctcgtcgtctcgcggcgccgcctccgtcgtcggattcgcagcggcgtgttccacgccgtcctcatctccgtgcagctgctgctagctgtcccttgtcgcctcctcgccggccccggtcgtcgtcgtcgtcgtcctcccgtcgttcccggtcgtcgtggcgttcgtccctccgtcaagccattctcgtccgtcgtccgcgtccgtcaagtgtgccgctgcagccccgtcgtcgtcttcgtcctcgcctccgcgtcgtcaagccttgtgccggccgcgtctcgccttcgtccaaggatcgccaccgaagtcgtcccctcacctttcgtctccgtcgttcctggccgtctccgccgggcccattcgtcgttgtcgttccctcgccacgtcgcgtggtggtaaggatctctcctctcgctgccccgtcctcgtcctttcggtgccgcccgtgcccgttgtgcggttgtcgaccccggtacccgtgtaccggtgtcggtagtcgtttgcttgtgcgtgtggtgaccatgttagtgtgcccgctcggtagccgcgtggtttccacgtgtgcagcccgtgtggtgtctagtggagttcgtttgtcggccactcgcctcggttgacacacaggatctgcttccgtcgacccgtggaccgtctctgtgtacccggtccagcgtggtcccttaggttggcatgtggagtccgcatgtcaacagcgcagccttcctgtcttttccaggctagcgcttacacatgttttatagttgtaaaacctaattacaataatccgcaaatctccatgtaacagcattaaacttcggatgatcatatcttggtcatacgagctccgaatcgatccgttcaagtctcctaatgtttgttatatcctaaagaaccctgtgctttctttttatgtattgttattgcttctttataggtttgtagctttgcttgtgtgcttcgcgtagtcttcgtcgttccggaggttcccgaagcgtggtttgcggtcgtcgccgaaggttcggaaggccgttatctctgagcaaggcaagtcacatcatccttgagcatattgaatcccagtttataaaattattttgatttaaattaatgcattatcgctttatttaaattcctgcgttatcactgttttatttagccatgcctatttacctttgttatgaccttattattattgctattgttattattaccttgttcaccctaggataaacaaaaccccaactagtgggtactctattcatggttccactggtatgaatttaggtagatgcttcgctgattaattaggcaacattaggtggttttataactttagactttgggaattctcatatcatttggacactatggaatggttggcttatgttggaattggacacacacctccccctctattcaaaacccccaaaatggttttaggctgggctcgaggtgcgtggttgggttttgttagtcatacctcaggtactataaggattaagctcgggcctctgttgcaaagcactaccgtacttccacatgtctagtgggtaaggcttagtttgtggctcagtctggttataaacaaaagtacacggatggagatggacgaagtcgggggtcgatggacatctctaggacaaatgaaggctacacgagctgcggcccggtagtcgagatgtcatggcacagggctggtgtcctgctgctaggggctcaatcctgcctgcctgtcccggaggttccggccgtaggtgggttgggtcggtactcttgtttatggctaggatgggttgggaactatgtcacgtcttccgtccgtataccgtggtggtatgtggcacgtggttacacgtgaggaagatgtgtcttgtgggtaaagatgtacacctctaatcagagtataacctattcgaatagccgcgccctcggttatgggcaagcctagcaatgtacccaagttagtgtttcaattcttaaaatttgcttaacaactaaaatgtggaatggttggcctgggttggcttgggacgagctgggacccagggttgggttgccagttcggtctgaatcatcgtaggccttgggttaaggtaggttcgtgagggttcacggccttgattaataacactgtgtaactctaggatcgtctttataaaatggctttgggcaactaagtgacttttaaatgctgttttctgcaaacttaacccctatattattaccccttgtacccccttgcattaatcatgcatctgccggtgtggcttgctgagtactgtggttgtactcattcttgctcaatctttcccccccttcagtaagagaagctttggagaagaagtcttaggtggagtcctggcttataccccagttgagcgcctatgaagatggagccgtaggcccgctagtccgctgctgtttatttttgattgtcaggccttaagtgcctttgtaataatgtaaatattatcgatataataaagctgtgtcttttatatcatgtttgtgtggtgtaccccggcttttcctgggacagggattaatacactagcgttcgggaaaatgtatttttctcggtcgcgacagcatggactccccagcgacccccgtgggcttatctccgccacttcacagtctggtgctccgcaatgaaccatactatacaaaaagtaaagccgttgcccacgctggcttgtggttggcacgattaatgtttcacaaccgaagatcgtgaaccggtccttaattgtcatgagcacgaccatcaaaaccatgtgctcacaacccaccattatcagattttagttggcacattaattaattaaccaatcacgattaaccatcgtgaactatcattaagccatcattaaatattagggaatcataagtatcccatttatatgagctagtgtctctaagcaaggctaagcatcctattcactttagctaaaaccatataatgttctagctaatccaattgttaaccaagtgacaaagaataggtaatcaataacaaaagggctataacaaggcaataggttatttccacccaatgacattcgaaaataaatgcaatagttgaatagaaacaatagctttaaacgggatcaacatgctcaaagggtcgtttgggatctgtgtgacttgccttgctggccttggaactcttcaaaatcttctcctgcaaactcaggctctccgggaacgtcggaatctaagcagaaaagaacaaaatcaccaaaatagcacataaacactcatgaacagtacatgtggatatttttaacatgtagatctcaattttagaaaaatttagagacttgaaccaactaaatccgagctaagatgaattagttatgaatttttaaagattaaatcggattaaaccatttatatagattttaattgaattatgacgcaataaagaattatttttgaaaaggaaaagagatttattgctcagtgggctcgggtttacggtggaccgggtgcacgggacggtctaaggaaacgaatggccgagatcgatcctatccaaaacgaacggccgagatcgaatcggtctaccgcgggctacggctgatgtcgatgatgacgtcggcgatgacgtcaccaccggcggcggctcagccacgcacgctcgcaggcgaaagacggtgcgacggcacaaacggaaggcatctacgcgaagagggcgatgcggcgaaccttaccgaggcacggacggcggcggacggcaaccggacggcgacggcgacgaggttggagcggcggtgatgatcgggtcgacgacgacggcggtgctccggcgatcttcggcggaaacggaggggtggacgaggacggcgacgacctggcgaacccgacggtggccttctcgagcgacgacgacgaccggagcggcggcggcgcacggcttgacgcggctagagcactacgagcggcggcgagctacggcgagggtggcggcggagagaggaggtctcgagggtccttataaagggctagagggcggcgatggagacccacggcaaccggtgacggcgatggaaggtttagtgttcgggaggaagaaggaatccgaatcgagctcgaatcccacgatttccaaacgaatttagatgacgattccaaaagagaaaagatagaggggatcccgaggatcatttcccctctattgattcgatcggatcggaaaaggagcggtcgaatttggaagggcggcggcggcggcttgcgcgcgttagggcgcggctgcggtgggaggaagatgacggccctgacaggtgggccccaccggtcagcgggagagagaggggagcgagcggcggctcggctcggcggactgggccgggcgcgattgggcggggagagaaagagaaggggttttgggccgactttcggcccaaagccaaaagaggacttttaaaacctttttcaatttaaattattcatgaaatgcaattccatttattaaaaatacttccttggctcaaataaatccccgaaaattctaggaactgtagaatcaaatgaagtatttaataaaattttatctagcccacttttatattggaatttattatttaaaattagatcttttcttctagacttttaaaatcatttctaataattccaattaagcaacaatttatatatttggggatttttagcgtgtgacaaacctaccccccttaaacagaatctcgtcctcgagatacagaagagctggcgaatagatgcggatgagctgattttaattcatcttctcgctcccaggtagcttcttcttccgagtgattactccattggaccttatagaaacggataactcgattcctggttcttctctcatctgtttccaggatatggattggtttctcaacatatgtcagatcctcttggatttctatctattcaagattagcttcttcagtgggtacccttaaacactttttcaactgtgacacatggaacacattatgaacacctgccaaggattggggtaactccaactgataagcaacctcgccacttcaactaacaatcttataaggtcccacaaaatgcggtgccaattttcctttggtgtgaaaacgatgaacccctcgaagaggcgtgacacgaaggtacacatgatctccttcctaaaaacttaaatccctgcggcgattatccgcataactcttgtgacgagactgagctatacgcaatttttcttgaatgatctttaccttctcttctgcttccgtcagaatatcagtcccgaaaacctgatgttctcccgtttgatcccacaaaagcagagtgcggcacttccgaccatacagtgcttcataaggagccatttaaagactagcttgataactgttgttgtacgagaattccgcgtatggcagattcttatcccaacttctaccgaagtctaaagcacaagctctcaacatgtcttccaaaatctgatttaccctttcggtttgtccgtctgtctgcgggtgataagcggtactgaagttcagcttggaacccatttcttcatgaagtttcttccaaaactttgaagtaaactggcaacctcgaccggatactattttcttaggcacaccgtgcaaacacacaatccttgccatatacaattccgccaaatgacttctggaatatgttgtcctcacagggatgaaatgagccactttggtaagcctgtcgactatcacccaaatagagtcatggcccgatgatgttctaggtagaccgatgatgaaatccatcccaatttcctcccacttccattttggtatctttaaaggctgcagcaaacctgcgggtttctgatgttctgccttgactcgctgacaaacatcacacacaactacatactctgctatctcacgcttcatacttgcccaccaaaatttctccttgagatcttggtacatcttggtattaccagggtgaatagagtataaagtgtcgtgagcttccttcagaattgcatctttcaactccttgttcctgggacacaaattctctcgcccatccatacggttccttgctcatcttccaaatacccgatagcctttcctcttctcatattcttcttgatctcttgaatatcaggatcattgacttgagattctctaacctgatcaatgagagtgggctttgcttctaatgctgctacgaaacctttactgacaattcccaaattcaatctttcaaattccttgcataattcccacgacaactgtcgtccttctgtagcactgcaatagcctttcctgctgagagcatctgctacaacattagcctttcctggttgataatgaattcccatgtcatagtccttaatcaattccaaccatctccgctgtctcatgttcagatccggctgggtaaagatatacttcaaactcttgtgatccgtgtacacctccgtacgagtaccaaagagatagtgacgccaaatcttcaatgcatgaaccactgcagctaactcaagatcatgagtagggtagttcttctcatgcggacgtaactgacgagatgcaaaggcaaccactttcccatcttgcatcagaacacaacctacccaaacttagatgcatcgccatacacttggaaacccttctttggatcaggcaaaatcaaaatgggtgctgatattaagcgatttttcaactcttgaaaactctgctcacattcttctgaccacttgtacttcacatctttctaaagcagtcgtgtcatgggcttagcaatcttggaaaaattctctataaacctccgttaatagcctgcaagacccaggaaactacgaatctctgaaactgtcttcgattgtttccagttggttacagattccacattactaggatcaacggcaactcctccggctgagatgacgtgtccaaggaactttacttcagacaaccaaaattcacatttgctaaacttggcatacaattgatgctctcgtagcttctctagtgcaaggcgaagatgttcttcatgctcctctttggttcgggagtagataagaatgtcatcaataaagaccaccacgaacttgtccaggtattccataaacaccttattcatcaagttcatgaagaaagcgggggcattggtaagtccaaaagacataacagtgcattcaaacaacccatatcgagtggtaaaagccgtcttaggtatatcttcctctttgatcctcaactggtgataccgtgatcgaagatcaatcttggagaaaacggtggcacctttaagctgatcaaacaaatcatcaatcctaggcagcgggtatttattcttgatagtcacctcatttagtgcacgatagtctacacacatcctctgggtatggtctttcttttccacaaagataactggagctccccatggagacgaacttggtctaatgtatcctttctgaagcaaatcatctacttgcctcttgacctctgctaattcattggctgccattctataaggtctcttatggatcggagttgttcctggtaccagatctattctgaattctatatctctcttaggtggcatgccaggtaaatcatccgggaacacatccgggtagtcccgtactatgggaatctcttccaaagttatttgattcagacttgaccttaaaggctcggaaggcaatgcatgaacagttacaacttgcccgtcattgttggtgagagttacttttctattggcatagtctatcacacctttatatctggttaaccagtccatccctaggatgacatcaaggtctttggattctaatagaataaggttggccagaaatggtacaccttgaatctctatactgacgttgtgatgagagtgcctggttactcggggtactaaccatcaaaggacgtctaagatcttctatctccatcccatgatttcccgcaaaactcaaagataaaaaggaatgtgtagcaccagaatcgaaaagcactgttgcaggaactgagttaacagggaacgtacccaaaatcacatctggagcaccttgggcttctgcagtagcaacatgattgacacgagcctttgtcgctggtgcggtggagttgttctaggcagggacaaccttcatgcggcggggcttcggacacttgtcagaataatgacctggctccccacagttaaagcacactcctagcttgttaccttgctccctcttggcaggctggtgctgggttggagttgcaacagggcgtggagcttggttgcggttgttgttgctagtattgttgttgaagaactgacgctgcggacgaacaacagacgaagatcctccctgcgacactgcctgaggtcccatagcaagacgcggcctctaactattcccctgttgagctttgaagtgagcaatcctgcgtttcttctgctccatacggttgtacttatcctcctagcgaatggccttatccaccaacttctggaaaatcatgataatccccagtcattaatgggtaagagagctcatcattcagtccttccaagaacttctcttgacgctcttcatcggtgcacacatcttccgaagcatagcgagccagacgattgaattcatgcaagtattcggtgacagagcgagatccctgagtgagtgccctgaattccttcttcttgagagacaccactcccgatggtatgtgcgtcttccggaaagcagcagtgaactcaagccaagtgattggttccacggtagtcctatttagacggaaatgatcccaccactcagaggtagggccatgaagctgatgtgacgcgaaggagactttttcttgatcggtgcactgaagcaggtccaacttcttttctatggcatgcagccaatcaccagcctcaactggattggtagtgctagaaaaagtgggcggcctcacacgaagaaattctgctaacttgttctggggaggtgcatggttgtttccctggttctgttggttctggagttgctgcatcatcatattcataacctgtgcctgttgagccaggacttgggcaagcgtgggattctctccattattgttgttggtggtgttgttgttgttggggccattcccattgctgcgagtaaacaccatctggcatagacaggagcacaagaagagaaacaggggaaaaactacttaggacaggaaattaattttttacaatcttgacttttattgatcttaactgagtttcattattacatatgtctgaagactctcacaccacaaaactcaccaacttcctaacactcgaaagcaaacaaacgcatgcacttacatcccaccaatgatgtaaaccacacgcaagacccacacacacaaccaaacttaaacaagcaaactaacacaacgatctaaggcaatgacttaacaagacatctaggtcttccgggcatcggagttgattgaaggctcgtttggctcgtccccatcatctcgagtagctccccactcgacctttgaatgggtgcgcttcgattcttctccatcatcatcacttacgttgacgatcggaggatccgctggggctgaggcggcttctttttccaccacacgaacctttggcgccaactggtagcgagggacaaatagagctctcttccttgcggtaagacgaaccctagctttttgtggtggtgcttctcccttcaatgcggctagttccttctccaaacgatccaccttgtcttccagcttgcaaatcttaccacgattccggccttcgcgatcttgagctgctaacataatctcagcgcaggtctcatccatggcccacagcatctcaaccaaatgcctggtggtagcatcattctcaatccctgcaggttcaaggtagctgccacggtcacttccctggggttggcgaggatgatagcgatactcagtgtcggccaactgatcattgtagctttcgcggagctctcctatggtgatccttgccacctcctgacaagcatgaatgtagcttccccctccagcctcgaacatcaccgatgggatatcttcacgattactgttcaaggtgactttgacatggcacttctcttcatcatgatcatgaggaatctgggcatacaaaggggcagtcccgaatcctatggcaaaggacaacgtacgcaactcctggacaaatccctcagtaccgaacaagtactcaggcttgaagcgcggcatctaaagacaagtgaaaggagggagttaagacatttatccaattaatagcacaagtttttggattaattgaataaagttagaaaatcaaagtgaagggtaaattaataaagtaaaccaatcttgcaagataagttgaaacagttgaaaacaggataacaaattttgcacttttgagtaacaggtttcaaatagaatgaaataaaagagagttataaaatcaacatgctaagttatgttgcaacatgattaaataaaattatgttataaaacttttactggtaaatgggccattagtacagtaatagatgtacagtactaacaacacaggaataataaataaattttgaatgagaacaattaaagggactataaactgcatgtgctattagcttgatttaattaaaagagaaagagaggagaacagttctacttttttaatatttttagagggcttctataggtaaccatttggcataacctagggtcaaggaggctctgataccaacttgtcactcccggaatttctatccaaaattccaaacgcttacatgtgtgtaaatcctcgtccagaaatcagccgaggcacataataacaaactgataatagagtacaattattattctaattaataagcgaatataatgtcattacagaggtagatagttcctctcaaaataagataaacggcgcagacgactccattccacaagcagctcaaccagggctacgcctaatcctccacaccatcaacatcactgtagaactcctcctctgatgaatgattgcaaggtgagtatatggcatactcagcaagccacgcagcaaatatgcaagtgcaagggatagcaaaggatggcataatatagtctcatttgcataaatagcatttaagaaatatttcagaatttaataaaacaatagagtatttaattaaacaatattaatccaacgctatacaacataccctgttgcataggcccaaccactctgaacaaccaatcgcggctgcacagttctatctccaaaccaggaatataccattccaaaccaggagctaaacaagttattacctattacagcatcattttttatggtgagaggtgtgaaactaatcacgaaagacattgttagacccgcccataaccgcgggcacggctattcgaatagttttactctggccagaggtgtaccactatacccacaagacacaacctcaacatcatgtcaaccatgcgtcgcgatacttaacaagtacccgaatagagattgtgataataccctctgcataacacaattcaaagcagtgcaccgttcccggatcataatcacccccttgtaaacaaggcatggactccccagcgacccccgtgggcttatctccgccacttcacagtctggtgctccgcaatgaaccatactatacaaaaagtaaagccgttgcccacgctggcttgtggttggcacgattaatgtttcacaaccgaaactcgtgagctggtccttaattgtcatgagcacgaccatcaaaaccatgtgctcacaacccaccattatcagattttagttggcacattaattaattaaccaatcacgattaaccatcgtgaactatcattaagccatcattaaataatagggaatcataagtatcccatttatatgagctagtgtctctaagcaaggctaagcatccgattcactttagctaaaaccatataatgttttagctaatccaattgttaaccaagtgacaaagaataggtaatcaataacaaaatggctataacaaggcaataggttatttccacccaatgacattcaaaaataaatacaatagttgaatagaaataatagctttagacgggatcaacatgctcaaagggtcttttgggatctgtgtgacttgccttgctggccttggaactcttcaaaatcttctcctgcaaactcggactctccgggaacgtcggaatctaagcagaaaagaacaaaatcaccaaaacagcacataaacactcatgaacagtacatgtgggtatttttaacatgtagatatcaattttagaaaaatttaaagacttgaaccaactaaatccgagctaagatgaatttttaaagattaaattggtttaaaccatttatatatattttaattgaattatgacgcgataaagaattatttttgaaaaggaaaagagatttattgcgtcagcgggctcgggtttacggtggaccaggtgcacgggacggtctaaggaaacgaacggccgagatcgaatcggtctaccgcggtctatggctgacgtcggcgatgacgtcaccaccggtggcggctcggccacgcacgctcgccggcgaacgacggcgcgatggcgcaaacggaaggcatctacgtgaagcgggcgacgcgacgaaccttaccgaggcacggacggcggcggatggcaaccggacggcgacaccgacgagtttgaattggcggtgacgatcgggtcgacgacgatggcggtgctccggcgatctttggcggaaacggaggggtggacgaggacggcgacgacctggcgaacccgacggtggccttcccgagcgatgacgatgactggagcggcggcggcgcacggttggacttgcggcggcgatggcggcgcacgacttgacacggctagagcactacgagtggcggcgagctacggcgagggtggcggcggagagaggaagtctcgagggtccttataaagggctagaggacggcgattgaggcccacggcgaccggcgacggcgatggaaggtttagggttcgggaggaaaaaggaatctgaatcgagctcgaatcccacgatttccaaacgaatttagatgacgattccgaaagagaaaagatatagggtatcccggggatcatttcccctctattgattcgatcggatcggaaaaggagcggtcgaatttggaagggcggtagcggcggcttgcgcgcattagggcgcggctgcggcgggaggaatacgactgccctgacaggtgggccccacctgtcagcgggagagagagagaggagcgagcggtggctcggcttggcggactgggccgggcgcgattgggccggggagagaaagagagggggttttgggccgactttcggcccaaagccaaaagaggacttttaaaacctttttcaatttaaattattcatgaaatgcaattccatttattaaaaatacttccttgccttaaataaatctcagaaaaatctaggaactatagaatcaaatgaagtatttaataaaattttatctagcccacttttatattggaatttattatttaaaattagatcttttcttctagacttttaaaatcatttctaataattccaattaagcaacaatttatacatttggggatttttagggtgtgacaaaacctatgggagttcttactgctgaccagtagaaagcattcaatgaggccactactctctttgtgggatgcattcttagcgttcttggcgatcgtctggtcgagctgtatatgcatatgaccgacgttaaggagctatgggatgcactgaataccaaatttggtgctactgatgctagcaatgatatgtacgtcacggagcagtttcatgactacaagatggttgacaactcttttgtagttgagcaggcccatgaaatacagaccatggtgttgacgcgaaaaacacacactggcctgggagatctgcttagctccagcgtaggtccaaaggttgatgagatacgggcataccagtcagtttgaccctgcaactgacaagatatacaaatagcagatcaatgagccgatcggctgacaagccgatagattaattccagccgatgccgataccggccgatagcgatagggtttcgagctatcggctatgtgttgatgtggagtctcacacttgatgtaaataatgacatatagaaaatcggctgatgatgatgtaataaattaacaatataatcgagtagaaaccaatcggctaataatgatatgatagaacaagtattgatccgaaggttaaagcatacatcggctggaggtccgatgtcattaaattcagaagattagataaacagtaaaatctttgttgctatcggctaaatccaataggtatgcaatccttgtaagccgatgcaacgtccagataactcatcagctgaaaccccgatgaaacccttattggcaatcaagaagcaggctagagattatggttctaagcacgacttagtagatcaaacttagctgatgcagcactaagtatgaaaagaatcataatatctagataatcaagtcgttgactgagtttttagggtggtagatgtctaagctaatctaatctagcaacatgatttagccgataccggtagaaatcctaaaatgagaagcagccgatagagctaaattgataagctaagactagattaacagatacatatgataaataggtaggcaaatatatcatgcaaaccagagcaatccaagaggtcgaatgtactgatgcagccctgaacgacgctgacatagacgatacaattgcctaggctggtagaacgtaggacttactccttcgctggagatcgaaccgaatcgatgcagccccgcgtcacgtgccaaattccgccggttgataagtaacaacctcggtaaagagggtgttgatgcgccgagagtagttgtattgatcgagagatattttacaatgaccccgggtgtatatatttatacccatagggagatattagtccttgtaggacaagaaagaaactttcctaaagataaaaagaaaacataaagtccttataggacactgaacacactttcctaaagataaaaggaaactaacaaactattcctaattaatagataagttgccatgccacatcctcctttaactcggacactactagataagcttcctttaatagattaatttccttaacagaatatagcaggaatccgactattggcgatgtgataattctcttaggggcctaccaaaatttgtcgttaacacatggctaaggaactcgaactccttaagtgtgtcttacccgaaaaatttgtggccgggtgcattattgtgaaactacctctatcttggagaggtttcggtactgcactcaaacacaagagataggaatactccgttgagaggttgatagagtctcttgatgttgaggagaaagctcgggaaaaagatgccgcgtctaaaggcaatggtgggcagtctagtgccaatgttgtgcacaaggccgaaaacaagagcaaagggaaatacaaagcccagcagaccaccaacttcaagaagaagaagaacaataacaatcctaaccaggatgagaggacttgctttgtgtgtggcctacctggtcatttggccaagaagtgcccacaacacaaggggatgaaggcacttgcagggcagacttcttagtctgcaaatgtgaccattagcaacaatggagatgtaagcgggtatggtaatttacctactgttttttcagttaatcagtctactaactagtgggttgatactggggccattgtacatgtttgtgctggcatctcattgttttcttcttatcaggtcgcacaagattccaccgtcttaattgggaatgggtcacatacttctgttcatagtgttggcacggtagatctgaagtttacttcgggaaagatcgtgcagctgaagaacgtgcaacatgaccctactatcgacaggaatcttgttagtggctcccgtctaactagagacggatttaagttggtttttgagtctaataaagtagtcgtgtctaaacatggatattttattggtaaaggttatgagtgcggaggcctgttccacatttccctttctgatttctaccataagtttgtgtcacatcctgattttcgtttcaggatttataaattatttaataaattattattagaatttatattaaatgttcattaatttacaagtgaagttaaatgtgggaaataaaatttcctaaatataaagcatggatggatttaatttttattaaattctccatggttaattatactctctggaattttctcagatttttcggagctcaactcttaattttaatcatacaaagaacatttcagtaattacccacatattaaattaatcattaaatggtctgattataatcttgttaagtactttgagtgtccaagtattttcaggattttacttgaaattacttgagcattggaagtatttttaacaattcaaagatcatttcagtgattaatttaattggaaaagttattaaaattcctcttttccttttcgggccgaaacaggaaaagtcctctctctttcttggcccaatctcctctcagcctgcagccctctccctccctctgtcgaagtctgctttgtgtccctctatcaatcgggccaagaagtagaagcccagcaacaaagtttaatttgcctccctgggcactgttcatcttcaacctctggcagccgaactgagaccgagttggctcggtttttctcctccaaatccaaccttttctcttgtgttttcctaaaattagttgaggggaaatcatctccaccttatcctctccctttcccctaaagtgtcggagattaattttgcctggataaaccaaatcgaattcgtttttgagtttatctctccaaactaaccctcggattttccggctcaaatcctctcgtttggagtccgatctctctagtccaagcctatataatgcatcccctcgacatcctcttccgtttgccccaagtcccaagcagagccgtcgcccgtagagttgccgccgcgttgttttagccgccgtcgggtgcgcacggaggagaggaatcccgtccaccccttcgcagccgccgaacaccatcggagcgccgtcgccgtcggggacccgagccaagccgccgtcgaacctcatcgctggccgtcgttcgtcgtcgtccgtcgttgttctttgcaccggtgagttcgcgtcgtcgtcctctacgcgtaggtgttctcggatagcccaaccgagctctcttttgccggtggtcgcgtggaagccgtgccatggccggcgatgatgtcattaatccttttttcttagttttctctattagttgaaaatcgattaaacttcggaaattcataactaaatcgtcgtaactcggatttgagtggttcaagttgctaaatttttctaaaatcaagatctacatgttaaaaatatcaacatgtactgtttatgcttgttttggtactgtttatttggtttttattagtctttttctttgttttgcgtgttagcttgtcgtttccgtcgttgcgaaggttcgtgcgtgcgttagaagtggtcaagaagattaattgaagaccgattattgcaaggcaagtcacacagatcctaaacacaatcctttgagcatgttgatcctatatttaaattctgtatttatttcaactgtgcatttattttcgaatgtcaccgggtggtgtgaacctattcctttgttatggccaatttgcattgaatgccctattccttgataccttaggtaataaattgattagcttgaaccttatgtattggtttggtcagctaaatgttatatatataattgcttggccatgcttagaaacattagctcactaatgggatgaatcatatatactacattattatttatggttatatttaatggtagctcacgatggttaatcatgttatgataattaattggtaattaaatatgattaatggtgggttgtgagcacttggttttgaaggtcgtgctcatggcaattaaggaccggttcgcgagctactgttgtgagacattaaccgtgccaaccacaagccagcgtgggcaatggctttaccttttgtatagcatgattcattgcggggtgccagactgagaagcggcgagaagtccgtgggggtcgctggggagtccatgcctctggttatatttatagagggggcgattataatccaggaatggtgcactatggtgagttgtgttgtgcgaagggtattgtcacgatttccccctttgcagtgccgtggtggtacttcggggcatggcaacatgtgtggaatcgtgtcttgtgggtacagtggtacatctctggccagagtaaaactattcgaatagccgtgcccgcggtcatgggcgggttgagcaatgtttttcgtgattagtcccacactattcattaatgataataatgtgataataaatttgactcctggtttggaatggtaaattcctggtttggaggtttgatctgtacgactggggttggttgttcagaattggttgggcctgagcagcatgggtgtgctgttcagtgttgattaaaatttctgattaattactctactatttcactactcttaaatctttactaaatgctgcttttgcaaatgagactatattatgccatcctttagtatccttgtgcacttgcatatttgctgtgtggcttgttgagtatgtcatatgctcattctggcaataatcaatcaacctcagttgaagagaaaggatccggaaagagcagacgtttggcttataccccagttgagctgcctgtgggagtggagctgaagtcatcgctagaccgttattccgctgctgttttcttttcttttgtaagtatctaaggcgttattattatgatggatttgtatattaaattgtcagtttgtgtacctcggctgattcctggacgaggattttatgcacaaataagttcggaaattactagtgaatttccgagcgtgacagtttgtgaatcatatttgtggcagtgtggatgatgaggctaatgtttggcactcatgcttaatggagagctggatgaggagatctatatggacattaagacagcttttcttaatagagagctgaatgaggagatctatatggatcaacatcaaatggacattaagacagcttttcttaatggagagctggatgaggagatctatatggatcaacctgatgggtttgtagttaaaggttaagaaggcaaggtgtgcaaattgttgaagtctttgtatagtctaaaacaagctcctaagcaagagcatgagaaatttgatagaacattgacatctgcaagcttcgcagtcaatgaggcagataaatgtgtgtactgttaggggtgggcattaaaaccgataatcgaagaccgaacccgaaaaaaccgaacccaaacccaaaaagaccgaactctcgggcatcggtcatttgttcgggtgtgacatctgaaagaccgaacaaacttcgaaagatttggtcatcgtgcaatactactcgaagaaaccgaggaccgaagaaaccaaatcaataccaatcactaagcagacaacgtgaccatcccatggaccaaaacagcccaacaacaaggtgaggcccaaatccacgtcaatgacccaatccccatgaccccaccattccattgaccgaagcactcctagccatagttaggccacgcgccgccggcgcgccacttatctcatcacatcgcatgtccccttccttccgcgccgctgtcttctgcagtgctgccgcatgctgctgctcgccggcattgccgcagtgtcacatacaatcgtgtggtcacgtggaagccataaggaggccacaggctgttggcttgctgatcctgcagcacagccgcatgccggccgctgcgccatcgcgtgccgtctgcgtcacgtggctgatttctgccgcgtcgtcgccttccgtcccgccaacacttgtcaccatgctagtggatatccgtcccatgtgactgagatggagccatggaggttttcaggagcaagaagacaagaagattgaagaggacgcacgttctggttcggacacctcggtttagaccgaagactgaaccgaattttcggttaaccgaagtagcggttagtaatttttgcttaacaacttcggtttcctgtttccaaagaccgaatttttaaaagaccgaactaaccggatcgaaatttcggtctagaccaaatgcccacccctatgtacggtcgccatggtggcggtaagggagttattttgctcttgtttgttgatagcatactgatatttgggacaaaccttgaggtgatgaatgaggttaaattattcttgtctcaaaatttcgatatgaaggatctgggagtacctgatgttattctaaatattaagctaattagaggtgagaatgagattacactcttgcagtcccattatgtggacaagatcttgaatcgctttggctacattgatagcaagccttctccaaagccttatgatcctagcttgtcgcttcgcaagaataagagaattgctaggaatcaattggaatactcccaaatcattggctcgcttatgtacctggctagtgcaactaggcttgacatctcctttgctgtcagaaagttgagccggtttacctctaacccgggagatgatcactggcatgcgctagagcgagtaatgcactatctgaaaggtactatggaattggggctttactatactgggtatcatgcggtactggatagatatagtgattctaattggatctctgatgtgtatgagatcaaagccactagtggatatgtcttcacactaggtggtgatgttgtttcgtggaggtcttgcaaacagaccattttgacgagttcaaccatggaagcagagctaacggtactggatactgctactgttgaggcataatggctgcgtgatctattaatggatctgcctattgtagaaaaaccagtgctagctattcttatgaactgtgaaaatcaaacggtaattgccaaagtaaacagttctaaggataacatgaaatcgtctagacatgtgaaaagacgattgaagtctgttaggaaattgagaaactccggggttataacattggattatatccaaacagctagaaacctggcagatcccttcacgaaggggctatcacgtaatgtgatagacaatgcatcgaaggagatgggtttaagacccatgtgagttatactatggtagtaaaccagtctatgtgatcgaagatcctgtgaattagaacctaggaagaacaagccattagttaactggaggagagtaccaatctataccctctctaagtgaagatgcatgtactctcgtgagctgcaaggcaggttggctatgccttaatgagttatgttggctttaattagcgaagatgttgtcccgcagagcattcctgaaagaactcacctttgtgagcttgactgttggtcacagtctatggagatttggggtgaatcttctaggaagcttactaaaagaccaaggagtatgacttacatgctccacctgagggatagtctacagacgatctagtcctagataagactctgagtgaaacttgcttgcacaagtgtcacgcccggaatttctatccaaaattccaaatgcttacatgtgtgtgaaccctcgtccaggaatcagccgaggcacacaataacaaattaataatagagtacaattattactctaattaataaacgaataaaatgtcattacagaggtagatagttcctctcaatcaataaagatctaagcagcggaaaaataagataaacggcgcagacgactccactccacaagcagcttgaccagggctacacctaatcctccacaccatcagcatcactgtagaactcctcctctgatgaatgattgcaaggtgagtatatgacatactcagcaagccacgcagcaaatatgcaagtgcacaggataacaaaggatggcatagtagggtttcatttgcataaacagcatttaataaacatttcagaatttaataaaatagttaagtagtaatttaaacaatattaatccaacgctatacaacataccctgttgcataggcccaaccattctgtacaaccaatcctggctgcacagttctatctccaaaccaggaatataccattccaaaccaggagctaatcaaattattaccagttatagcatcttttattatggtgagaagtgtgagactaatcacgaaagacattgttagacccgtccataaccgtgggcacggctattcgaatagttttactctggccagaggtgtaccactgtacccacaagacacagctccacaacatgtcaccatgtgcctcaataccaccacggtacctcggaaaggagctgtgacagtaccccacgcacaacacaatccaccacagcgcacctttcttggatcataatcacccccttataaacaaggcatggactccccagcgacccccgtgggcttatctctgccacttctcagtctggtgctccgcaatgaaccatgctatacaaaaggtaaagtcgttgcccacgctggcttgtggttggcacggttaatgtttcacaaccgaaactcgtgaaccggtccttaattgtcatgagcacgactctcaaaaccatgtgctcacaacccaccattatcaagttttagttggcaattcaattaattaaccaatcataattaaccatcatgagctatcattaaatatccatcattaagtaatagtgaaacattagttatcccaattgtgtgctaatgtttctaagcatggctaagcaatcatatctaatatctagctgaaccaatatataaagctcaactagtcaagttataataacccaaggtatcaaggaataaagtaatcaagaacaaaaggactataacaaacaataggttaattccacccaatgacattcgaaaataaatgcaatagttgaatagaaacaatagctttaaacgggatcaacatgttcaaagggttgtttgggatctgtgtgacttgccttgctgcccttggaactcttcaaattcttctcctgcgaaaacgaactctccggaaacgtcggaatctaaacagaaaagagcaaaaacaccaaaacagcacataaacaagcatgaacaatacatgtggatatttttaacatgtagatctcaattttagaaaaaattagagacttgaaccaactaaatccgagctaagatgaattagttatgaatttttagagattaaatcggattaaaacacttatatgggttttaattgaattatgacgcaataatgaattatttttgaaaaggaaaaaggggtttattgcatcagcggctagggtttgcggtggaccgggtgcacggcggcggctcacggaaacgaacggccgagatcgatcctaaccaaaacgaacggccgagatcgaccggtccacggccggaccacgacggatggcaacgatgacgtcagcggtgacgtcaccaccggcggcggctcgggcgcacaagctcgccggcgaaagatggcgcgacgacgcgaacggagggcaccagcacgtagagaacgacgcggcgaactcatcggtgaccaaaacggcggcggaagatcaacggacggcgacggcgtcgaggaagaagcggcggcaaccttcggcttgacgacgacggcggtgctccggcggtctacagcaacgatggaggggcggacgaggacggcaacgcgacggcgaccacgacggcggccttcccgagcgacggcgacgactggagcgacggcggcgcacggctggagcggcggcgacgacggcggcgcgaggctacacggtgctagggttctaccggcgacgagagacgaaggcgagggtggcggcaggtaacggcgggcttgggggtccttttataggggcaaggaggcggcggcaaaggcccacagcaaccggcgacggcgaaggaaggtgtagggttcggggagatagacgaatccgattcgagatcgaatccacggatttccaaacgattttagccgacgattccaaaagagaaaaggtagaggagatcccgaagatcatttcccctctattgatttcaccggaaaaggaaagaggcggccgaatttggaaagagacgacggcggcgcggcgctagggttcgggcggcggccggccggaggtagacgacaggcctgacaggtgggccccacttgtcagcggcagcgagcgcgcgcgggcggctcggcttgactgggccggcttgggccgaggaggagagagagagggttttgggccgactttcggcccaaagccaaaagaagacttttaaaaaacctttttcaatttaaattattcatgaaatgcaattccatttattaaaaatacttccttagctcaaataaatcccagaaaaatctaggaattatagaattaagcaaagtatttaatgaaattttatctggccccattttatattggaatttattaattaaaactagatcttctcttctaggcttttaaaataaattctaataattccaattaaacaacaatttatatatttaggatttttagggtgtgacagtagatctcccagcccacgtgttttctgtcaacacgcttttggcacgcccagtgggacctgtaagaagtcagacgtcagttcttcctcatggccgagaaacaaccaccaccaccatctagcccaggttctgttaaaggcaaggcattgaagttgggattgactgacatcattgaagaaaacgttatgccgatcgatccagagaaattcacgcctgagcagaaggaagagtttgaagcaacgttgcagcaagcacgggatcagtttctgaactcattcatgcagacccgcaaagggacacttgttcagaagtataaaataaaagtggttgctgatagtcctaggaccggttcttctaaagatggagaagtgaaacaagctccaggcggctcggctcagccgagtaccaaaggtgctaccaacggctctctaggcgatcaaggtgacaattctcaaggagttcatggcgttcaaggtgatggtgctcaggggccacaaggaggaaatcttaatcagaatagcgaagtagcgcaggactttttcaataacttccaagatcgggttgattacgccgtgcatcatgctttgatcaatcagtccagggtattagtcaataccttgtcaaacatgatgaagacaatagccgatagttcaatagctaagcatcaggccgcatgcccagtttatttgcaaggaggtgtcttcccaaattatcgatctttgatcaccgatgttcagccatctattcaagcagttccctccgttgcacccacaactcagccgacggcgccagtgtcaactcctctgcctgctacactagctatgacgccaggacagccggtgaaccctcagttgttaatgaggcaacagccacagcatggcgggcaagctgcgaatcggctgacccaagatcaagttgctgccatgtttctgccacctccacctattgttgatccagtgcagcagcagccgattcagcagacaccaccaatccagccggttgtgcaaccaatccaacaacaggtcgtacaaccagctcagcaaacaccaccaagccagcagcctctgcaaccaattcagcaaacaccaccaaggcagcagcctctgcagccgatccaacagactccattaaggcaacaaatcgttcagccgatttagcaccaggggtcaatgaacgcatcggctgggttcgcagcacctggtagttagcccatacaacaatttgtgaaccaagtcgtcccagaacatttggttcaccatgtacagccagacggcacagtaatgcctcaggttgttcctgagcacttggtgcgcaacatccaaccgaaccttcataattactaagggggtaacttgagttatcaatatcagcctccttccccgcaagcccaatatcagctagggggattggctcaaccccagttcgcatctcagcctccttccccgcaagcccaatatcagccagggggattggctcaaccccagttcgcatctcagtatggtcagtttgagcccatgcaacaacagccacaaggggcagctcagcaacgaccgtgggccgatgtgattgttgatgtaatgagagaacagtttgggcttaaaccaaaagagactggaagcttgtatcggcagccttaccctgagtagtttgagagagttcctcttcccaaccggtttaaagttccagatttctccaagttttcaggacaagagggcgtgtcgacttatgagcacattagtcgattccttgctcagtgtggtgaagcatcggctgtagacgctctgaaagttaggttattccggttatctctgtctggatcagcttttacttggttttcctctttgccatatgggtcgatcaatagttgggccgatttggagaagcaattccatagctatttctacagtggggttcatgagatgaagttgtcccacttgacagtgattaagcagcggcatgatgaacccgtgcacgagtatattcagaggttcagggagatgaggaacaaatgctttagtttgagtttaaatgatgctcagttagccgatttagccttccagggtatgattgctccaatcagggagaaattctcgtctgaagactttgatagcttatcatacagaaggtaaccttgcatgagcataggtcggcggaagtcaggaaaagctctaagaaggttaatcatgtttgtccgtatatgtatgggtcggatgatggggaagacgattctgaaatagctgcagccaaatgggtgaggagtaaaaaggtcataccatgccaatgggtaaaaattcctaaaaaagagaagtatgactttgatattaccaaagctgacaagatctttgatctactactccgagagaagcaaattcagcttcctgctggtcatacaatcccatcggctgaggaattgggcaaaaagaggtattgcaaatggcataattctggatctcattctactaatgattgcaaggtttttagacagcaaatccaggttgccactgaagggggaaagattaggttcgatgattccaaaaagccaatgaaagtcgatggtaatccttttcctgttaatatggtgcatacagctggccaaacagccgataggatccgtgcaaagggttttcaagtaaattcggctaagattatcaacaagtatcagaggaagtatgacaagtagcaggagaagcattatgaagaatacgacgatggttttgatcctcattggggttgtgagttctttagattcttctggaatgaagggatgaggttgccatctatcgaaaactgccctgggtgcagtgatatcatcgagagctcgagccggtcatataataagggtaatcggctaaggcaggcaagacttcctattcatcaaagattgggtccgatgaatcaagatcatggccaagaggatgaggtaatcaggaagaatcaatggtgtccttctggtattttcacaaaaaatcagaagagaagggttcaaagattgaggaacagggagcgccttcaggaggttgaacaagaaatcaaccatcggctgaggaaaccaaagccaagacaggagtggcgtgttaagaatcaggttcctgtagccgatgatgctgcagccgatgaggcgaagaggttggcaaaaggaaagagtgttgtagcggcaccaattaacatggtctttacattgccagctgaattcgggatagatcaagccgatgtcgatgaagtggaagaggaatcggctaagttggttctgtcaccagaataggcagtattcgagaaacccgagggaacatagaatcggcatcttaaaccattgtacataaacggctacgtcaatgggaaggcgatgtctaagatgatggtcgatggtggggccgcggtaaatttgatgccttatgctacgttcaggaagttggataggaacgccgaggatctcatcaagacaaatatggtgctcaaatactttggtggtaatccatcggaaaccaaaggtgttctaaatgtggagctgacagtcggcagtaagactattcctaccacgttttttgtcatcgatgggaagggttcgtgcagcttgttgcttggaagggattggattcacgccaattgttgcattccttcaactatgcatcaatgcttgattcaatggcaaggcgacaagatagagatcgtgccagtcgacaggtcagttaatgttgccagtgccgatttagccctttgggagatggatggccttgattgtttatctggaaaagtctgggatggagattttctaaaagtgtccgattctgatatacagccaattgaagatggagaacccaagctattactttgagggcgtcgtggagggttctaatgtctacaccaaggatacagtggatgatctcgatgacaagcaaggtcaaggtttcatgtcggccgatgagttggaagaaataaacataggtccaagcgatcggccaaggccgacatttattagcaagaatttgtctccagagtttagaaccaagctgatagagctcttaaaagagtttagagattgcttcgcttgggagtattatgagatgcctagactcagccgatcgattgtcgaacatcggctacctatcaagccaggggttagaccacgccagcaacctctgaggaggtgtaaagctgatatgcttgaacctgtcaaagctgagatcaaacgattgtatgatgctggttttatccgtccctgccgatatgctgaatgggtttctagtatagtttcagttattaaaaagaatggcaaggtcagggtgtgcattgattttcgagatttgaataaagccacaccaaaggactaatatccaatgccagtagctgatcagctagttgatgctgcatcaaggaacaaaattttgagttttatggatgggaacgcaggatataatcagatctttatggctgaagaagatatccataagacagcttttagatgccccggtgcaatcggcttatttgagtgggtcgtcatgactttcggtttgaagagtgctggagcaacatatcaaagagccatgaattatatatatcatgatctaatcagctggttggttgaagtttatattgacgatgtggttgttaagtctaaagaagtagaggaccacatagccgatttaaggaaggttttcgagagaaccaaaaaatatggcttgaagatgaatccgacaaaatgtgtttttggtgtgtcggccggccaatttttgggatttcttgttcatgaaagggggaccgaggtaactcaaaggagcgttaatgcgatcaagaagattcagcccctggaaaataagacagaactacaagagatgatcggcaagatttctaacttgtctggaaggttagagccttttacacccttgttaaggttgaaagccgatcagcagtttacttggggggcagagcaacaaaaggctttagataatattaaggagtatctcaactctcctcttgttttgatccctccacagaagggggtaccgtttaggttatatttatcggctggtgagaagtcaatcggctcagttttgattcaagagttggaagggaaggaacgagttgtattttatctcagtcgacggctcttggatgctgagactcggtattcccctgtggaaaagttatgcttgtgtctgtatttttcgtgtacaaggttgaggcattatctattatctaacgagtgcactgttatatgcaaagccgacgtagtcaggtatatgctatcggctccaatattaaagggaagagttggaaagtggatattctccttgactgagtttgatcttcggtatgagtcgccgaaagcgattaagggacaagctatagccgattttattgtagagcatcgtgatgattcaatcggctcggttgaaatagtgccatggactttattctttgatggatcggtatgtactcatagttgtggcatcggcttagttataatttcccctaggggggcatgtttcgagtttgcttatactattaaaccatatgcgaccaataatcaagctgagtatgaggcagtgctcaggggtttgcaattactcaaggaagttgaagccgataccattgaaatcatgggggattctttgctagtaatcagccaattggcaggagaatatgaatgcaagaacgatacattgatggtttataatgagaagtgccaggaactaatgaaagagtttcggctggttactttaaagcatgtatctcgagaacaaaatattgaagctaatgatttagcccaaggggcatcggggtataagccgatgatcaaagatgttaaagttgaaattgcagcgatgacagccgatgattggaggtaagatgtgcatcaatatttgagtaatccatctcaatcggcttctaggaaattaagatataaggcattaaagtatacactgttggatggtgaactttattatcagacgattgatggagtattacttaagtgcttaagtgccgatcaggctaaggttgcaatcggcaaagttcatgaaggaatctgtggtactcatcaatcagcttataagatgaagtggttgcttcggcgcgcagggtatttttggccaacaatgctggaagtttgtttcagatattataaggggtgtcaggattgtcagaagtttggagcaattcagcgagcgccagcgtcggctatgaatcctattattaagccatggccgttcagaggttggggaattgatatgatcggtatgataaacccaccatcgagtaaaggacataaatttatattggtggcaactgattatttcaccaagtgggtagaggcggttcctttgaagaaagttgattctggggatgccattcaatttgttcaggagtatataatctaccaatttggtcttcctcaaactattactacggatcagggttcaatcttcgtgtccgatgagtttgtttagcttgccgatagcgtcggtatcaaattgttgaattcttcaccttattatgcacaagctaatgggcaagccgaggcatctaataaaagtttgatcaaattgattaagcggaaaatttctgattatcctcggcaatggcatactcggttggccgaagcgttgtggtcttataggatggcttgtcatggatcaattcaagttcctccttacaaacttgtttatgggcatgaggctgttttgccatgggaggttagaatcggctctcgccgaactgagttacaaaacgatttaacagccgatgagtattacaaccttatggccgatgagagggaggatctggttcagtcacgattgcgagcccttgcgaaggttaccaaggataaggaacgtgttgctcggcattataataagaaagtggtacccaaagatttttcggaaggagaacttgtatggaagctgattttgcggattggtacttgtgatagtaaattcggcaagtggtcgccgaactgggaaggaccgttccaaattcataaggttgtgtctaagggagcatatatgttgcaagggcttgatggtgaagtctatgggcgagcactcaatggcaagtatttgaagaaatcttacccaagtgtttgggttaatgcatgataggctcgtattgccgatgcatgatagccgatgtgcttacatcgccttgagatggctgatattgttatatcgcccttagttgtttttcatggtgtaatcggttgtggtttgccgatgtacaatggccgatattcttatatcgcccttagttgtttttcatggtgtaatcggttgtggtttgccaatgtacaatggccgatattgttatatcgcccatagttgttttataattttatcaatgcttttgacattgtaaaattaggggggcacatatatgtcaaaatgcaatggaaaatttttgaacaagttttcaaagtcatattaatcggcacaaaggattgttaagacagtacagtattagaatgtcttagccgattacaaaaaattctaagtcctattacacaaaggttattgagacaagtatcgctggatagccaatatagccttctgcctaatctattctacttcttctatggcttgggcatcttgagcgtcggttccagggataactttcagagacttggtcagatcagcaacatgcttgatagccgatttgagtcttgctttctgttcttcaatagtatttgggagatcggctagttttttgtgctccatatccagctcagcgttgcattcttcaagttgtgctaagagttcaatcttgcgagcctcgagccgatcaatgttggacttgattgggccttcagatagttgatcaagcttggacttctcttcatgcacaagttgtcggttagcttggatagtagcttcaatgtccttgcgctctcgccgttcggccagtcttaacttggctttctccagtttgaattagtgttgctcaaggtaaacggctggggtaaggatatcggctaactcatctgggattagagcctgaatctcatgtagccgagccctgattgagccacaatcaaccaccaagctatctagtgatgatgcctctagccgatcagagatactttccagagttttcttcacatcatcagataaagaggctaaggctttgcttgtggtatcttcttctccttcatcaagataatctctgatgttaaaagagaaaagatcggctaatacctgcagcaacgatttagaagcagttagaggttaaataggcatagccgatctgaatgtttgttgagacaaagagaaacttactgggacagcaggagcagttggttgttcttcttcctcaacgtgatgactccccacagccgaaggagtctggtcacttgacgattgctgtacagaaggagaaggaggaggaggaggctaaaaggaaacaagtgttagacagagtcggctgagaattaactaatgaaagttaaaattatcttactggtggagctagtttagatgttgttgcagccgatttcttcttcactgcagtcttctttttctgcaattataaaacttggaagtgatcggctataagacaaaataattatgaaagggattaaagagagatacttacccttgtaaagtgaacgggggcagaaggagttgggggcgtttgcttgggtgaagccgatggtgttctttctgtgtcactcatttcggctacagcctggtcaacatcttcgccaatttcctcttcatctaaggcttgttcaataaatggatccaaggcgggcagatcatcagccggcttatcagtcggtttggttttcttgaacttggcctttttctttggagccaagaccaaggtattcacggctgatggtctggttttccttttttggcctgcatcggctagttccctagttaggccgtgaaggagagttgaagtcttgggggcatgatagccgataacagggggagatagcccacctccattcagaattaaacccgaagcatactcaatattcttgccactattactttgatgaggaggggaggactctgttgtctgcaaagcaggagcaaaagattggtcaagtaatgaatcggctaattgactatgcaatttagtaatgacaaagtttacctggggtatgacgtcggggaacagatctgtcatatacatcgtagccgattgatgaaacagatgcagcttccattcaccccaccatctgtcaaagtttttgcttctaaatcctgccaactcaatattttcaatgctgcccagaggaggcccaggtaggttaagtagccgatccatcattagagtggatgtgatttgtcctcggcactgaatcttgtcggcaaaaaataagccgattgggagttggcccaatccaagttgtctggccgagctcattgggtgataaaactcgtaggagtcttggatgtttctcccttgatgaatgccgacaggaaggatgcatgggttgattgcggctataaaaacttctctggatttttggaatttcttgtgattaatatcttcgaatctaaaatctgatggaagttcgaggtctgcggagtcttcataagggaaccagattcgtgcatctttcttaaaaccttcgtagaagctacagaaccagtccttaagcagctcggccgataactttgctcctgcatcggttggtgtggatgcatattctccatacgacatgcacctgcgatgggtgcgctcttctccgtcatcttccacgatcggccctggcagtgtgaattcagcttctgttatagagggccgattgacaaccttcataactatcaggtttaaccaagtttgcagcagccaccagggtccacctgctccaaccactgagccgacggctattctagccgatgcattgttcaacatctgatacagatagccgagaaggattttgcccaaagggaattctttctttgattctaaggcttcagctacgaactgccaattggttgtagggccacaactggatccacagaagaggaacttttccagccacatgagcaaaaaggctacgtgctctcgaggggtaacagatccttggcccatgtatgccgccacatagccgaaccaaccacctatgctcttggtcttcaagtcaaattggttcttgatatttatgctcatggggttagccgatgaagtcacatctaatccggtaatcatggtgatgtcgattaaagttggagtcatcggcccctggttgaataagaaagcgttgatggtgttcgaccagaagtaggtggcggcagccattagaggttcatccttagcagaattggctatggtgagagcaagtgcttggccgattccaatctcgtcccaatgaactttcttactagccgcgttgataccaagtagaccagctcttatcaggtgtgagtttttcgagagatggccaagacttaaaggtattcttccagtgacccaagttagggttggctagcctaaaagggatccggttggtttcaccaatgatgaaatcagtggggtcgagattgccgattgggccaaggaaatagtggttctggtgcaaaagactgggaattgcgacttggtgggagagatgctacaaatccaaggcaatcgatataaggaaaacgatataagataggagaaaatcgatctgctgataagaaaggggatctagccgatagagacttacctcagtgtactcggttgatggcgcatcagatgggttggtggaagacgacatcgttgcaggcggaggtcttgccggagacgaagtcgcccgggagtcgcttttgcatcggaggaatcgccggagagagaggggattaagattcgcttgagcggtgaaaacggaagtcacggtgtgagatttctcgagggtgacggttagtatttaaagcacggcaataacggtcggaaaacggcaaagtgcgaaacttcgtcggagtcgatttacagcaaatccgaaacatttccaaatattccggacttgggggcgtgtgttaacaaccaaatttggtaacatcggcattgggaaagaagattagatcgaagcaaagtcggaggcggagatcgagttcgaaaacagagcaggaatcggctggagtccagatcggctacgatgagatcggctgagtctgagacgggctaggtgagccgatgtagccgatcccgacaatacgacttgtatacgacatcgggtttaagttaatgtgcttcaagatgattgccatgcacggatagagtcctgggaaggcaattgtatctattaattaagatattttatgtaaattccttatagataaatgtgggcaaaagtctaccgcaaagacttatggtattttagggtttgttagatataatagtcgtgtccggtatgggtatatcttgtaattctcgggtataaatagaccccgagccctatgtaattgataacacacacgttcaatacaattttggcgcatcgccacccttttgctttagttttgtttcgacgagttcttactttcgggttgagctgcatcggattcgatcttcaacaagaggtaaaacttgttatgatgacttatattctcgggattagtgcttccatctttatgacactctaatcttgtttatgtaattcgtcgagttatcatatatcttacataatctctggcaatatcgctatctaatctactatcggctaacatctgttagcagagggcaaccgattaggttagattttgacgttgatctagattatataagatatctaccactctatgaaacttctagcggcttgattgtctagatatcgttcttcttttcatacttaatgctatatcagttgagtttgatctattaagtcgtgcttagaatatcgatctttagcctgccttctagttgctgattagagtagcgtcggagtttcagccgatcttatctgatttaactatatttgttctatatgcttcattgacatgttaaatctgtcctttatatcgagatattgttgtatctaagtatattaggcctttgtttgatatattatacctgctttaatttcctgatatagagtagtatcggagtattagccgatacatgctagatctatctgatcggctatgctataaacatatatagtcctgttattgatatatatatttcgatctaagtgatttatactgtctcggcatggtgaccgatctatcccgatcacttgatttaagtatacatcgatataaggggtatatatcgttgatatctacagctgatcgagtagatttagttctttcttacttattcatgactgccgaccgatacacagatgacatcagctcaaagataaatgatatgtcatcggcatctagccgatcggctatcatttatagttttaatcacggtttctttgcttctatttcttgttgattacaggatcaaatcaattggcacgctcatacattcgaaggcgagctttggacctgcactggagttaagaagatctcccaggccacgtgttttttgtcaacagatttatgctattcgtagcttacgcgtatcccatcatcagcctgtcacgggcgctggggtcgtcgcgctcgcggtggctgcacaccagagccgctgctatgattacccacgctagagtcgccacgcctctaggttcgggatttgacgctgctattaacgtgcgggaagaactcaagatggggaatatgaaccctagagcgagaggaactctcccttcccctcctattagtttgcaaccgcctggtcagcatgacaacatggcaaatacggtccagtcagtctgccacgtgtgcaaaacctcctcgtgaaacagcctagggggttaaatggactggattataaggtttggggggctagataccccattttatagttctgggtactatatagactcttgggcatagtctagggggatttggacttttttctatccagtaaaagtactacttagaatataaaaatgaggaggaagagtctcttttagtagaatttttactaagctattatgcaaattgaagcgcgggaggaaaggagctggctgtggctggggagggggcaagtgcgggtgctcgtgcgctcgcgtggtggtttggcccccttagtctctcatctctcctctctacacacacacgcacacacgcgcgcgcgcgcacacacacacacacacatatatatatatatatatatacactttatataaatacgtataaattttgtatatacgtacacaaattatatatacatatataaagtacgtacatatattgtaatatgtatatgtatatgttttttatatagatatgtttaatgtataaaaagatatatacacatgtataatgatttataggtgcgtataaaaactttgtatacgtacataatttaaaaacaaaataactgagagaaaagaaccaaaagaaaaacatatcacaaactttatatacatacacataaaagtttgtataggtatgtattaaaaaagggtgaattggaaccatctagagaaaaaaaaaagagtgagaaagctgaaaaaaaaatataaaaaaaagaccacgtgcctctttcccacgctccgcccccttctccgcgcaagccacgtgactgcgccattagatagcctttttgccaacctagtatttcctcagctgctcagctcgtcagttgtcctataccacgtaatattgaaggagggatgacctcgaagctaatgccatctggatcggtctcagcttctcgtgccgtcgtgtatgcttaattatgtggagtatcttttatgattatgcacgtgacaaaactatatgcaaaaacaaaagactatatctaacgaggagaataattttgacgagctaatagacagagagaacagtgaaaggttattaaaacttggccgacaggaagcacgtggcgccggtggtacgtccgacgaaaggacggtacccccggctcgcagttataaaactagcagtacaaggtctgctcatattgatacagcagctacacagctagcaccactaataacgagcaagctagtcgtcagtggcgaatctataacgaaaatataggggtgctcctttctaatgcgttttaggaagtatggatgaaagcttgcatgtcatctaaatagttctaattaatttgaaaaaaaataacaatatgtattgatatgaaatatattactccataagtatataacttctacgagttacaacaaaaataacaaattaaattgaaaatagttatcgtacattcacaattatatttattttttttgcaacatgtagaagttgaattttaactttcatgtttgtggagtgatatatttcacattaatcatttttttaattttttgatgattatttagatgacatgcacaaaacgatgtgatatcccctcgagggataaaaacgctttcccatgatggaagacaatacgacaagggcacaaccacaaattcaataacacaattgttgataattgttggattactttgtgagtaaaaaccactcacttccctaatcccctgatcgttccatccattgaagtaggaaaaaaaaaagaaacaaaaactaatacagtagcttaataaggaaggtctagcagccaattagtccacttaatcacccatggatcgcgatatgttgtctttgtttgctccttccttgcgacctggttgatctgcacttatgctatacgctgcttctctcccgaaaccatgcggctgctgctggttctgccgagatggagctggggctcaagccccaacgagccccaacgagccccaacggtgaatccgcccctgctagtcgtagctagctagcgagtgaatcagtggagtgacgagagatctcgcgatggcgaaggcggtggtgctgccgctggttagcaagcttcaggaggtggccctgagcgaggggagggcgctggttggcgtcggcggcgagatcaaccgcctccgcgacaagctcatgtggctgatggccttcctccaggaggcggacccccagaggcgggcggccgacgccggcggcgagctcatgcgcgtgctcgtgcaccagacccgcgacgccgcgttcagcgccgaggacgccctcgacgactacgccgtccgcgtcgacctgtcccgctaccccggctggtcgcgcgccgccgtcggcttcctcgccggcatcaccacccagctgcgcgtccgccacaggctctccagcgacatcgcggccatccatgcccgctttgaggagatcgtcggcaacaaggacaagtacaggctggagggctctgcgccctcgtcgttgctgacgtggactgcctccgccgcctcctcgagtgaatcaatcctctggttagtcaaacacagtccttacacgatcgaaacgctctattcacttcatacgtcctccttccatactcgtaaagaaaatcgacaatatttaacaatataaattataaataactcagtcaaatcttgagaatataaattataaataactcttaagttattgtgtttaaaaatataaaaattatataaatagatttgtcttgaaaaaaactttcataaaaagtatacatatatcatttttcaataaatatttttatagaaacaagaagtcaaaattatattttgaagaccgtgttaatatcctaaacgacttcctttacgagtacgaatagagtactcgtacggggatacaagcgagctaagcggcgaacccgcttataaacaaaactagtgcataacccacgaattgactcataggttaccttctaagggtttgttcggcacctccttttcccaacccctctatctcgttttccgcgcacacgcttttttaaactgctaaaaggtgtattttttgcaaaaaatttatatacaaaagttgctaaacggaggaagtactcggttaattataattacatgctaatgcttcatgtctttgtatacgccattcaaaattccagtgaaagattcatatctcggggctgtgtttttttgggaggttgggaaccctcccatctgcacggaaatcggagcgatagattaacacgtgattaattaagtattagctattaaaaacttgaaaaatggattaatatgatttttaaagcaactttccattataaacttttgcaaaatgcgtaccttttagcagtttaaaaagcgtgcacgcgataaataaggaagatgagttagagttcatgggaaagaacacagctaggcttttccttggtttcaacgattaggcttagattttcgacacgggcgtgaaacgtgaaaaaccgttagcatatactctatgctaattattgaaaaaccactagagtaactaatctagtagcattaatttttttaaacttgaaaaaagttatttatttgatttttaaagatactccatagaaaaattttacaagaaacatatcgtttaatagttagaagcgtgcttacgaagaatatgaaaagtttataagaactcacacaagagtggttttctggatggcatggtaatatatatgtagtgaaacgttttctttatttttgtaaatccaaataaaggaaattatctttagacagttttttccccaaatacagtatagaatctcatgtgtacacacagagcttatgatcacatacacgcaacctaccaagtatttctgagaaattgagctgtcatatacacttaaaatataataacccataaatactaacatatcagtattgagtcggttacaacaatgcatggtagatcatttgtgatcatatggacaaatttggtatgatttaaatagaaatatgtaaatatcatcagttcattttttttatattacatgaagtcatttctcacatgagaaaaacttatttcactatatacagatgttaacacagatactctatacagcaattgtgtgtatgttcataatgcatgtatatagaagtcagtactttaaaaaaattgagaagaagtcgcttactacttaattaagattccaaattaaagtggttttagcattgtcacgcattagtaaagctacagtaaaattgtgcaaagttaattaggctcccatcggatggcctaatcagctaaagaaaaagccaaattttaaatttcatacttaattttgagattgattttcagatgttttcaacgtagtttctttttcaaccttggcttttaaatcacccagaacacatatataaaagttttacctacaaattcatttgtattccctaataagccgttttggcttattagagaaaaagccaaacgatggggaccttagtttagtactcccatccgttcccaagtagttattattataaattgtttagcatatattaatgtgttgggcaagaaataaccatagtaccttaatatttgattcatgtgttgttgggagtgagagggtggttaaaggtaggaaggaaaaactatatattgaggataactgaggtaacaaaaattactctgaagtaagttactctaaagtgataagtctttttagataaattacgaatccttaaacgacgaccagctatataggacggaaagagtatgataaaaaacagacttgttccgttttaaacgaacgtcgataagacctctttaattaatttgtttttatatcgattcttttgaactttttcttctgcaaagcttccggaattattattcaatctcttgcggggaattattattcgatctcttgcggggtacgggttgtttgcgatttggctgcatcactccgttgactgaccacaaaagtctcgtcaaatcacgtgtctggccagtaaggggatagcacatacttgcattcaaataaccttgttattaagacaaaacgaaataggaaaacttgccacttggactaaatgatatgcaccacttgtacttaaaagaacgacttacgtacctttagtctcaaattaaactttggtttcttttatgtcatctattcttcaacaagcaacttataagaatattctaaacacaacatcatctaactatcgcaacagtacgcatgatttacacccctaaacttctatactgaatattttacaccctccaaattttcaaattgaacgaattaccctctaaccaagccaagagcagtttgatgccaagtgatatacgcgtggtaaccgagccaggggattttttttttcaagaaaagtttaactagcccacgtgtatattcttcctcccaatccacttcctttctttctcccctttctctatttcttgtctcagttgcttcgagcacatgcctagctgttaaaaaaccggtcccaaaatcaccattggaaaccgaacatggaagaaacgccataggagatccaagcacgatgagaacaacgagacacgatatttgttaacgaggttcagccgaagcctacatccccggggcgctgattacaagcgctatttcccgatccagcatattaaaacgtatcagagttacaacgaccctcggccggacgccgcaggcggccgctccctctcgctatattaagtcatcatatggttacaacaggtctgactctctatttaagagagatcctaagatagagtccgactcttactctagacctaatgcctattacaactccaattcctaaattgtaacctactttgtacacatattcgacacaaaacactaacaaattccacatcggtgaatatgccacgtcaacctgaatttgtcccatgtatgaacctctgcttacccagacttgagttggttcctttttgccgttcatgttgagccgcccccgacgaaccttcacccggctcaccgttaacgagagaccttgctatccccgtaaattatctctcttgactccacccgcaacagggctccaccttctctcatatcactatagtcgtcttgccaagtgaaattaaatttcttcttagtggcacacagcagactccgcaaagaccttgttcaccttcactttccattttaagtttgagttgatctaatccatgatgtgataatacacgtatcaccaaaatagataaatcaaatacactagaaatgaagagaaccctttatgtatcctaaatatatcatgtactgtcaaacagtccgttgacactccaaatgatattcatctgctgctgcgtgggtcctactcgcatgctgcttgacaggtcgagtctccctgcactgcttttctgcccgaaccaatactttgacttaatatgacaccgttgcatagccaatgcaagaaattccttacacatggtctgaattgtagcatgcggga

SEQ ID NO: 7763 - DNA, 13483 bp, Oryza sativa
ggcctgggcctcggcctgcggccggcccaacaaaaagggggggggggaaaagaaaggagaaatgggccgacggcccatttgacaaaaaggaggaaaaaagaaaaagaaaaaggaaaaaggattttccctggaataaaatattgcttgctcaattttaattggttaaaattatttctagagctctgaaaattccactaaaaatcctgttaatgaattttgacatgtagaacttaagaaaaattccacatgtcaagtccgattattatttgcattactttcttagggttttctcctgatttcacctgcattttcttggggtcatttgaaaattacgattttggctagggaggaaaacttcggggtgtgacaaacctaccccccttaaacggaatctcggccccgagattcggaggagctggtgaagaggtgcggatgggcggctttcaactcatcttccctttcccaggttgcttcctcttccgaatgatgactccactgaacacggcaaaaccgggtaaccttgtttctggttctcctttcgctggtatcaagtatgcgaaccggcttctcaacataagttaggtcctcctggatatcaatgtgttccgaatccgcctgttcttcaggtacccttaaacacttctttaattgggacacgtggaacacgtcatggatgccgatcatgttggatggaagttctagctgataagcaacttctccccttcgttccaagattttgtatggtcccacgaagcgtggtgccaacttgcctttcgtctgaaaacgatgtactccccggagcggagtgacacgaagatacatgtaatctcctgcctcaaaagtgagctcccttcgacggttatccgcgtagctcttctgtcgagactgggcaatcctcaacctttccctgatgattctgactttctcttctgcttccgctaatacttctgttccgaacagttgacgttcgcctgtctgatcccagaagagaggtgtgcggcacttccggccgtataaagcttcaaacggtgccatctgtagactggcctggtagctgttgttgtacgagaattccgcatatggcaagcttttgtcccaagctccaccaaaatcaagagcgcaagctctcaacatatcttccaagatttgattgactcgctcggtctgaccatcagtttgcgggtgataggccgtgctgaagtttaaacgggtccccaattcttcctgcagtttctgccaaaactttgaggtgaactgactacctcggtcggatactatcttcctgggtaccccatgcaaacacatgatccttgcgaggtacaattctgccaatctctttcccgtataggtggtatgtactggtataaagtgagcaaccttagtgagtcgatccacgactacccagattgaatcatgtcccgatgatgtccggggcagtcccgttataaagtccattccgatctcctcccatttccattccgggatttgaagaggttggagtaaacctgctggtctttggtgctctgctttcactcattggcaaacatcgcagagtgcgacgaattcagctatttcccttctcatgctgacccaccaaaatttttctttaaggtcttggtacattttggtgctgcctgggtgaatggagtactgggtctgatgagcctcggtgagtatcagatccttcagttctttgtcgtcaggtacacacaatctttctcccatccagattgtgccatgctcatcttcgtggaaatcccgagcctttccgactctcatgttctttttcagttctgctatttccggatcatttacttgagcggctctaacttgatccacgagcgtaggccgtgcctccagagcggctacaaacccgtgttcaacaattcccatgttgagatgttcaaactcctgccgcaattcctcacacatgccctcgatgcatagggcagtgcagtaacttttccggcttaaagcgtctgccaccacattggctttacccgggtggtagtgaatactcatgtcatagtctttgattagttccaaccatcttcgttgtcgaaggtttagatccggttgggtgaagatgtatttcagactcttatggtccgtatatacttcgcagcggttgccaatcagatagtgcctccagatcttcaaagcatgaaccactgctgccaattccaagtcatgagttggataatttccttcgtgtggacgcaactgccgcgaggcatacgcaaccactctgccctcttgcattaggacacatccaagtccgtgacgggatgcatcgcaatagacttggaagtctttcatctggtcgggcaggatcaaaaccggtgcggatactaatttcttcttgagctcctcaaaactcttatcgcactcagctgtccatttaaacttctcatctttcttaagcaactgagtcatgggtcgggcgattctggagaaattttcgatgaatcggcggtaataacctgccagtcctagaaaactccgaatctgcgacacggtcttaggtggggtccatttggtaactgactccacgttcgatgggtcgactgccacaccctgagctgtaatgacatgacccagaaattttacttccgtcaaccagaagtcacacttgctgaacttggcgtatagctggtgctccttcaacttttcgagtaccagacggagatgttgctcatgttcttcctcggattttgagtagataagtatgtcgtcgatgaataccacaacaaacttgtccagaaattccatgaacactttgttcatcagattcatgaagaatgcgggtgcgttggtaagtccgaaagacataaccgtgcactcatatagcccgtaccgagtggtgaaggccgtcttcggaatatcctcttcccggattctcagctggtggtagcctgatcgcaggtctatcttagaaaatactttagctcctttcagttgatcaaataaatcgtcgattcgcggcaaaggatatttattcttgattgtgacctcgttgagtgcgcgataatcaacgcacatcctcttcgtcttatcctttttctccacaaaaatgaccggagcgccccaaggtgaagtgcttggtcgtatgtaccctttctgcagctgctcatcaacttgcttcttgacctctgctaattcgttggccgccattctgtatggtctcttatagattggagcggttcccggtgccaagtcaatccggaattcaatctctctcttgggtggcatggtagtgaggtcttcggggaacacttctggatactcgcagactatgggtatatcttccaattttctcaagttcttctctacggtatccactgggatttccgtctcaatctgattcaacgagacccctttctttggtgagactagagatttgtacaccactgtttctcccttctcgttggtcaaggtgactgtgcgactcgcacaatcgatgactcccttaaacttggtcagccaatccatcccaagaatgacatctaggtctttggattcgagaagaatgaggttggctagaaatggtgatctttggatttctattagcactgaggggctaaaactgactgaggttgaactatttcccggggtatgaaccctcattggtgtgctaagctcttctttccttaacccatacctccccacaaatttctttgaaatgaaagaatgcgttgcaccagaatcaaaaagtactgttgcagggattgagttaacagggaacgtacccagtacgacctccggtgctgtttgtgcctcctccgcagatgcgtggttgacacgagcctggataaaccttggcccggcacgcctgggcttcgggcatttgtcagcgaagtggccaagctcgccacagttgaagcaggaccctggtgtcgcgaccgggaaaattgccttttcccgaacgctagtgtatcaatccccgtcccaggaaaagccggggtacaccatacaaacatgatataaaagacacatctttattatatcgataatatttacattattacaaaggcacttaaggcctgacaatcaaaaataaacagcagcggactagcgggcctacggctccatcttcacaggcgctcaactggggtataagccaggactccacctaagacatcttcttcaaagcttctcttactgaagaggggaaagattgagcaagaatgagtacaaccacagtactcagcaagccacaccggcagatgcatgattaatgcaagggggggtacaaggggataatataggggttaggttttgcagtaaacagcatttaaaagtcacttagttgcccaaagccattttataaagacgatcctagagctacacagtattattaaacaaggccgtgaaccctcacgaacctgccttaacccaaggcctacgatgattcagaccgaactggcaacccgaccctgggtcccagctcgtcccaagccaacccaggccaaccattccacattttagttgttgagcaaattttaagaattaaaacactgacttgggtacattgctcggcttgcccataaccgagggcgcggctattcgaatagattatactctgatcagaggtgtacatctttacccacaagacacatcttcctcgcgtgcaaccacgtgccacataccaccacggtatacggacggaagacgtgacataagttccaacccatcctaaccataaacaagagtaccgacccaatccccctacgggcgggacacccgggacaggcaagcaggactgaaccccctagcacagggcaccaaccctctgccatgacatctcgactaccgggccgcagctcgtgtagccttcatttgccctggagaatgtccatcgacccccgacttcatccatctccaatccgtgtacttttgtttataaccagactgagccacaaactaagccttacccactagacatgtggaagtacggtagtgctttgcaacagaggcccaagcttaatccttatagtacccgaggtacgactaacaaaacccaaccacgcacctcgagcccagcctaaaccattttgggggttttgaaaagagggggaggtgtgtgtccaattccaacataagccaaccattccatggtgtccaaatgatatgagaattcccgaagtctaaagttataaaaccacctaatgttgcctaattaatcagcgaagcatctacctaaatttatactagtggaaccatgaatataatgtccactagttagggttttgtttattctagggtgaacaaggtattaatatcaataacaataataataaggtcataacaaaggtaaataggcatggctaaataaaacagtgataacgcgggaatttaaataaagcgataatgcattaatttaaatcaaaataattttataaactgggattcaatatgctcaaggatgatgtgacttgccttgctcgctttcccaaacgccggcttcaacttccacgaagagcggatcttccgaagctgcagcgtctacacgaccaacggaaaagaaaaggcttttactctaataaactccacataacagcagaaacaaagcacaaaaatgggttcttgacttcttaaggaaaaattagagacttgaacggtccaattccgagttcaaatggccaagatatggccatttgaagtttatatgctctttaaatggatatttacgaatttcttcatttaaatttcaattaaaaaccgggtttattgcgtcagccgagggagagggcgcgcggaccgggtccacgggagtggggcccacgcgtcagcctctcggtccacggtggaccgggagcacgcggctggcggcggtcggcgccgtgggtcccacgcgtcagccgcacccgcgggcgcgggcggctgacggccgggcccacttggcagccgcgagggcgcgcccgaaggcggcctcgccggcacggccgacgggaggcggcacgaccgcgccccgatggtcaccgccggcgaccaccggcgcggcggagcggcgcccgagagagcggagaggagagggaagcgaaagggacggtccacggctcaccccgagacacgaggacggcggagacgacgaacggagcggaggaacgcggcggcgcggttcgggatgacgagggcgacggtgctccggcggtcggcgggcgaaacgaaggagcggacggggtcgacgacgacgcggcgaagccgatggaggtgacgccgagtcgggaggaggcccggagcgacgtcggcggcgtaccggagctcggcggcgacggcggagagaaggtgcgacggtgcgagcacgaatccgacggcgagagcgagcggcgagcggcggaaacggaagagcgaagcacggggatcgaatatatagcaacgggagggggagagcgcggccggggagagaggaaaccgcgcgcggagatctcgggcgccattgaagacgccggcgaacttcgcgggatgaatccggacgaatccgagggagagagagagggaaaagagggggaaacgggagagggaaacgcggggaatgattcccccctcattatgtcgcgcggggacggcgggatgcggcggaatccgtggcggcggcggcgctagggcacgggcgagcggcgggagcggcgggaggaaggcgatgacaggtgggccccacccgtcagcgagggcggcgggcgggcccgcctgtcagcggcgcgcgcgcggggaggaggccgatgggccgcggggagaggagagagagggagggagagttgggccgagccggcccaagagaggaaggggggggaaaagaagacttttagagatttttctttttataaaccttttcaactttgtttatttcttctcaattattatttgtgctctgaaaattccactaaaatttgagggctctttttagaccaaggagaatttaacaaaaattctccgggtcacatttgaatttttcttgtacgtattttagtgtttgccaatttcttttcgaattttaattaattctattattccttttaaaagatgatttttatttcgggatgaatttatcaggacgtgacactggttttgctcccgtctccttcttggcttgcgcgggctggcctgactgtgccggtgccattggtgggcgtggagctgtaccgcggttgggctgacttccatggtagttttgactgccactggtgccctggtggaagttgctagggttgaacgggcggtgctggcggacgatcatggtggtaggtccaccctgctgcccgggagtgaagcgcggcctctggtgacttccctgatgtgccctgaactgagcggccttcctcttcctgtccatcttgttgcgttggtcctcctgacggattgccttgtcgaccagcctctcaaagtcagcgtagtccccagatatcagttggttggtcagctcatcatccaaacccgccatgaacttctcctgcttctcggcgtcggtgcggacatcctctggtgcatatcgcgcgaggcgattgaactcgtggaggtactctgtcacagtcctgttgccctgatggagcgcccggaattccctcttcttttgtgccacgaccccgtctggcacctgtgccttcctgaagctacggcagaactctgcccatgtgacttcagtacccggtgggcgggtggccatgtggttgtcccaccaagctgacacaggaccctgaagctggtgtgtggcaaaagcgaccttctcctgatcattgcactgcaggagattcagcttcttctctattgcatggagccagtcattcgcctccatggggttggtggtgctggagaaggtgggtggcctgacgcgtagaaattctggcaacttggactgagggggagggggaccaaactgctggtgctgctgttcggcgtgctgcatcatcctctggtgcatctgctggtgctgctgctgcatctgctgcatcatggctgccatcatctgagtttgatgtgccataacttgggcaagggtcggattctcgggaagtggtggcggaccattgccagaatcactgttggggtgcacaccatcagcgcgttcttcgccgttgctgccctcgcctgtcgtgcggttgccagtcctggtgtagaccatctggagggaagagcagatgggggaaaagaagaaaaacagatgctcaagaactaagctttattacaaaggaattaaaactgcaattgttctgatctgaattaaaaacacttaaaagaacaagcaaacatccttattaagacagccatatcataggcacatgatatcgaccgtcaactgaccccaaacaagcaacctaaacacacaaactaacaaccagaagctagaccatcgataaactaatgggaaaacgagcctaatgctcggaacggctcctgcggtcggtggagtcgaaggcgtcctcctgctcgtcacccggtccctctgagcgactcctggagcctgacagatcagtctcgccgctgccactgggagtagcagacaaccaacctccggtaccattggctgaacctctggcggctgatgctggagcgaaggagagagtgaacgcgggagctggaactggagctgcaggaactgcgggcggaactgaaggtgctgcgggagctgctgctggaggtgggttcctgggcgcaagctggatgcgcacaggtgcagtcgtcgtcttgcggggcatggtgcggatccggactcctcctggcgctggaagaccctttagctgagcgttctccttcttcaggcgcgctatctcgtccttcagggcgacgatcctcatgagcttcccatcgttcaaggccttggtcgccttgtgcaggtccgagtgcatcctgtccaatcccctcatcacagcacacatgtgaccaaaggtggtgtcgttctcgccagctgtcggacggaaggagctgacgccatcaccatgggctcgacgggggtggtagcggtacgccgtgtcgtggaagatgtagtcgtggcgctcccgtagtctggccatcatcaagtaggccgcctcctgacaggcgtgatctgctgtgcctccagatgcctcgaccgccatgttagcgaggcaagtccccacgtagccatggacctccaagcggacacggtgaggaagctcgccactgagcggcggaatcgtcgtgtactccggcgcgttgaggtagcccaccaccagtgtcatacgtgccaactctgccacgaaatcgatcatgccttctccgcggtggttgggtgggtgaccggccatctagagaagacaaaggagtaggatcaatgcatgctcaaatccaaatttaaataaagcaataaaagactcaaataagagaatcgaatagaagcgaaattttatgcatagatcattttgcatgagagcgaataaataagacagactcatataacgacaaagtaatgagaaattagatacatattaataataacaaacgaagcataaacaccttgcaacccatgttatagagctaggacctaatgcatttcacccatcaaaccccaactgactgacgaataaatcccaataattttactaaaaccctagactgactcgttttgaaaaaccccacttaaacgagcgaccaagatttttcccttgaaccacaagaacagatcccaattttcccggaacaaatccaattgcaaagagcatatgcaatgaaaaggattcagagggctcttaggtttagagggctcttaggtttccatttggcttgtcctacggtcaaggtcggctctgataccaacttgtcacgcccagaaattcccgaatagaattccaagcagaatgtgcattaaaatccccgtccaggaccagccggggtacacaaacgacaatgttgacattcagatccacgtcttacaaacatcataaaagtcttacaaaaaatgcagcggaaaacaaaaggaactggagctaagccttgactaaactgcagcgggaacaccactccacaggcatcctcgacggcacggacgaagcctactcctcggggaaaccttcatctgacacatacccgtcctctggggttgggaaaaagtagagcaagactgagtactacccactgtactcagcaagtcataccggaataggggtatgatgcagggaattaacaaagaagagctagagtggttcatttgcataaatactggcatttataaacaggaattgaatgcgaaaacggttgtaataattaagcagtattaaacatccgctgtccaacgctaacccacgttgcgacaggcccaaccatccacctaaactatccaaattcatcagattacactagggtgagactaatcacggtgaatctggttgaccgcccataaccgcgggcacggctattcgaatagttttactctgatcagaggtgtacaactgtacccacaagacacagccccacgacacgtttccgtgcgccgacatgccaccacgacatcccggaaagaggctgtgacaggaccattcgcataacccccctctaaccaagcacaccacacctcaggtttcacccccactcctcgcaaggcagcgggcagtcccctctcgtgcctaggtgaatccggaagccgcataggccgtcgcagggcccatccaaactccatcacgcccacccttgcctggatgcgtcggctagaggaaagctacactacaagcccagccgttgcccacgctggcttgtggtaagtacgataagttctttcagggcatcccgcgaaccggtccttaactgccatgggtgcgaccagcaaaaccatgcacccacagcccaccatgtgattcattttaattaaccaacaccagagcggtggtactaatccaacattaccattagaaccaacagtctaaacattaatatgattttccccattgtgaactagttgaactaagcatggctaagcaattcctagtccaaactctaatcatgttataaccccaagctaacaaaggagcatggtatcaaaatagtatggctgtaacaataggtaaccatcccatagtaatattgcaaaacaaatgcgatatttgaaggaaaacattaggacatttgcaatataggatcaatatgatcaagtgacaagcatgacttgccttgctctgctgctggagggacctcggcgactatctcgaagtacaccggaacgtcggaggaatcggaatctaacgacatacaaagcaaacattgcaaacaggctataagactactgaaacagagaacaaaaccatttttaatggattctacacaatttccttgatttactgagacttgaatgggattaaacggagctcggatgaattagttatgaattttagaagattcactgtgtttattactataacaaaaatccttaaataatttattgcgcaataaattccagggctgacgtcagcacgggggtgcggcgccgacatgcggggcccaccggtcagcggcccgggagagagagaaaggggtggcggcgcgcgggcccactgtcagcggcacgggaggtggaaggggcggcggcgccacgtggcggccgaaccgacggccccgatctacccaagggtagatcggacggcggcgggagctcgcggtcggggcgcgcgggcgcggcgcaagccgaaccggcgaccatggcgccggcggcgcggcgctcacgcggcggcggcgcgcatgcggcagcggcgcaaggcgacggccgacggcgaccgaccggcggcggagagcggcggctagaggaggagcggcggctacacagctaggcggcggtgcggcggttaaacggtgcgggagagagagagaaaacgaggaggagggtctcaccgacaacggtcgacgacggcgggcgtcggaggacgatgacgacggcgggacgagctccggagcctcctaacgaacaaaaggagaggggttagagagggagggaagggcgcgagagggcgagggcgccggccgaaggcggcggccatggcgtcactcaccggcgcacgacggggttgggtctccggcggcgaacctcagcggaggaggggtggacgaggtagatctcgaccgcgcgaagctaacggcgacgacggcgcaaggcggcggcgagcctagcggcggctagcggcggccgaagtagcaaaaacggcggcggcgggtggttgcacggcgcgggagcgatggggagctcgggagaggtcggcgcaatggggaaaaagtgagagggagtgccggcgatgcttaaatagggggagagagggccggacgtggccgggagcggcgggaatcgccggccgacgcgggggagtggggaggagagagaggcgggattcggttttcgaatcccggccatctcgggcgcgggcgcgagcgggagagagaggggaatgggcgcggagggcgcggcgcacgcgcggacgtggccgacgtggcccgggggaggcggaggcgtgggcgcggcggccgttacgggtgcggcggcgcgagcgggaaaggcgggaggtgggagacgggtccgacaggtgggtcccacctgtcggcgaccccagaagggagggaggcgggcggccggctgccgggctgggcctcggcctgcggccggcccaacagagaggggggggaaaagaaaggagaaatgggccgacggcccatttgacaaaaaggaggaaaaaagaaaaagaaaaaggaaaaaggattttccctggaataaaatattgcttgctcaattttaattggttaaaattatttctagagctctgaaaattccactaaaaatcctgttaatgaattttgacatgtagaacttaagaaaaattccacatgtcaagtccgattattatttgcattactttcttagggttttctcctgatttcacctgcattttcttggggtcatttgaaaattacgattttggctagggaggaaaacttcggggtgtgacaggatcgacgtcagcgagctttggaagcagggcgccgagcgcgtgatctcatcggccagcaagatgtcgaagggacaccggttttccgcacccctcaacagaatgcggttgccgcgatcacccttctcgacaccctcctcaaccaaaacgagctcaatcaatccgaccacgtcgtcaacatcttgaaccagacgaagaccatgattgcggcttcggtcccagttaactccgaaagcgtccacacgccgactggcagccgagttccccacttccgatctcatgactaccgtcatccaagcctcagcatcaccggcgcaggatccaaccgcaggagcaggggtcacgacgagcggtctgttcactcacctcccgaccttcatagggagcgccgagtggaacggcctcgctcaccacctcgtcgccgccccatcgatcttcgcgacacaatcatacagcgccgagcagctcgaggctaccatcactcgccggaccgccacgacgacgaccttgacggagtagcagccttcaccgacgacctgcgtcgagtggat

SEQ ID NO: 7764 - DNA, 6979 bp, Oryza sativa
gtccttccgactcggcgacccttctttcggtttcgccgagtggttgccgaccccgtccgccgttccgtttcgcccgccgaccgccggagcaccgtcgtcatcgtcatcccgagccgcgccgccgtcttcttccgctccggccgccgttctcgtcgtcgtcgttgtcccggggtgagccgaggaccgccgttcgccttcccccttccctcctctctctcgggtgccgctccgccgcgccggtggtcgccggcggtgaccatcggggcgcgggcgcgtccccctcccttcggccgcgccggcgaggccgccttcgggcgcgccccgcggctgccaggtggggcccggccgtcagccgcccgcgcccgcgggtgcggctgacgcgtgggacccacggcgccgaccgccgccagccgcgtgcgcccggtccaccgtggaccgtggggctgacgcgtgggccccacttcccgtggacccggtccgcgcgcccgctccctcggctgacgcaataaataggatttttaattgaaaattaaatgaagaaattcgcaaatatccatttaaagagcatataaacttcaaatggccatatcttggccatttgaactcggaattggaccgttcaagtctctaatttttccttaagatgtaaagaacccatttttgtgctttgtttctgctgttatgtggagtttagtagtgtaaaagcccttttcttttccgttggtcgtgtagacgctgcagcttcggaagatccgctcttcgtggaagccgaagccgtcatttgggaaagcgagcaaggcaagtcacatcatccttgaacatattgaatcccagtttgtaaaattatgttgatttaaattattgcattatcgctttatttaaattcccgcgttatcactgttttatttagccatgcctatttacctttgttatgaccatattattattgttattgttattattattaccttgttcaccctagaataaataaaaccccaactagtgggtactctattcatggttccactagtataaatttaggtagatgcttcgctgattaattaggcaacattaggtggttttataactttagacttgggatattctcatatcatttggacactatggaatggttggcttatgttggaattggacacacacctctcttcctctttcaaaacccctaaaacctgttttcggtggggtttgggtgcatgccagttatgggaagtagcaccccggccactataaggattaagctcgggcctctgttgcaaagcactaccgtacttccacatgtctaatgggtaaggcttagtttgtggctcagtctagtcttaaacaaaagtacacggattggagatggatgaagtcgggtgtcgatggacattctccagggcaaatgaaggctacacgagctgcggcccggtagtcgagatgtcatatggcagagggttggtgccctgctgctaggggctcagttctgcctgcctgtcccgggtatcccggccgtaggcaggattgggtcggtactcttgtttatggctaggatgggttggaaactatgtcacgtcttccgtctgtataccgtggtggtatgtggcgcgtggtaacacgtgaggaagatgtgtcttgtgggtaaagatgtacacctctgatcagagtaaatctattcgaatagccgagccctcggatatgggcaagccgagcaatgtacccaagtcagtgttataattcttaaaatttgctcaacaactaaaatgtggaatggttggcctgggttggcttgggacgagctggaacccaggtcgggttgccagttcggtccgaatcatcgtaggccttgggttaaggcaggttcgtgagggttcacggccttgtttaataatattgtgtagctctaggatcgtctttataaaataactttgggcaactaagtgacttttaaatgctgtttactgcaaaacctaacccctattattatccccttgtactctccttgcattaatcatgcatctgccggtgtggcttgctgggtactgtggttgtactcattcttgctcaatctttcccctcttcagtaagagaagctttggagaagatgtcttaggtggagtcctagcttataccccagttgagcgcctgtgaagatggagccgtaggcccgctagtccgctgctgtttatttttgattgtcaggccttaagtgcctttgtaataatgtaaatattatcgatataataaagatgtgtcttttatatcatgtttgtgtggtgtaccccggcttttcctgggacggggattaatacactagcgttcgggaaaaggcaattttcccggtcgcgacaagctggtatcagagccatctcgactgtaggataagccaagtggataaaacctaaggacatattttataaataaaactatttgcgaaagttcctcttttcttcttcccctaatgctatttgcaaaaggtttacccttttcttccttcttcaaatttcaactagtactagatggtcagctttgcgaagaagaagatgtcgtcagttgtttgccgaagctccggaaggctgcaggatccgctagcgaagcgaaggaagcagtgaagccagctgtgaagcaggagtgaagatcttggagaacccgtcgcagaacctaagccaccctctagtgtttcgtttgtcgtatgtttccttgcttgtgtgtgtagcgcgtggtttgcatcggtgggtggtgatgtaaccatgctaggttgtttgcttaatcaacttgcagaataagcaaaacaaacaacacatcaacaaaaagagttagttcctttaaggtcctgtccctagctctggtctattctttccttgtatgcttcctctctcaacccctaccttgtgacagatggataacactggtaacaaaggctatgggaatgatggatccgatgactcaagaacccaagccaatgggaatgagaaaagcatcaacgaaacctcaccagagctaatccaaattgtggttaaccaaaccaacatgttggcaacagcctttcaactattacagaatcggaacaacccagcaggggcaaccaacgttcaagtacctacagtccagcaacagtgcaagttatcagaatttctcaaaacggggcctccaacctttgccattgccgtcgatcctatggaagccagtgattggttgcgcacaatcgagaagaagctagggttgattcagtgcaccgaccaggagcgggttggcttcgcaactcatcagctggttggaccggcttcagagtggtgggatagctacgaaacatcacggccagaaggacatgccatcacctggaacgagttttcatctgtattcaagagatcacatgttcccgcaggaatgatcacactaagaaaacgagagtttcgctacctgaagcaaggagatttgaccgtcacagagtacctgcacgagttctatcgtttggctcactatgcaccagaagacgtggaaacggatgaaggcaaacaagagaagtttctccaggggttaaaagatgagctcgcagtgcaactactcctagaggattatgaagattttgagaaacttgtggacaaagccatgcaactcgaaagtgagcataatcggatgacgaactgcaagagaaggattgtcaacatcccagtaattccaggtggtaaccaaagacagcgcactgagccacttcagatcaccggatcttctgttgtgcatcaagagttcctgccccaagaagatgaacgcaatgcagacaacaacactagcaatactaatgatgatgataccaccaacaaccatggttcttgccccattagtgaccactcgaacaaagcgtgcaatgtcagtagcattcaccaagatgtcaacgatagtatcaatgttggaacccagaatgacaaccttagcaattttgactctgggaaggactccaatggtgatagcaataatggtaccactgatgccaatgttagcaaggattcccaaccaccaattccaactccaagtcaaaatgatcgtccccagatggacagctcagtaaagaagacgttgatttgttacaactgcaaagaaccaggtcatttctctagagattgtccacagccgaagcgtaacctgcgccatcactccggccattatgcaagaagaagacaagtcactcgccttgtggtcactggagcaaacgccatacctgtgaggcctcatgttaattctaacccatagtagatacaatgtaccgatgttaagcaccttccctttttgtttaaagcagtgcctcgtattcatgtaatatgggagaaatttgtaataaaaacaagctctaagaggattcttttggaagatgcggatatgtgatcatgtgtataattgtttactgacaaaggagacctagggtctcgtgccagaggaactacattctaacctcgagctaatcaccaacctgaggatggaaaagaaaatcaagtgattaaccaaagagacatttgtttggactaagagtttcagatgtgtctttttcggatcaaaggcaatgacagtcagtatagcttttggcgaaacacttcaaggtttcactgaaaggcagcaagccaaaggacctcatcatccccagaagcgtccgcaatccacattaaagaataccccctgttagagataagccgaaagaagattgataaaagagattggcaaagatgttctctagcatgaaagaagtaggccgaaaggtgattgataaacagaaacatgctctgcatcgctcaaggaagacccctaattgtaattgccccacaacagccaccttgtcattaagtaagcaagatgacctaggtaaaagtgtttctatgaaggcaaggggtgaagtcttcaactcggtatcagatgctacacggagtgaaaagtgcaagccccggttaccaggcgacgccatgtcttgggagatgatccaatgggaaagaacacatcaaggctgaaggtgcacaggaatacgttgaatgctaaatgatgacaacatgaagagaatagcggaaagtaaactgaacataaagaaagtgaatctgcgttgcttgttcgtgggagctattcccagttatgaatcaggtgatacgttcgaagatagtctacagaggtcagacaacgaagcttcagatttggcaggataacgatcaaacaataagaagtccagcagtaaagccatttggggagacgccaaagcatgtcaagtgggagaagttggttcggttgagaaacataattcaaaggcaaagttatcgaccctcgcatcgaatagcagaagtagctagcacccggagaccaggaaagctaatatgaggcagtttgtggcaagttagaagtaaatgacaagcctgatatccttatgacgacaagctggtatcacaagcatggtatcctagtaatgtcgagctgatctcgacgcatgacatgaagtgggtaacttgtatgaggttgactccaaagatgtgaactatgcaaagttctggaactgaagccccatcttcaagtgccgcaacccagtcgaagtcagctaaaggttcaaccagggacaagtcaggtgaagagaagattccatccgcaataggagatcgagccaagcagtcccgagtggagaagttttgctaggcaagtttgttataaaagacgcaacggaagaagtcagacaagaagagaagaccgcccaacctatcttcttgctagcctcctcgaatctcggggacgagattcttgtaaggggggtggatttgtcacgtcctgataaattcatcccgaaataaaaatcatcttcaaaaaggaataatagaattaattaaaattcgaaaagaaattggcaaacactaaaacacgtacaagaaaaattcaaatgtgacccggagaatttttgttaaattctccttggtctaaaaggagccctcaaattttagtggaattttcagagcacaaataataagtgaaaagaaataaacaaagttaaaaaggttttataaaaagaaaaccctaaaagaagtcttttccccctcctcctcccttcttgggccggctcggcccattccctccctctctctctctctccccccccggcccatcggctccccgcgcgcgcgcgcgccgctgacaggcgggcccgcccgccactctcgctgacgggtggggcccacctgtcatctccctcctcccgccgcgccgccgcccgcccgtgccctagcgccgccgccgccgcggattgcgccgcatcccgccgtccccgcgcgcattaaagagaggggaatcactccccgcgtttccctctcccgattccccctcttttccctctctctctccctcggattcgtccggattcatcccgcgaagttcgccggcgtcttcaatggcgcccgagatctccgcgcgcggtttcctctctcttggccgcgctctccccctcccgttgctataaaatcgtccctcgtgcttcgctcttccgtttccgccgctcgccgctcgctctcgccgtcggtttcgtgcccgcgccgtgctcctctctctccgccgtcgccgtcgaccttcggttcgccgccgacgtcgctccggacgtccttccgactcggcgacccctccttcggcttcgccgagtggttgccgaccccgtccgccgctccgcttcgcccgccgaccgccggagcaccgtcgtcatcgtcatcccgagccgcgccgccgtcttcttccgctccggccgccgttctcgtcgtcgtcgttgtcccggggtgagccgaggaccgccgttcgccttcccccttccctcctctctctcgggtgccgctccgccgcgccggtggtcgccggcggtgaccatcggggcgcgggcgcgtccccctcccttcggccgcgccggcgaggccgccttcgggcgcgccccgcggctgccaggtggggcccggccgtcaaccgcccgcgcccgcgggttcgg

SEQ ID NO: 7765 - DNA, 1988 bp, Oryza sativa
cgccgtcgtcgctccggacctcctccccattcggcgtcacctccatcggcttcgccgcgtcgtcgtcgacctcgtccgctccttcgtttcgcccgccgaccgccggagcaccgtcgccctcgtcatcccgaaccgcgccgccgctttcctccactccggccgccgttctcgtcgtcgtcgttgtcccggggtgagccgaagaccgccgttcgctttcccccttctctccgctctctcgggcgccgctccgctgcgccggtggtcgccggcggtgaccatcggggcgcgggcgcgccgctcccgtcggccgcgccggcgaggccgccctcgggcgcgccctcgcggctgccaagtgggcccggccgtcagccgcccgcgcccgcgggtgcggctgacgcgtgggacccacggcgccgaccgccgccagccgcgtgctcccggtccaccgtggaccgagaggctgacgcgtgggccccactcccgtggacccggtccgcgcgccctctccctcggctgacgcaataaatgggtttttaattaaaatttaaatgaagaaattcgtaaatatccatttaaagagcatataaacttcaaatggccataacttggccatttgaactcggaattggaccgttcaagtctctaatttttccttaagaagtcaagaacccatttttgtgctttgttcctgcctgttgtatggagtttattagagtaaaagccttttcttttccgttggtcgtgtagacgctgcagcttcggaagatccgctcttcgtggaagttgaagccggcgtttgggaaagcgagcaaggcaagtcacatcatccttgagcatattgaatcccagtttataaaattattttgatttaaattattgcattatcgctttgtttaaattcccgcgttatcactgttttatttagccatgcctatttacctttgttatgacattattattgctattgttattattaccttgttcaccctagaataaacaaaaccccaactagtgggtactctattcatggttccactagtataaatttaggtggatgctttgctgaataattaggcaacattaggtggtttcataactttagactttgggaattctcatatcatttggacactatggaattgttggattatggtggaattggacatacacctctctttctctttcaaaacccctaaaacctgttttcggtggggtttgggtgcatgccagttatgggaagtagcaccccggccactataaggattaagctcgggcctctgttgcaaagcactaccgtactaaccacatgtctaatgggtaaggcttaactcggtgctcagtctagtcctgaacaaaaggacacggatagagatggatgaagtcgttgcgacgatggatatctctgaggcaaatgaaggctacgcgagctgcggctcggtagtcgagatgtctaggcaaatgaagactacacgggtcggtgcccgttagtcgagatgccatggcactggactagtacgcgggtggtctcacccctatgtgtgtggcgcacccggtctagatcttgttgctaggggctcaaccctggcctgcctgtcccgggataccggccgtaggcagggttgggtcggtacttttgttcacggctaggatgggtgaagggttatgtcacatctttacgacgggttccaaggccatggaatgcggagtaaagatgtgtcttgtgggtaaagatgtacacctctgatcagagtaaatctattcgaatagccgagccctcggatatgggcaagcctagcaatgtacccaagtcagtgttttaattcttaaaatttgctcaacaactaaaatatggaatggttggcccttttttggggcttgggacgagctggaacccaggtcgggttgccagttccgtccgattcatcgtaggccttgggttaaggcaggttcgtgagggtcacggccttgttttattatctgtgtagctc

SEQ ID NO: 7766 - DNA, 9338 bp, Oryza sativa
ccataatgaccggaagcatgatttttcatggcttacaacatatgcagaacaacattcaaaccctaaatgatggtaaagaaatggcctaggtacctaacaggttctcatcaagttatagtacagacagttaaactacatggatataatgccggcatgatgttcgcgatcctccacaagacaaacatcgctatactcacgttgatgattcgtggccattgacagtggctggtgcaggaatttcttgctcggtggtaggtgctgcagcacttccattctgtggaggaaaagtagcagaagcttcaaaaattgatttgtttgaaatatcaaggcatattgaagaagctacagagaccggaaaagagaatttgttggttgtaacaggatacagaaacttttaggacattatacttgatgcctgaaatgggccataacttaggctgtttctttcgaggaatcaatcacatatcgagggatgaggtggttatggaccaacacattccattcctcgaaccgaacaaaaaagtgagacttgggagtatctgatggtccattggccatccaattcctcaaaacaaaacaacccctaaaattcttaaatggccacatcattataagccatactgccgtcagaaacaaatgtaaactacagtatattgatgctgaagctagcctcaggctgccagtgcaaataaaggaaaacaagttcatatttaaccggcagtaaacaaaagccacagttataggacagctttcatattttgaataccaaggagagaagaaaataacatgcaaagatgcccaaccgtcagcattaaatcttcccatagctaaaccaattatgtgtcatgattttaagtttacaactatggattgaaagtcaaccagtcacaccagtgaccagtataacaggaaacaatatcagtatatcacactatctaatatcctcaaatttagaatggaatagctagagccacagttttttaatcccctggcaatggaccataacttgatttaccttcataaaagttaagaaaatattgagaagccattgtggaccaatattttgattaatttctccaaaattttcagcaactgcttaaaaatggctacaatcatcagtaagctagataacgaaacaaggattcaactcatctgagccaaagagtcatttcactttcaacttattgtgaaaattagaatcctcaaaaagtatgtaaatagatgtgcagctaatgggggaaaatgacttacaccatcattaactgatgccacaacttgaataggtgtgggaggtgcttttgataggtccctcaacatcccctacaaaaaaaaaaaagagatttgtttttagtagaaaaacagagattccacatttatgaggtaaggtgtcaaaaatttaaagataagatctaagtactttgatcacttgatgtatggattactaaaaacaaacagaaagagaaagcaatgtgaagcatagtttaaaagacccatgctttcagtgtaagtgtataacagaccatttatggatttggattatggattaccaacaatttcctgtgtttgtcaacaaataaagtttaaaactcttattgccaattaacaaaatgctcagctatgaaactttccatgcaccaggaagcacatcagattgttaagactaatattaatgatagtgtgaaacttgttcaagaacagacagaactcactaaatagattacatattcaaacatcagcaccatgcatctaacttcattgcattggattgtatactagaaacttcaacaaaactcatcccaacaacctatactcaaataacaaactgcataccaagttggcatgacaccttgaacttggcattttaaccttcaattgcatatatagatatacatagaaataagtcaagacaagtgtgagtaactggtgctttaaatatgtcacgataatagcttataaagtgcaaattaataatgtaacttaaacaatttcaacaaaaatgatcctagcaaaaaattgctgatagaatcttaatattaagtcggtcttcagttcttagaagttataatattttgctacatctatgatctatcacaaagtttgacttataagttataactcttgagtttctatgctgacttaaatctagctatgcaatggtactactaaacatttataggtaccttgtttgcccacatgaggccacaggcattgcataatgttcttggcccatcaggtccacgacgcatcataggtgtagcctttgcatttataccacagtgatggcatctgaaaaaaaaatagcaatcaccaaaatttataaatgatgtttcatatgcttagagaaaccacaatgataaaaaggtagtaataacctggcatacaccatacaaaaaagaagcatatttgcatgtatgataagtataacaaagatatctatatcaaacttacatgcaaattgttcaactaaagttagccaagtaaaaaatgggattgatccacagttcatagcatctatacaatgcaatacactagagcacacgattccaagcatggattgattgtcaacaccttgctaataaatatgtaaaggatgtttcacacatcaagaaatattgctggaaaagtcataaaccaagaaccaaaaaaaatgggatttttctctacttactcagcagcagagggaggccgaccttccactgatccccagtttggggagccatctgaagctgtcaattccgatgttgcttcatcaccctttggttttgaagatgtaaactgacctctattgcgctgcatcctacacatacatagaaaatattttaaactatgaagatttcctgtacataatctaagcagaggtaatttagaaaacatgaataacagcaaaatataaatcctactatctgccacggtaatatcaaaactgaaagtaaccacaagaaagacactgatacttaaaaaggtactacctccgtttcatattataagtcgctttgacactgatactttgatctttaagtttgactaagtttatataaaaatatagcaatattttcaacacaaaacaaacttattatcaaaatattgtaaatgttagttctaacaaaactaatttggtgttgtacatgttgctaaatttgtctataaacttggttaaacttgaagaagtttgactacgaaaaaagtcagaacgacttacaatatgaaacagagggagaatagcttaataaaagcagccagacaactcaaaactaaaacacgcttttggtacaaatacaatgtataagttgccaagtttagattatattattcagttcacttccactatattaagtacattgttagcagagtgtattactcacagatcaaatacagcacgcttgactcttcctaattcaggtcaatcagcattcaaataggaacaaaattctatagcatttcagtacgtataaacatccacagccaatgctaagctagcaccaacctaagtgcaacttccttccgaacagaataccggatcttcttatcaaagttgcgctccttccgcttttctctgaaccgcatcaaagatgccacccggtgtggaaaattcaacctctgaaaccaagggaaaaaaaatacacaatgaactccagagtgcacaatcctgtcaaacataatgaactgatactacaaagaaagacagttcaccatcacccgtgccaaccttactgtatggcgcagatgacgatgctccagagcccaaacctgggttcagctcccttccaccgagtagcaagagcactgcttgaacctgcgagaagtaatcgaacactcagcctttttttttttgcaacatcaatcccagtctataccgaaacacacatgacaaacaaacaaggccaagcgcatgagaggcaaacgaccttgtcaggggagacagagtcgaagacgtagacctcgccctggaacgagagggtgagttggttggacgccatgggctggacagcgccggaggcggcgagcatcccgccgtgcgggtccagctgcgcggcggcctccgcgtccatcgggacagccacctcgccgcccaccccctcatgatgttgcgcgtcctcatcctcctccatctcctcctcctcctcctccaactcatcctcctcctcctcatactcctcctccgcccccagggcgcggtgctcctcctcgaagcgggccatcgcctcggcctcggcggccaccgcggcgaggtggtcgaccgtgggcgcgacgtgcgccgccgcatcgtccgccggggccggaggaggggggcgctcggggccccggcgtggctggtagggcttgctgccgtcgtggtgggacatggcggaggttgggggtttgggtgggatcggatcggacgatggggatgcggggtgggtagaggtggccaaacgggcggcccggcccggcacggcacgggcacgggtccggcacggcccgtttcggcacggcccgttaggcatggctcatgaaacgggccgtgccgtcccgacccacgtgccgagccgccggcccaagcacggcccgtggatggccgggccgtgcccgtgccggcacggcatgcgtgtggcccgccgtgtcagtacgggcccgtgaatgaaaaatgggccgtggacggggcacggttggcccaggaaccgaaatggcgcggagggatgcgatgcggacttgcggaggtggctggcgggctgggccatcagctaggaggggtgctcaacggacttgcggaggcggctagcgggctgggccgtcagttgggagggatgagatacggacttgcggaaggatgagatgcggacttactacagtagccgtgccgtgccgtgccggcccgcgggctcggccggcggcccaagcacggcacggctactcgtgctgtgccggcacggcccgttactgtagcaggccgtgccgggccgtgccggctacaggttccgccgtgcctcgggccgcccgttttggcccggcccgtttggccacctctaggggtgggagagaaccctagcccctaggatttcgatctcctgctttccggtttggagggtggaaatggacacgaggagggagacgggtgacggcctgacgggtgaggggagagcgtaggactataggagggtgatgtggcagcatcacagccgtctgatctgctaccccctgtatatctatccctctgttttcaatctccttacactttcagaccaaaagcgaattatgatattgcttctcgtaaatcgttataaatatactaacgttttaagcttgtggtatgaagtagggtttaacttttcaatttcgaagtaaaaatcgattctcaccggtgtaccgaaatccaaccaaaatttggtaaaaaccgacgactttcggttagcgtcatacgaaaaccggctaatatcacccggttttcagcaatcttaaaaatttacaggattaagagtaaattgataaatataactgacaaaaataaaagaaaaaaaacaacagggtcagtaatttccataagacaatcatagcatccataacaacaagctgaacagattcgcaagaaaaaaaaacctaatgaaagaaccaactttttccgctgaaatgttcagccctatgaaagatttttcagtcaactttcagctcatgttgatgcaaaccatcttctcatgttgctgtaacaagaaaaattaaagatcaccgtgacggcatgacccacgaaaaactaaggggttgtttgactcatatactaacattgcatagggttgtcatagttttcttgccaagtttgtctaaggttaggccaacaaatttggcacgacacttcggctagtaatccacaaccttgctacattttcctgagacaatgacgcgtgggaccaaagtgctagaaaaaaaatctagccacaagtgtggcaatgaaccaaatgcatgactaacttattcaaaaagcttccttaagttgaggtgtggcaatatttggtcatgaaccaaacaacccctaaagacctatgaaagattttccgttcaacttttcacggttcaaacaactatgttgctgcgaagtgcaaaccatctcctttccatgcaaaaaagaggactttagagtcactgatacgttggtccatagcaaagaaaactcacatgtcagtgacttaggtgacttaatttgaacacgaaatgcatgctgcctccccagggccagagccgaacaagcatcatatagtagaaaacttaaaagaagaaaaaaataaatcatctgccataattacgaaaattaagtcattcaacgccaacaaattgtcgagacgaccattcagaagagttgaattgtccgcactttaaaattcagacgagaaaaggcaacatatatgtaaacaccgtactagaatttttttttcggttttgttctcccagttttgagtcagtcatttgaaattttagatctcaattgctgtacacaacgataaaagcaacacaagaatcatactagttgatcaggacttgaagatgaagatgaaggactgaggagtgaggactactctcgccgcatccaccgcgttgatctctctccagataagatgctctccggccggtgaggggacctccaccgcacatctcctcccagcctccaactcatccccgcgcaaactggatgtgggcactgggcagtgcctctagatctgcaagggcggctccaggaaggggatctggcggtggtcgttgggcacctcctcctggtctccaccacatccgtggcagcgtcttggggcgatgccttactacttcttcgtcagcgccgataccccttcccggcctcgtacgtgcaaccaggttggtggaggcagccgatggcactagggaagaaggtcaatagagggcatcatcgttgacacattgtagctcccatatcattgtggccttctgggtgggtgtcagcgggtggtgtggcgcgcgtggatgactggtgacagcggttgctgacgaaggaatggggttcggctgaacagggatttcgatcgaccgggagtgggggaacgctactagtgccaatgcgaatgaaaatgccgcctgggaataacattaaaaaaattacaaatatacctttttttgaatttataccgcaaaaatcaagtggaacatcaaatcaatatatattgttatatcgtttatactgctaatatatactagtacttgctatatggtgtatttctcgtaaaaagttatcgtcattcaaactttaaagaacgacgcacattgatgtcaactttcaccccatatcatggatgttccctggaaggaaaaattcaatagggattggatcgaccattcattcgacctggaaggctggaacacatgaagccattccagtagaaaaattaactctccaaatcttccatctgagcaaccagtactccactcagacacattgtgtgtgttcagtatgggtaagcccattctatcatgaggatacaacaaggcccaataaagggataggcatatactatagcaatgcacttcacagagtgcgcctcaaattgtttggtccgtcatgactagcagtggcagtaagcggcgacgtgatgtactagtggctgacggcgccggtaccagtgccagagaagatgagtaggggaatgcgagagaaggatgcgagagaagggaatgtgagagaaatgagttgtgcgctgtgttgctcagccaggagagaagggaatgcgagagaaaacgagttgtgcgctgtgttgctcagccaggagagaagggaatgcgagagaagatgagttgtgcactgtgttgctgtcacgctcagaaattcccgagtagaattccaagcagaatgtgcattaaaatccccgtccaggaccggccggggtacacaaacgacaatgttgacattcagatccatgtcttacaaacatcataaaagtcttacacaaatgcagcggaagaaaagaaagacaacaggagctaagccttgactagaactgcagcgggaacaccactccacaggcatcctcgacggcacggacgaagcctactcctcggagaaaccttcatctgacacatactcgagctctggggttgggaaaaaatagagcaagactgagtactacccactgtactcagcaagtcataccggaataggggtatgatgcagggaattatcaaagaagagctggagtggttcatttgcataaagcgagcatttataaacagaagttgaaagatttaaacagttgtaataattaatcaatattaactatccactgtccaacgctatcccacgttgcaacaggcccaaccatccacctaaactatccaatttcaaaagattacactagggtaagattaatcacggtgaatctggttgaccgcccataaccgcgggcacgactattcgaatatttttactctgatcagaggtgtacaactgtacccacaagacacagccccacgacacgtttccgtgcgccgacatgccaccacgacataccggaaagaggccatgacaggacccttcgcataaccccctctaaccaagcacaccacacctcaggtttcacccccactcctcgcaaagcagcgggcagtcccctctcatgcctaggtgaatccggaagccgcataggccgtcgcagggcccatccaaactccatcacgcccacccttgcctggatgcgtcggctagaggaaagctacgctacaagcccagccgttgcccacgctggcttgtggtaagtacgataagttcttccagggcatcccgcgaaccggtccttaactgccatgggtgcgaccagcgaaaccatgcacccacagcccaccatgtgatttattttaattaactaacaccaaagcggtggcactaatccaacaaaaccattagaaccaacagtctaaacattaataggattttccccattgtgaactagttgaactaagcatggctaagcaatccctagcccaatctctagtcatgttatgaccccaagttgacaaagggacatggtacaacaatagcatggttatgacaataggtaaacaccccatagtaacattataaaacaatgcaatatttgaaggaaaacaatagagcatttgcaatataggatcaacatgttcaagtgacaagcatgacttgccttgctctgctgctggaggaacctcggcgactatttcgaagtacaccggagcgttttgaggaaacggaatctagcgacatacaaggcaaacaatgcaaacaggctataagactactgaaacagggaacaaaaccatttttaatggattctacatatttttcttgatttactgagacttgaatgggcttaaac

SEQ ID NO: 7767 - DNA, 15766 bp, Oryza sativa
cattttgttctgcttggacactttcacacctttgaacactaactctttcatatgtctgcaaaaagataaatacgtgctaatcagcaatccacccaaaagagcaaaatagtcataagaaagtagatcagaacagtggtgggaattggtgtcagatgtgaagatcctaaaaagtaataaaaaaaattgaaactgattatttctacacaagaacaatccaacagaacatgatctagtaaaacccatctattcgacaccaagtcaccaatacttaaacaactattactaaaggaaaaagtgaaaaacagtagaaagaaagtgggtttacaaactatacatgtgtttcgtaggattgaagctgtagaccagatgctagggttccatgcgcatatggaacatgatagccaccatccagatagttgtcacaaaagacctgcaagagaaggatccgatgggtataagcatatactgaaaagaagcttattgcatttttcagtttttttgtatcgaaatatcatcatgacagtttatcgataatgcaccttccaattacattcaattatatattctcgcctgcaaatatgaggcaacgaggtgtcaatgccatttctactcagcagatccgaagcactacccagccattcatctccaactgtgttatcagcagtttcttgagagaaaccactatcaaatttggccaatacaaaaggcccccatgtagccactttaataggaatgagaccaaaatcctgtttccagaaagaagcataactgcatgagttctggcagtggaatcaggaagtatagaagatcctcaaaaaagttgggacttacatttttgttgaagttcttgattcctgatatttgtgtggcttttaggaggactccatccagtccatatgtccagccctacaaaatcgtaggactactgtctcaagagagggcagaactataagcaactatgcaagtaataatactattaccaagtcctgtgtctgctgaaataacaaagcagaagctttgtcacccccaataattcaaatagactagttaagtatgcatgcagtgatgcttcttttttattattcctagttcatacttttaagtatccaggtacttaaaaggtgtgagacgaactaccggagcacatgttagagttcaagatgttaatccccaagtcatgtgggcatatacatcattatcgagttagcatttttaagtagtatgtggcttctgtccttcaaaattcaacatttcaagataagttactggttacatttgtttcctcaacactcgatagtggaagcatccaatactgcacaggacaatgaggacataccacctattgaaatgtttcgtaaggaactcacatgataagggcactggaagcaagtcttctgaccacttccacatgcaaggagtgaggcgtgatggcgacacacgttgtgaaaagcatggagttctccatttgcatcccgacatatgacaaattctacatttccaagtctactacatcaacttgttagattatcacaatcatgaatatccaatgtaaatgattttattttacagaaatttgggggtaatgatgactaaagtgttttctgtgcggatggctatatagaaatgtcataagaccgacacctttatgcgtataaaaataaacttcatggtttgcattagccactacaagattctggctacagaaggatgaaatcaccttcctgtgaagtagtcatttgggttcttgacttgccatatgtggcctggaaaacaaccatgaaaggaagcacaaaacaagctttcagtaagaagataaaggtgactatcaacactctttctgaactggccacaaaagttagtgaattatacactgatgatgatgcaatgacagtgaagagaagttactacaaaagcataaacgacaaacggatcagaaagctaatcaaggtgtctccatgaagaactaaacctaggaagttggaactcaacataaaattgaaatgagcaaagctactaatggacaacaattgtacaaggagtctcaaatgcaagtccaccatccagataatccctcttttgaaacacctacacaagtcacaccactgtcaacattaaggatgttggtagcccttgatcctgtttagccatgggccctgaacccctgaactcaccccatttcaagcaagtgagaagcgagctctcaacttccacactcccactcgcagtctcactcacatcacacatattcccctctagacaagtcatccattgatggcatacagctcaagtaaaatccaccattagcgatggtttagaagcgatctccactgccagcgcttgtacaatcgtactaccacacaactagcaaccaaccaatcgtgcggaaactaagaacaaatggaggaggggggttgggagtgtgcgaaatcgggagtatataccaacagcctgccacccgcggaggaagacgcggtcgagctcgagccggagaaagtccgggtcggtgtaccacccgctcggcggcgtcacggcggaggccagcgggaccgccgggtcgaacgccgccacgaggcgccgcgcggcgggctccggcggcgccacggaggaggcggaggcggcgatgcggcgcggcgcggcgcgggtcggccttgggcgggaggctcttgcggcggatgataccgcggccgcggattgcgcgatcgccatcgccggcgccggcgcacgagtcgcgagaggcgtgggaatcggagagaggaggcgagtcacctgctagcgtggcaatgttgtcaaatttggtttatgaatttatgatgttgtcaaatttgatttttaaattcgagttttttttttttagagatggaaatttggtttggctctgttcgatgttcttgttttctcatgtctctccaatccaacctaaggctactaaccattattatgtgtcacttttcaaagataattaaaatatgcaaaatcgtatgttgtctattttatttcaagctttttcaaaaaaatatagagataactaaaatggatacatgcatctcatcgtctacctgttaatatatcagccttagctaaaatttattttttaaccttaaatttagagtatgtttgggggttttcattcatgcgagtgttcgtttggagaggatatggagaagaaatctctcgtttttttgcatgcacgatcccgaatggcttgatggtgtatttttttacaaatattctatagaaaagttgttttagaaaattattttaatttgtttttaaaatttaaaataattaataattaattaattatgtgctaatgactcatcttgttttatgtatgttttcaatcttcttatttccctttctcttaaatgcacaatatagtatatttctatatttttactcataagttattttgtattgctttgttttttttttgagaaatcaatgtctcttaaaattcttaaaatgtccaagtcctttggaacaatctaaattatcgctttagattttgagacttagtaacaatagaatccataaataaactactaagtatgcagaaactaggttcttcgaattctcaccagctaaatactcaatggctaatctttaccaccgaaaccaaaatctttatacggttattccctgtttaactgagcttagaattctaattctaagtggtgaaaagctaacgggcgagaatatgaaatataattttatagtttctggattctaatttagtttttaattacataagtataatttctcaaaatctatataaaagtctggacaaagggttggagatttctatagaaagtagttgataccccgcgctctgttgtgggatatgtgaatgaatttatgtgatatattatataaatgatagatgtatatgtttaaataatgtaaaaatgatgtggagatggttatttgatagtgcttacatgttgagttctaaaagaacagtaaaattataaataatatatcatatttgtatgagatttaagatactctatataataattactagtgggtgatgatgtggcatacttgcgtattaagttttagaagttagtgggtaccaatagtatatagaaagtataagctctctcttaaacatagccttaaactgtttacggtccaaggtgaagcctactcaatttgggaagtctcggttgctccttgggtactcctggtccaagatgcgtaccgtcggcccatcggcccagcaagccacctatttattggtcgggccagtctaagacaaacagaccaaatttacttaaaaaaggggtatgtacacatttacagagttcaaacttcgacaataagatgatgaagtgaatggatgttgccatatgagcaacttcctaaaatgaaaacaagatacaacaaggcgctactctcctaaatatttggaaaccccatattctttccagaccacgacctcctctttaatcaaggtaaagaggatgcccgctgcttgactctgactttggaaaacacgtatatttctcttcttccaaaccatccaatagacaagcagcacaagagtgtagaaagcatgcatccctgtaagctggtctgaaacccttgccgcgccgtgagccaccattctcccaattccattcgcgcttctgcccacagttggaagccgattcatgtccatcccttgatcatcctctagactggaagtgcaagggcaggaaataaagagatgcccagagtcttcgttgctgatcatgcatagcgcgtttgctcagattatcagccgttagacaacgtccaatttatgttgtgttgcttgataatttcactgttcgtcgtctactcttctggcaccaatctgaacatttaattggtgttactatcaaattacgaatctaccgatctgaacaaaaatcatatcacaagttccctccgaaggctgaatcagaaccagtgaatctaccaacagaaaacagtgctacgcgtttagagcagttacaatagcaggctataaaccagctgcaaacatattttaagaagataaataaggagagagaagagcagcgtttgtagcccgctatagcacggactccaagacgcagtgtgtgtataacaggtgggaccatgtattattagtgtagtatataactattgtatgaataagctattagattaattatagttattgaagctagtagttaactatactattaaacttggcccttaccatttcttcacaagttgccgtttctgctgtgccaagcaggtcgcactcctgcctgtgcctgaagggcgaaagaaaaggaagagaaaaacgtcctcaccacaacccgtgccgactgagacttaccgatcgctctcgcgaaccaagacagaataccgagacaattagcagcgttccaacccgtactaacacctccaattaaatcaaatcaatcgctcgcttaataattactaataaataatctgatgactcagcggctgcagcttgagctaaaccgacagtgaacgaaacggataagatcatgtactgctgctgcgctggtccaacgacgtgaccctggtttcgatctcactcattatctctccatctatctcctctccaaagcttatcctctctcgcctcacttttcacaaccctgtctttcccatccctttcgcaaccaaccacattttgaccctcctaattacaccaatttaattaggctgtgtttacacacaacttttcagtcacatcatctccaatttcaaccaaaattcaaactttgcgctgtactaaacacagccttagataattaattaccccctcactcagtcctaaaatataagcatttcatcctaaaatatacttcctcggtccgaaaaacgaatttagaattgaatataacatattctaacactataaggcaccctttgattcaaaggaaattcataggaattttagaggatttctttcctataggaatttttcctatatagccctttgaatcaaaggaatggatcttatggaatcctatgaaattcctatggattgcctaatgccatgcaaattttggaggaattctaacctgaggtaaaacctcttggaaactttcctttaagtctttatctctcctctaattcctgcgtttttcctgcggttcaatcaaacgactattcctgtgtttttcctgtgttttgcaatcacctattttacacttacattcctatcaaaaacctgcgtttttcctattcctatgttttctcattcctgtgattcaaaggggccctaaatctagatatctagtactactttgatttttttataagacagaggaagtaaacatctttggctataaaactagataaatgtatatccagtaataactaaaagttgttatattttaagatgaattagtaattcttttccaaaatcataagaaattctgagtgttttcgcgtcaaatccatgctaattattgagcaaaacctggtcgattagtactaagcgctatactagataagctctccgctgaacctggtcaccgatcacgatcagttgcggcgtccacgtcttgtaaaggcgttttggataagcctccctctgaacgtcctgtccccagtatggccgatgtgtaggtatagtagctagtgtgttcccctgatggccaagaaaagataagatgatgaaatggagattaaattactcctaataaggtacaatatgggcaccaaccagcaggaagaatcagtttggctttgcttctgatctttagcaaaacagaaaaaaaaaaaaagaagtcatcatgctgatgatagtattgttcattcatggatggatgcacacaaggtggttacaagtgtggttgttggtccctaactaggagtacttatatacatgaaacaattgcatatgcattatgcagatgagataagtgcaaagaacagattgggatgactaattgggtcttgattaattcatctctgcatgcctcctgcagctatattgacagaaggttattgctattgaacaaaattgaaggttagcccaatgagatcaaaggcactagctagttaggaattagtaggatacatacatggcatatatatgcaccaagaattaaacattgttcaataggagttctccataagtgtatttggtgcatgatatgatgctctcatctcttggtcaatgcaattatgcaactaattaacagtgagtttgttcataggtaggattggcatgcagctaatataagagaagaagaaatcaagaaacctaagcactaatataaggtatttttgatggttgatttgatgagatgagatcccaaactattacaaaagggatccatccatattatccatctctgcttaattaatttgtcctcactgaatttgattcttttcatcatttcatcctcctcctcctcctcctcgtcgttgtcctcagccattgccgccgccgccgccgccgtcgtcgggcggcggtggatggtggtgcggcggcaggaagggcgggagcgcggtgagggaggtggaggagacgcggcggatggaggagcagcggaggatgcggcggcgcttgttgaatgggttctccggcttggcgaggctcgccgtggttgcgccggcggcggccacgtcctgcaggttggcgaacgacctcgacttgccggagaagaagttggacagccccctcctgcacccatccaccattagcgcgagagatacagctagctaattgaccaattcgatcgaagaaacaatgcttgcttgattgggagcgcgtcgtcgagggcgtcgaggcaggcgagcgcgccaccgccgccgccgccgcacttcgtcttcgtcttcctccgacacgtctcggccgccaccgccgccgacgacgccttgctctccacctcctcctcaccatcatcctgttcatcctcggagtcggcgccaatggaggaccgctcctcctcctcctcctccgccttctcctcgaccgtctccagcacgaacagcccgtgcacgacgtcgccgccgccgccgccgccgccgccatcatcccccactaccccaccagccagatcctccagctgctgcaccacgtccttcctcttcctcgccccaccacccccaccaccaccgccgcacatcccgtacggcgacgacggcggcgccaccgccaccgccgccgccgcagccgccacaacggacatcgcgtcgcccggacgacgccgccgctctcatcaatggcccggccggcggctcacctctcaaacgagactcatggccaccaccaccaccaccaccgatcgatcgagacgtcgtcgacgacggacagatcgacagacagaaggaggcaaggtgatcgccgcggcggtgtatatagccaccacggcgaggggaggaggaagacgacggcgacgcgtggagagggggagacgtgtcgggggcagcgagggcgacgggggcaccagagacacacaggcgagctgcatgcacggcaacacgtacgtttcagctaaccttagctattactattagctttaagcttagcttagctttatctcatctttttgtcatgctatgcttgctagctgcatgcattattggcttattgcccatactctctcaccttacagtactaccttaggttagctgtagcggctgagtgaacagcacgctatagctcacgggctatcttttcgcttgtatttatgcttatagtaaaaattaaaattttcaacttcaaattaaaagttggtcacagggtattctcatcctgatttagttttaagtttacttttagatcgttacgagaaagtacatagaagttttttatttataaattatttattttgcaaatatgttatttttggtttatatttctctaataagctagacgatgggttgttagctgtttccataatcaagaagtatcatcttatctgcaagctaaaatttgctctgtttaatcaattattaaattgatttggcacacacatatgatgaaccagtttagcataactggggtcttatccacatccacaacaaaccatattgatggatactccaaatcaagatggttcgtcttatctgcaagctaaaatttgctctgtttaatcaattattaaattgatttgggacacaggcgatgaaccagttttgcataactggggtcttatccacatccacaacaaaccatattgatagatactccaatagcatatgctctgcctcgtgttaattccatgcttgtaattgtaattactactccccttaatggagtacaagccagtactacattatatcttccccttgatgatttcctaagcatgcagatttactcttgttcacagttacttttagttaacacagagatgcaattatcttcttcttaatttgcacactgccgtgtcattccttggtattaattaagttcttcttgattttgccttttaatttgctatatataaagtgagcccccatttgcaatgtgtgggaagttggcgtgaaatgctgggaacattgccatgcatgcatgcaaaatgatatcctatcttcctataaaattatcccctactaactccttaagcttaacatgtaaagatgccacatcatcatccactactacctccgtcccataaaaattatatttctagctaatttaggacaaaatagtaggattggaaaatgaccacaataaccttatttaataaacgcactgcatgcacacattccatatatacaaatgattaaaaggaagtttgagagaattaacccatataattagcatacttaataaaattacaagcattagcagcccaaattatgtgggatggaaggaaacttatatagatgaatcaattagttgggccccacatggctagaaatacaatttttgtgggacaaaaccttggagctagaaatgcaatttttatgggacggagggagtaacaagatgccacatcatcatccactaacaatcatcacatttaaacatcatacaaatatgctatatctttatagtttttataatttaagagctttttaaatacaaacatgttaaattatcatccaacataatttatataatgttttaatgtatatttttattatgttttatgatatgtcaacttctgttagatatggccggtgataagtaattagcaagcaaattcaccttgactaatggttataaattctgtcgctttcatgatcttcagagataaacgataacacttcgtattttttttgattaatttcattgcaaggcatacgtgtctccaggtaggattcgattcccgtcaattaatttttacccctctgaacatttcaaggcacatagtttcttttaacaagtgactgcattttcgacagagacttcttgtatgctcaattgtttgagttgcatgcttgattaagtgcaaaattagagatcgtgtgtgaattaaaaagttacaaaccgatgatgattaattctgtcgaaacatgatttcggcaataataaaacggggtagcgcacgagacctaaaagtggatggatgtggagacaaaggatttagacaggttcaggccctctcaatgagaggtaataccctactcctgtttggggatttgaatccgccgggtgtagtatagatctaacgatcatatgtgctcatgccccctagagggcctcctgcccaccttatataggatggggggcaggattacaagatagaaaccttaaccaacacggtatcggcttcctaaatctactttacaatattatcaaatcaggactttaggccgctccataatataaaaggaaacgtaatacccaagtcatgatctgttacatattccatacatatatgttatcccctattactagtcggataaccatgccgtgtgggtatggggtacccataatctccacagtagcccctgagaccttcacagtcaaaaagataatcttctcccgaactagattattccaaagccgagtacttcaatcatctttgccatggtctcccgagtacttttaccaaatctgaagactgtggagggctgaaaaataaagtcaggtgcatcgactagatgcacctaataggtgtagccctcgactatgcggttaagtgaacaaaccaagcatatagtcaaggaataaataatccaaccaaccgagtggcttcgataattatagttaaccaagcgacttgatataaatatgtagcatatgcggtgtaaatccctgaataacatgatccgagtgatataccgactgctttgtaaaacatgatgagtgtaacctaaagttggctacattattgaaaattcacatagcaaaacagctataaaaaagcttgcatgttgtgaataaagaaatttccaaagtattgggcatacgccatgcgcatactgctttaacagatgtgcttaagtccctagaagacacatggttccaccacacctggaaatatatggcatatgtggtataaaatccgagtaaataaactcataaaggatttaccaaccgcctgaaaaatgaccacaatatataatcagcctaagccataatattggtcaataaaaatgcacacttacgtggcaaaaagcaacgatattgtatccaatcaattgcttaaaaacccaaacagcaccatgactatattaaaaagtcagcggggcagctatataaagctttactgtttgacaccttttaagatgcattgtaccaactcctaaaaagttgagtaactgcggtataaaaggattttaaggtattgggcacttgatcacgcgcactttggcctaagcaaaaagtgcctaagtccctaaaagaacgtgacaggccacacctgaaaatatgggctgcagacatattaggcctagaccaaaaaatatgccttcgacaccctttaaaggatgacgcatgtaacatgctctcgagtaataaatcttccgggtgatatagaccaggtgtagctcatatgaatagcttctgatctgagtgattatcccttatgagatactccaaaatatatataataattgaatcccgactggcgcaagtattcggttgatagcccttacggggaataataattggtccagtctttgagcatagaaaatagactcatgactatgaatccatgtggaatgtatccggaacaagtccaaattggagatataatcctcacgcttgagttgatgagcccctgagcatatagcttgtccttctgtcatagtcaaaattgtctattggcaatagctgacgcagtcggcatggagatgaaatgaccaacatgaagacgaaattgctcatcagaagtaacggaagatgtcagtggtagtaaagatgccaccaatcaaatgtaatgaagttgcataaccatggaggcgaagaaaccagtcggcaacagtcaggtcagctagcagtgaggatgtaggcgcccaacaacaacgaaagaacagtcggtggtgacaaaagcaaaccgacgatgaagacgtagacgcgcatcaacggtgatggcgaaatccaccaatcatgaagatgaagaaaataatcggcggcgacaaacgcatccgacggtaatgatgattagcggcaacagagatagccgactatgatgacgaagtttcccatcaacggcagcagagtaggctatgttgatgaggcttgacaagatgttgatgaagatgacgatgtcggtgatccagtcaatagcgatgtagcagccgatgataacgatgagatcctctatcggcagttgcgtagtaggccaaccgtgaagacaaataattggaggagagttgatgttgttgcccaactcgtctaaaccgaaatatttgaagttgttgaagcagaatgtctgttccgaagcaaagatgaagataatgactcctggagttgactcattggctgattaattgatttcttcagcttgacataaaatttgtcaaattttgagccttatatttgtgtagcccccgactctttggttagttgagaaacaactgaacatagagtcgagaattatagcttcttgtcgtcgagtagtcattgcttgattgaagatatgtgttgaaggtgtccaagtagaaatcctgaatattggagagtcacttgttgtagtaaaatatcatggcattgcatgccgagatgtcgaggttcacaaagacgtcgtggttggtgaagtagtaaaacttgcgaagtagcagcaatagagtttgccggtgccgaagataataaagatgaagtcgctccaccataatgacaaagttgtgttgccgtgatgaagtgaaccggtagtgaagacgcgcagttgtgaagataaaagcaccagtcggcggcggcataacacgagtcggcggcggaagacgatgatgtccatcagtagtggtagctgtataaaccagatgtagaggcgagggcactagtcagcagcagacgagacgaccggcgatgaagatggtaaggccaatcaacactagcagaatcatgcagccatggaagtgaagaaaccagtcggcagccatggcaaacgtaggcagcttgtgttgaagatactgatgcctattagtagtgacagcgatgtagccagccgtgaagaagatagcatcagttggcgttataacaggccagccgtgcaggcggtgacaccagtcagcggcagatgaggcggccggtcggtgaagacgtagacgcccaacaacggcggtataaaggccagccgtgcaggcggaagcaccagtcggcggcggacgaggcggccggtcggtgaagacgtagacgcccaacaacggcggcataaaggccagccgtgcaggcggaaacaccagtcggcggcggcgaaggcaagccggtcggtgaagacgtagacgcccaacaacggcggcataaaggccacccgtgcaggcgaggactcgtcgtcggcaacaaaggcaagccggtcggtgaaaacttaggcccccaacaacggcggcttattaggccaccccttgcggcaaggacatcggtcggcggcaacaaaggcaacccggtcggtaaaaacttatacccccaattacggcggcataaaggccagccgtgcaggcggaaacaccagtcggcggcggcgaagcaagccggtcggtgaagacgtagacgcccaacagcggcggcataaaggccagccgtgcaggcggaaacaccagtcggcggcggcgaaggcaagccggttggtgaagacgtagacgcccaacaatggcggcataaaggccagccgtgcaggcggaaacaccagtcggccgcggcgaaggcaagccagtcggtgatgttctgactgatccattcctggagcgtaagagataagcctaaagccatgaatcccttttatgcatatctggatctggatcctgcagaacaaacatataggatgagtagtatctgatataaatataatactcgagaaaaaatcaagtattttaaaatatttataaacatgtatttctcctcttgtcaattttgatttccccgagcagatgactcattacgtttaaacgctctgcccaactagtcatagccaccaagcactgggagtcggcctaagcacttcccaaacatgcatatgagtgacatgagtttcgtcattaatggaacaaagtttcacggatcggagtttactactcgggtacttttgcaattattaagagcagaaaataaatttatctcatctctatgcttttgatttattccgaataatacttagcaccttgcgttactcggtccatccaacgagctcccgggtgctaggaatcggcccaaaggcaaccatccattggcaaaccaaacggaaagcataggaagatagaactccataactcgataggtacttttgtactcagattatgtcgcaagcaatcaagataaatattatgaaaattgtttaaaaaatacgatataacatctatagcccccgactcactagtcaacggcgaaccagttgatgtagtgaggcaaaggaaaagacaaaatatcatataaagaataaaataaatgatgacttagctttgtaatattccctcggtgacagcagaagtagccgatgtgggaataaagcagtccatcaatggtgacaaaaacaccagtcggcgccagtggaaccaagccagtggtgtagatgatgaagcccattaacagcggcgaagtccgccaaccgtataggcaaaaacaccaatcggcagcggcgaaggccagccggtcggcgaagacgtggacgcccatgaacggtggtgtgaccaaccaaccgtataggcgaggacaccagtcggcggcgacggaggcaggccggcggtgaagtcgtagacgcctaacagcggcggcataataggccagccgtgtaggcggaggcaccactcggcggcaacggaggcaggccggcggtgaagtcgtggacgcccaacagcggcggcataataggccagccgtgtaggcggaggcaccactcggcggcaacggaggcatgccggcggtgaagacatggacgcccatgaacggtggtgtgaccgaccaaccgtacaggcgatgacaccagtcggcggcgacggaggcaggccggcggtgaagtcgtggacgcccaacagcggcggcataataggccagccgtgtaggcggaggcaccactcggcggcaacggaggcatgccggcggtgaagacatggacgcccatgaacggtggtgtgaccaaccgaccgtataggcgatgacaccagtcggcggcgacggaggcaggccggcggtgaagtcgtggacgcccaacagccggggcataataggccaaccgtg

SEQ ID NO: 7768 - DNA, 27317 bp, Oryza sativa
aatacatacgttacatgcatgcacttagtaaactcggttcgatcggctgggtcatggtcaaactgtccgagaccggtgaaccagaagggtgactgggtcatctacggtccggttttttccactatggttaagttgcatccggtaaggaaaaaaaaggtgggactcatcttctcccttcacacctccacctctcctctcctctcctctccctatccccccgctctctctctctctctctctcggacgggcactatggctcgtttgtgggcatgtgggcatgctttagcgtaacactatggttcattggctaggttggggtctctgcgacccatcgaccaaaggcgtaaggtggagagtgaggaatgaggaaggaggagggacatgtttagattgtagccaaaataaacgttaccaagttttggcagtgccaaaatattggcaagatgacaatattgctacaattttagcaggatttgtgatcaaatttggcaacaaactaaacatagacatattttttggcaactttaccaaaaatggtatgatattaaagtgaacagacccgagattataacatctgggaccaatgattttttttaaatcagacatgtggatcctattcttcatatgtttttttgtttttttccgctgattgtaattacatgtaagtgacttatcaggtgaagactaggtcaatattttttccacatatgatacaactgccgtctaaaccaccgcgggactcgatatacaatgttttgatagtaggggacgctctatacccattacttgaggtatctaatgtgaactcttttctttttgtggctacctgcactgtttgtacgtatgggccatgatgcagcccagtgcactaaagcccaaccaggactgccttgccggcctcctgcgcttggtgctcttcgatcgtgtgtcctcctccgtggcctagccctagccgcccgttccaatccaacggttcgcgacggccagaaggggttcgtccgggtgaataaaaatccgaaccccttcacgagatcgacgccttggacgcctctctgcttttcgagttcgacgaaatcgggtttcgtcctacccaaattcaaagcattttgtttcatcattatgacttggagaacgtgttccagtaccacgccttttttttcagcaaaattacacgtcacaaacagaagaaggggaaacaacagggtcgagacaaatgagccattcataattcattcattaggcatacgaaaagtagagagtacaggggaaagcaagatgagttgcatcagatttctgaatcatatggcccctcctcctgcacttacatcacccactgtttcatctcatagcaatcactggctcgcaaaaggacacacactgacacaaactcgaggacggacggacaccattgactgccatactccgatcgatcgaacgaacgaacacggtcttatttcggtagcagatcgatcaaattattagctagagtagaagcagagcagacgcgacgacgatggcaatgcaatgcagctccccctccccggaatctctgcagatgcaaagaagcagcaatccaagtgtcagaatctctgatttcttcagaggatccgaaggaaattaatcgatcagcgatggcattgtgcattgttagcggtggaacttacaccaggggaggatcttccagcgctggttgtcaccctcgcaccacttccacagcacgatctcggtgccatcgtggatgccgccgtgatccttgtcgccatggaaggcgtcgaagttgaggtagatgttgttcaccatgcggatgcagcggaagcccttgcccacatccttgctctccgtccacagcacagactcgtcctggtactctgggttgtagggaaccagcttcacctgcatgcgcagagaaaatcgttcgttgtgattcagagattcgttgcatatgtaagaaaatatttattttgtaagaaaagatttgctcaccgggtggccctgtccggtggagtgcttgatggcttcgccggtgaccttgttgaccagcgcgaacgccgggtagccttcctcgtccctgatcttgttgctgtgcctcatgtccttgatccagtgctacaaaccacaaccacaaatctctcaaggtttttctctatctgaatagtagtatataattaagaggagaatacgtacctggtagtcgtccctggggttcttgggggcgaggcaggcggtgccgttgcggacggtgaggcagtagtcctcgcctgcggcggagaagacgcggacggtgtggacggggacgccgccgatggtgcaggcggtggcggcgccgggggaggaggagtgagcctcggggccccaggggaggatcttccagctctggttgtcgcccttgcaccactcccagagcacgacggtggtgccgtcgcggacgccgccgtggtccttgtcgccgtggaaggcgtccaagttgaggcgggtgttgttgaccatgcggatgcagcggaagcccttgccgacgtccttgctctccgtccacagcaccgacgcgtcctcgtactccgggttgaacggcacaagcttcacctgcacacccatcacccgccatgagtccatgacatcgaagtcaacgttcttcgatcttccatggcagcacgcacaaagctagcagcaaaatagaaatatagtattacggggtgggactggccgagggagtgcttgacggcgagtccggtggccttgttgacgagggcgaacgccggcatgccctccccgtccttcaccttggtgctgaacctcatgtccttgaaccagtgctgcatttcaattcattccatttcagtatacatcaaaatccgatcgaatatagaaacaaaagaaaaggcatatataagaagggggacctgacctggtgctcgtccttggggttgacgggggcgaggacgacggcgctgtcgcggacggtgaggcagtagttctcgttggcgcggcagaagatcttgaagatctggttcgggtccgacggcgccgccggtgcctggttgtggtggtgcccgaacccaaacatcttcgacccttaattcgatcggtgcaactcgcgactcgcgagagaaatgtttttgtgctgcgactgcgagcgatgatgcgaggaggagcgagaggtgccacgttttatagaaggccaaggccggccactctcaccctcacccactgatcgatcggctcggctcgatgacgcgctctcctgtgccaactcccacgttcgctgacagctgggcccaccggtggtcctcgactggctcaaacgcgtgacatgcgtgcgtgtatgttttgcattctagccgtttgatttgaatatttgatatgatatgatatatctttggtgtttaatgtactctcagattcggttccatgaacttgacttggatgctagtaccagtaattcattgtgctgagatttgcattactaaatgtgcgagtaaatgcaaagatttgattactggtgcacagttaattgctctacttactcagtggaagactagagcagtacaccaacttcattgagtatttttggagcagcctgatttcttacaaccggataacataatatcactaccattaccgtgacaggtatgtgggtcatatactcctattgttccacacgtcagtgcttgtaatggtagtgctgccattatgatagagaatgtggatcccttccaacttgtaaaacaacactttctttttcagaaaagcataaactctttcacccgaaataaaaattaaggggaaaaaaacaatctttgcttaagaaaagaacaaagagagatgctgcttgctcgctttccattgtccgggaatttcgaccattgttttccccaaaatcgaaaggtatgtcgccacgaaggacgaggtgatcgaaatgcatgccgtggcccaggattgaagcgtgcacctgacgcaaatccataaaacaagctaagagatgtgattccagctagagatgacccttgtgacggtcgttttgtacgtttgcatccctgtgctacacaagaaacaaaggcagttttacttttctgaatcaccatggatcgcccatggatggatggttcgatcatccctgtccgtttccaatgagcacatctaatctgacctgaatgatgcatgatgcatgaaaggtggtaaaaaagttgttaactgataagagaataatctttttacccggcaagctgctctatatcacggccacgcagcgcctgtatggccaagaacgttccagatttcaacacctaattaatcgacgcgtcgcctgccttttgcaatgcttttacaggcttaagctttgttgttgtgcttaacaacaatgcagcaggcagaaaacgggttagctacatgcatctccctttgatttttgttgtcacgtactactctctcaacttgtcaggatgaaaagtttcgactctttaactttctcaaacgaaaacaagtcaagttttcgcgaacatttggagtgctgtgcagatagcaacgcgttgctggtttgtagtagtatagtaccgttgtttcaaccgttctacccttatagctcccgcaatggtaaaataaggtactctctataaaacatatacatctcagcaatagactcgattaatagtaaaccaccttaatagtatgtctacatttgtatctatagctctctcatgcattgcctcgtttttctctatagattatctctaagttagtagatagctttactctctctcttcatttaataccttctaagtaggaaaatatactgacatagatcttttgtagagagcttataaataaccagtgataactttagaggagtaggtgaagcctgtccttaaactcaccttacaattaggagtagtaattgctatgtgtaggttgtcctgtggagtttgtggacgttggagcagatgatgttgcatttgctaaattggtaatggtgaatttattattgtcttggtgtgattaggtgaacacttttgtcctgtctagctagtatagtactccacaaaccaaccttgacgatttcaacagaaaataaaaaggctaatctaatctgttagctaagcttggctgggtttatctggactggatggatcatgggtgtgtgggtttagctcaggtaggcacacgttttgccaccctgctcgtatactccctccacccttaaaaaaaactcaacctactgatctcttctagttcagatttattgtcttaggatgtaacctcttctaggttaagttttttagacgagaaaagtattactctatgatatctccctcgtcataatcgaaaacaagggtgcttatctcatgaagtgccatgtggatgtggatcaacaatccctagctcaaaagcattttagcaggggctcggtttaagaaaaaatgttgttttcgcaaagggttactaatatatattactccctccttcccatattgtttatcatataataaaatttaaaatttcttaaattaatcatcatataaccgtgcgcatggacacgaatttcatcggaatacaactaatgtagcaagagagaatgtgtgcatgctaaaaatgtaattggcatggtattttaatcgatgcatgtattgtgaaagaatatgtgtatggtgtctttattgatgcgatttaaattattcttgttcttggtgtataaacatactatttatggttaatctatttgggatgaagggagtactatttatggttaattatttttaaaattagaacggaaatggataccttgacctttccattcgcatggcaccgtgttgccttgtgttttaaagttttgaactcaattacatactaccttcttttcaaaatgtatagcgcctttgatttttttataacatttaatcttattaaaaaataatatgtaaaagtataaggtaagattatattttatttgatgataaaacaaatcacaataaacaataatatttatataatcattttgaataagatgaacgatcaaatgttatgaaaagtcaacgacgtcatacattataaatggaggaagtactacttatagtgtagtcacagtataactaggctgtaattacacccgagttacatcgatagtttttttgtttaaaatcgatcgatagcgctacaggtagactctttttttttttttgtagacgacgtattcatcaacaaggagaccgtgagtgcttttttatattggcacaatctttgggtgtgctttatattggcacagtctgtaaaggtaggatgtttgtgggtgcacggaggctgtgagcatgtgtttagcaaagaaaaaaaaagcagcttcaatgatgccttcattttctcttgaggaaggatgttttgggctggtgaaattcacgtactgaatgtttggatcatcgtcgtcatgtacagctaataggtgggccattcatattacgaagtggaggtccaataacaaaacttgggccatatttgttcggaaaaaatggatgtatttaggggtaagcaagaaaaaactgaaaccaaagaccaagctaaactgaccataccaagaccgagaatttcggtatctatactgaactaaccaaattttgttcggtcatgggcttcggttgaccgaatcaaccgaaataccttctaagccctataagcccactaagcccgatagagaaactctaattttccacccctccaagtcccaacaaaccccacatccacaccacccaccctgccaccccggccttttggttgttgcgtcgccgtcacccgcttcttcttgccttcgcgtgttgaccaagccagcgcccccctccccctccgcccaacaagaatcgcctcagcaccatcgcgttgtgctcgcgcctcctcctcgcaccacaccgccattgtatagcctacctccgactcccctccagtcctctactcagacctcctttcttgctcatgctggcagtggcgcctcgactccaacgatggcgacatacagctggcctcccctcaacctctctgtccactcctgcacgtaccggcggctactcctcgactccaacaaagacgatacatcaagccgtcatccccttccctctagcagttttcttgatttgggcacaaggtggagatggcggcggagcaggagggcacatgcaatagtcggtggttggttgaggggctatcgacgaagattgcaacctggcctccccagcccccatccactctgattttttttattttggataattttcttgtgattttcttaatttatctcctgattattttaatcatgatcaagatcgagaccaaatttggtggtcttgataaatttctactattgtccagtctcttttcaataaccgaactaaccgaaaaaagacaggatatcaagatatcaagatcaaaattttcaatctgaccaaatgcccaccccttgatacatatgggccctattacacttttcactaattttggcccgtttggaaccttgcttcttgtctccgtctatactctagtactagtctactcttccaaagagaagatgcagattgttcgtctgtacttgatacatcagcttctcaatccaaactgtttgcttagtttggacggtttttggtgcacatatggagataattaacgtaggtttgctcaactgctctttgactaaatctgattgtgttgcgtgtgcatctcacacccaaaagtgcattgccaatcctatatataagaggacgagcagttcatcattttttttcttcatgtttagctgttcggccttgttgaaaaaacagcactacattgttaatttcgtccgtgatgtaagacttggacgcttgggagttaagagttagaccaatctgcatttttccaagataagaattgaattggacccatcggcatgcgaacaaacggtagtgtacctgcagagtactgacgatgggctgacttgatggcaacctagaagtctctagtccttaggagtagtagttcttaacaacaacattagactcggacttttgcaagcccttaatctgaaatctcgattctgttataaaaatttagttagctgattttacgatttttacaatttttatgtatatatacaattttatgattatggccttacacggaaatttttttgcgaacgcgcaaaaggattgcacgtcagtatattagcaggaaaagagtttttgttacacaaaacaatcagccagactggcttatgcctaaaaggggggggggacttgaagctaggaactactacgacggttaaaaacacaactccaaacagcgggagggggcagagccacgctacatttccaagaaaaccccaaaaaaagtaacactagctaaagaccacagctggccctccgagcggatggactccagaaccactgcaaccgaagcgagcacagagtcgaaaaccctggagtttcgttccttccacagctgccaggagactaggagtaccaaggagtcgaagccgctgcggaggtgctcaggtaaatataccctggaggatgaccaccaatcctggagccaactgccacgagggggagagagggcagcccagccaggaggggacaacacacggagccagacctgccgagcgaacacgcaatcaatgaggatgtggttcgctgtctcaagctcctgagcacaaaaggggcaagcagagtggctatcgataccacgcttttggagaagatcggcagtccaacagcgctgctgaaatgcaaaccaaaggaagaacttgcatttagcagggcccttcgcgtgccagagtaagtcggcacaggcaaaagagtgttggccaaggaagaacgcctgatacgccgatcgcgctgagtagcactggtcacccgtccaacgccagacgaggtgatcctcaacacccggcgagagctgggtaggaagcaccgcgtcccagactaacaggaactgagagatgactgggacagtgagggcgccacgtatgtcaccaacccaggagttgtcggtaacccagcagtaactgtgcgcgatccccggaagcgtggaggcacggcgtggaggaggtcaggagctatagaagctatcgagcgaccatcgatccaccgatcagtccagaagagcgtggactgaccatctcccaggatagagaaggtggatgctgcgaacatgtcggagacactccactcaataggggccttcagatcagaccagtaggggtgtcccgagcgctgaagccagagccagcgaactctcaaggcaaagccagccaccctgagatccggaatgcccagtccaccgagatccctaggacgacaaaccctcgtccaggacacccggcactgtcccccattggccgagtctgtacccatccacaagaaggcgcgacgcttcttgtcaatggctttgataacccagcttggcaagccgatcgccatagaaacggagaaccgactagactagaaccgagcgacccgccagagtggttagacggcccttccagggggggagccgatgggagactttatccacaagcagttgcagggccgcttttggcagcttgcgaactgacagtggaatgccgaggtaggtgcagggaaactccgagatcgagcaaggaaaagaggactgaaccagctccaggtcaagaaccgagcagcggatcggagtaaccgagcacttggtgaagttggtccgaagcccggaagcggcaccgaagacagagaggatgccttggatgaactcaaggtcttgccgaacgggggaaaggaagagaactagatcatcggcgtagagggatgcacgatgtcgaatagcacggtcattgaggggaagaaaaccacccgaatcagaggctttgcggagcatcgcattgagcacatccatgactagaatgaaaagcatgggggaaagaggatctccttggcaaagacctctccgatgggggaaccatggacctggcaccccattaaccagtacccgggaagaggaggcactgagaatgagggagatccaatcacgccaacgttgactgaagccaagctgggctagcacctcaagcaagaaaggctagctgaccatgtcaaaggccttcgcgatatccaccttgagaagaagtcggggaacgcgtttggcgtggagcgcccttgcctcaatctggacatagcggaagttgtcatggagagagcggcccttgatgaaagcgctctggttaggcgccacaagctcgtccaggcgaggggagagacgagaggccaagatcttggagaacagcttcccaaagctgtgaataatgctaatcggcctgaaatccttaacatcaacagcctcgtccttcttcggcaagagggagattagggcgtcgttgagggaagcaaaaccttggccgttggtcaggaacaaggagttaagggccgccagaatttcgaccttgatcaccggccagcaagacttgtagaaacggcccgtaaaaccgtcaggactgggcgccttatcagagggcaaggacttgatcaccgcccagacctcatcctctgtgaagggacagtccagcccctcaagctgcgcagggcggaggccaagagagtggaggtctagggcgagttcacgctcgaagctcgtccccaagatggcgcaaaagtgagaggaggcaagctcttgcagcgcatcatgggagacgacaagctggtcaccatcacgaaggcgcgtgatgaagttcttccgcctacgagctctggcgtgcaggtggaagaacttggtattggcgtcaccctccttaagccagaccaaacgtgaacgttgacgcgcgatagtacgctcaagcgaggcaagaccaagacacttcaactttaaatctcgccacagccaggtctccaagggggaaagagaccgactctcctgcgcaacatcaagccggaagacaagttccttcgccatctgaagctgcagacgaacactgccaatgtgatgttcactccagctctgtaagcgcttggccgtggtagagaagcaccagggaagagcagcaagagggggtaggttggtagggggatgccaggcgtcctgcacgacttgaagaaagccgtcgaacttgggccaaaaggcctcaaaacgaaaacgatgcgctttcggggaggtgacgcaggtatgaaggagaagagcacagtgatcagaggtgatagaagaggccgcttggaggaggcaagaggggaaaagctcctcccaatccgcagagaagaggacgcggtcgagcttaacaagcgtaggcgactcgcgctcattgctccaagtgaagcgacgtccgtgaagcagcagctcctggagttccaactcgtcgacgagtcgacgaaaacgacccatcatacgacgattgagattaaggttgtttttatcccgagcttcgagaatgaggttgaaatcgcctacgacggcccacggccccgtgcgagaggagcgcagcgaacgaagctcatctaagaaacgaagtttgtaaggctcctcctgtggcccatagacgatggagagccaccagggggcgacatcagaagagtgtcgaaccaacgcggtaagagagaaatccgcaaggtgaacatctgagacagaccagacagtcgtccgccaggcaagcaacaccccccactccgaccgaccgcagacaagaaggaataatcaaagtcgaggcctagcatttccagaatagtacgagaggggattacatccataatagtctcctgaagacagagaagagagacatgctcatcacggactacatcacgcacagcatccgggcgggcacgcgagttcagacctcgcacgttccacaccaaaacgttctcattgcatgatcccattgagggggaccacaccgagagtagaagagaagaaaccgatcagccgcacacgaccaacgcctccgcagccttgcccgggggcaaggagccggagaagagcgaggagagcgcgatgatgtgctcctgggaaagtggcttggagaagagggcgttgtaagccgcgatcgcctcggccgtgaccgggcccctctccggaactaggccgagcttccgcatcaggttgcgctgggcgcgcgacactgcgtggatcggcccctcaagcgcctcaagtgccatcttagcagcgatacgctcactgcacttcggcacaacctccaccgccttggcggcgagaggcggcagcggcaaaggcggcgggaggagcgcaggagggagtggcctggagcagctggtgaggaaggcgcgaagagcggcgttgttacacggaaattttgatttaattttatgatcacaacgatcttaacaaacctgctctgtgcaataatatgacaataatcttcagtgttgacttaattactcacggccttttatagctagcggaattaatcgcgggtattaggtgtggtgtcattgggattaaccatttgtcataattgagtcgtcgaagcagatgtaccaaacatagatcaaccgcatagtactgtagtagagtatcaaaccggagcagtactcatctcgccagaagcaaactgggcagagtagacaggcatctcatgacatgaactagtagaacttcgtacaaaagatgcgcatatacgcatggatccacaccaaatagcagggagggggtcatctgatctctgctgacagcgagaccctgatttattctgcagtgacataaacacaggacacgcaacagtaacacgacatgcatgcatggtcgaactcgaacagtgccaaatgcaagcacaggtgacggatcgatcgatgcttttgttgacggtctctcgatttctgcgtcagaaggaacaaaaccaaacaatgtcagttgaaagattctgactaattaagctatatatcggtgataattacttacaccaggggaggatcttccagcgctggttgtcgcccttacaccactcccagagcacgacggtggtgccgtcgtggacgccgccgtggtccttgtcgccatggaaggcgtcaaagttgaggtagatgttgttcaccatgcggacgcagcggaagccatggccgacgtccttgctctccgtccacagcaccgactcgtccaggtactccgggttgtatggcaccagcctaacctgcgtgcagacgaacgtgtcagatcatcaactactagtgtagtagtggttttgcgacaaattcacatcatgtgacgccattccagaaatcgtaagcgttgattgctactactacgacgctccaaccactacgttgactgattttttgacatatatgaaacagactgaattaattatctaatgaagaagatgtatgtatgtatgtatgtacatacagggtggctctgtccgagggagtgcttgatggcttccccggtggccttgttcaccagcgcgaacgccgggtagccttcctcgtccttgatgctcgtgctgtgcctcatgtccttcacccagtgctgcaaatcggatttgaacatgattagaatagttagacaagatcacgatggagttgatctatcggtgttaagaatttgagatggaattgtatgcaacggaaataacctggaagtcatccctgggattggttggtgcaaggcagacggcgccgttcctgacggtgaggctgtacgcctcgtcggccctgcacaggatgcgcacggtgggctccgacgccagcgcgcggggcagccggttgccgtaccctgcaccgggtggtccgaccggcggtggacggtagccgtagcccggctcatcgtggctcggtggcggctgcggcgggtagaacgcaggtgcggggtggtagccgtggccaggttcacggttgggcggcggcggcgggtatgcctggtgcccgtatgctggcggcggcggcggcgcgtacgcctcggggccccaggggaggatcttccagcactggttgtcgcccttgcaccactcccagagcacgacggtggtgccgtcgtgcacgccgccgtgggacttgtcgccgtggaaggcgtccaagttgaggtagatgttgttgaccatgcggatgcagcggaagccatggccgacgtccttgctctcggtccacagcaccgactcgtcctggtactctgggttgtacggcaccagcttcacctgcatcaggacaggagcgtcgatcgatcatgcatgtaaaacagttaagatggcgcgcgaagactgcatgcgtggatgaactaatggtgattgacatacggggtgggattggccgagcgagtgcttgacggcgaggccggtggcgcgattgacgagcgcgaacgccgggtggccctcctcgtccttcaccctcgtgctgtgccgcatgtccttgtaccagtgctgcatgccatggtccggattagagagaagctagtaattaagagatgagcacagagccacatagcatagcagaagaagaaaatattatggtggtggtgcctggcagtcgtcgcgggggttggttggcgcgaggacgacggcgtcgtggcggacggtaaggcagtacccctcgtcggcgcggcagaagatcttgaacgtcggctcgtgctggggaccagtcgccggaggctggtattggccgtggccgtgcccatggtggctgaacatgctagctagcttccaagggccggcgtctggttgtctcgctggtattcgatcgttgcaaatggcacctcccgggttatatagaacaaattaagctggaggccggccggcgagacgttcgttcgttgagaccgaggccgcgtacgtggtgccgatcgatgagaccacacccaccgtgtcgtgtcatgtcatcttctggagtacatagggcctgtttagttcgcgaaaagaaattttttagtgttacatcggatgtttgaccgaataacggaagggttttttggatacgaatgaaaaaactaatttcataactcgcctggaaaccgcgagacgaatcttttgagcctaattaacccgtcattaacttatgtgggttactgtagcacttatggctaatcatggactaattagacttaaaagatttgtctcgcgatttcctctctaactgtgcaattagtttttttatttatctatatttaatacttcatacatatgtctaaatattcaatgtgatattttttaggaaagaaaatttgagaaacttgtcgtttccgcagccaagtccccgttgcccccacggggtcaccgggtgggtagtctcttctctgtcaaggcaccggttaaatgatccacgacagacacctggcgtcacacctttcaactttcaactattacatgaccacaaaggatgttgattttgattcgtgaggggataaccctcgttgtcttgtctttatgtcagtcaaatggttataaaaaaatttgaaaagatatattaacatgtgatatatcactccgtaagttcaaatttaacttctatatcttgtaacggaaaaaacaaatttaattgtaaatatacgttaacaagctgcggtttaatttgttttttcgttatgagatatagatatgaatttgaacttgtaagcttgtggagtgttatatcacatattgatatatcttctcaaattttttcataacagttaagtaacatgcaaataggatatcccatgcagtgatcaaagatagtttccctgaccacaaattcattcgctccggcatcaaggaattctttgggtttgggcctgcacgcacacaagaggagagagacggggcccaggcaggtggtatttgggccattccccgtggtggtgtctcatccttgaataagttcactttaggtccctcaatttgttgtcgtgtctaaaattcatccctgaaacacaaaacgggtacaacgcatccctcaacctataaaaccgtgcaaacaaggtctctcagcagtattgtccttggttttggcctacgtggcttctttgactaggttttcatcccacatgacattgacgtggcgcttatgtggcaattcatctagaaaaataataaaatatgtggggtccacatgtcagtttcacacacaaacaaattaaaaaatggtggggcccatgtggccccacatgtcatcctcactactccctcttctctctatccctctcctctcttctctgtatcgtctctctctccagccggcggcgaccggagcggcgactcccggagcaagctggtagagcagggcgggcagcggccggaacgggtgattggtggggcggagcggcgacggacggagcaaaggggcaaagcggggcgggtggagcagagggcaaaggggccgcgggtggagcggcggggcagagcagggcgggagaagcggcagcgaacagcggagtggagcggattgtcgtcgtcatgtaactggcctaccaatgtgcccacaccgacgccagcggcatcatcctgctcctctaggatgacatttcaatgtctccgcaagagatgaaaaaatcccatctcatgaggacgtggagacgattaatttggcggcgacgagctcccgggcgagctcgtggacacaacactggtaccctcgcacgagctccacggcctccacctccgcctccccgagttgcacgcacagcgccacagccgcttcagctcggcgcgccaccgctcggactctagctccgaccacaacgccaccacctccgctctagctcggcgctccgccactacaggaccttcacctccccctcctccttcgcgcgccttcttccctctggcgacggcggcgatgctgacgaaaatggctagtgccatatatgaatcaatcgagcagcagctatgtcgagatggcataaaaaattggccacagcaaatcaaacttgctctgcttctgcttggtgattgattgcgggtagctgtatttaaggacgagttcgtggctgggaaggcgaccagttcagtgcacctgggacatgagcggttgcagccctgctcgtgcagcaccaccgccgtcgcccactgccgctccgcctactccagcagcgccaccttcccaccccgtgctcccacgtcgctgccggagcaacgcgtggagtggtctccttcgacgacgccggaaaatggatggtgctcgccggcgaccgctcgagctcctcctccggccacctcgaggaggcgaggggggtggctgctctcgctctagccggctgctggaggcgaccgctcagcgacatggccggatgggcgatggccccaccctcttttattattttgtgtgtaattgatatgtgggtcccacagtttttaaaattattttttatccgattgccacgtaagcgccacctgggacgagacctagtcataccaaccatgtaggcgccacgtcatctcaaaccgggcacaatactaccaacggacctcgtctgcacagttttggtaagttgggggatgcgatgtatctggttttgtagacggaggatgaaaatcagactgggcgacgaattaagagacctaaagtgaacttattcctctcatcctccatccccgctgcttccggcggctgccgccattccatctcccacttccccgtccattgccatcaatcctcacgccaagctagctatagctacgatggaacgcccttccactcccgactccggttgggtcatcctcagcaccatcgccgtcgccggccgccgccacagcaataatggtagcaccgccattaattggcaccaccaggaacggaaacaccatcgatcgaggtatgtatccctctagatctctcgcccacccaccaccaaatccctccatcgtcttcgtgcacagctccgacatgaaccccgccctgttcccgaccatcgtctgcgaggccggcgacgccctcctcccctctgtcaacgtgcggtccgaaccctactgtcgctccgacgaccgcgcgactacttcgtataccgcatgccgacgcggcgacgcctgcccgtaggaagcctgatcgtctattgggcctagaacctacaactccgtattgggcctatgcttgacaactccctattaggccctcctacgcataacccgagcccatctaagggctcatttagacttttagagcccaacacaagcatcggacgtgacaatggaataagttcacttagtgaccctcaaaagtgatcgaaatctaatccatgaccctaaaccacaaaaccggatatctcgaccccccaaatcttaaaaccggtgcaatttgactcccttagcggttttagagggtggttttgctgacgtggcgcctatgtggcggtattgaccgggtctcctttacacgtggcgttgaggtggcatttacaattaaaaaatatgtgtgggacccatttgtcattgacagaaaagaaattgtgggacccacgtgtcccatctctctctcccctccctcctcgccgctccctctctcccgcggcgggcagagatggcaacgatcggcggacgcgcgggcgtggcgcggcggcctgcgagcggcggagacgcgtgagtggcagcgccaggcactggaacggcaacggcggtggcaatttccctcttggtttgggccctcctctccctaggaggcccagacttgaattgaacacaagtttagcagcaccaacacttgtacggaataaactcctctcatcctcagcaacaatacgggaatctaaattactttcgcagtataattctcgtattgctcttttgattactgtcgaagcacggcccaggagtgaacacctccagcgcagagccccgtagccatcgagattgcagtaactaacagtgctactttgcctttgctgaaactgacagggacagtttaactcttctgtccgtccaatggtaaaaactagagagagatacgtgaggtaaaactctactgcctgggtatgataagtacattgagaggtaaagtgccgtgcgaatttaaccgacctggacccgaatatactgccctgaaagcctgaacctgcagtgaaatggttggtctttgaccattccaacggggtcctatcttcagaagtcacccgtaacattggtgatcgacaatcaacttttagtattttcgtcatcggtgacgtggtggttgctgctgacgaaagcttttacttttgataagtatgatgagtacagtaaataagcaagcttaacaaaaacgctgactgttaataagttgaaaatcttcagacttgagtttcagtctctcagactgcatctttgcctcttcctgaaaaagtatgtttccagtaaatctattcctcctttatatgtgctctatccataatccatccaatccgtccttttcaatctacagccgcctagcctagattatactagattatagtacttggaaacaacttctttgctaatttaagaacagaagatgaaagtttgccgttagactgcatgcatgctccattgatattacacctacttcagccaagaagtaacacatccatgcaatttccatttcccagatcagagccagaatctattgcatttgatatcttctacaatcctgtatactagtagtatatcaattggctacagtaaagtattattgttctgtatatctagtaatctttaattgtacaacattccctctctacggtgtaaagtactatcaaggctccagcttgcttttgcactgtgcctgaaatgaatacgtaggagaaaaaatcgcatacaaatgcctaattgttcaatactacaataattctataccgtaccccaatcatcatcgtcgtccatgcttccatccgatcttaatatcgtcggcaagattgttcatgccagtacgtagcatccgtaaattcgatcgactgcgtttgatcgatttccatggccattaattaagctagttaagaatatattcagaatagctgaggaggaagcatctggtggttgagtccggcgaggactgacgacggcgtcgcttgcaagccgcccaccacggactgcggcgccacgtcgaagcatgagccgttgagcctcttcgccggcgtgtggccgccgccggcgtagtctccggccgggctcgccttgcgcttgccgccggcaacggtggccgtggacgccgtcgacgggtagcactccgcgaggaagttgtcgccgacgccgaggagctggttcagggaggggtggacggcgagggcatgctgatggtggtcggccggcgggtcggcggcggcgtcgaagatctgggcgagcgcgtgctcgtcgaagagctcggagatggaggggatcttggggagcttggggatgagcgtggtgctgatcatcggcggcgcgtagaagctgtaggcgtcgtcaaggactccggacggctcgtcgtggtcgtagtcggcggcgagcggcggcatcatcggcgacgcctggccggacttcttgtagatccggcagagcacccagtcgtccagctgcacgtaattaagcagatggatcgatgagcacaaaaatgtcatgcctatcattgtcaaaagctacatactttaaatcgataataaccacacatgcatgcatggcgccaggacaaggctaatggatatctctattcttctctcggtataattattatactctgaaattaaattaaattaacagcaagtgaaaagagaaaggagtatctctcttggtacgtaccatccacggtttcatgatgtggtactaacagtagcgagtgaattaatgattgagtgatgctagtagttcattaaaaaaaagttaataagcgtacgtcagtccaatcatctgattaaattacaatatcctagaagaagagtacagtagttcaattagtagtggtgcaacaggatgagagcacgcaagtggcatgaggagatggatggatatgcagttagtagttaagctcagagatggtggtcatggcgaattggcgatggcgtatgagtaggtacataccctcatggagacgttgcggaatcgggaggaggaggagggcttgtaggtgtttgcggcggcggcgagagggtcggcggcgaggcggtactcgtgcatgatccagctggtcttggtgcccttgggagggcggccgcggtagaagacgagggccttcttgacgccgacgctctcgccggtggcgctgtcgtggatgggcttgtcggttcccgtcgccttccagtaccccgacccggcggcgcggttcggccggattccgttggggtacttgcggtctcgcgggctgaagaaataccactcactctccccgtacaccgccttcgctgcaattaattaaccagtagcaattgaccgaacgaccaactcaatcgatccatcgatatgatcgaggaagaaggcttacatggcaggtcccatggatcgaacttgtagatgtcgacgtcggcgatgatggggacggggcactgcccggcggtggcgcggctgcggaggtagtgcaggatcagctcctcgtccgtcgggtggaaccggaaccccggcggcagcgacgtcgccgccgacgacatcgtcatctccatcgacgatctaatacggttactgctttaattagcttgtaattggctacctatagctcgatcaatcgattgatcgaatcaaagcgagtgctcatcgatcgatcgatcctccggagcagcggagggaagggccacttatatgcacgagcgaccttgtcagttagcgtgacgtggcgcggagtggcaaatgtttgtaattcttcggggtcaccaggggtagaatcggaaggccaatcgggtgattcgttattcctcgcgtccggcatgactcggcatgggctcgtgcgtggtcgtctatggcgtcagcaatgttgcaacgcatatgctcatgctcatccgtctccagctgcaactaactatatctatctatctatatctaactagttaagctaagctaagctatctctagccgtcctcactgctcatcaatctcatgtgatatctcgcatacagtttcatcgatcgttatcagctacagggaatcgatcgatcatatatagggcagatatacactcctatcatatcatatacttcatctgtcccataaatataggacagatatacactactatcatatcatatactccatccgtcccataaaatacaaactaaaactaaacgtgacacatcctagtataacgaaatctgaacataagtatatctagattcgtatgactagaatgtattacatatactacatccaatactagattggtcttttataagactggagaaatatgtagatagatactcctatgtagctttttaatatataatagcattgactttttaaagatacatttaatcattcattttatttgttttaaaaaattatgaacttattatttatttattttatcgcgacttgatttatcgttatatgttcgttaagcataacttatttttttatatatttacaaaaaaaataaataagatgaatagacaaacgcttatcaaaaagtgaacggtgtcatatattaaaaaatgatgtagtagatgatacgcgtgattatgtcaaaggtaagaaacagaattttactaatctgctcttttttttggaaaaaaaaggaaaacattattcgtgtgtaagtatataatatccgtgtgcattacaatttaaatctcataggtgaattgcacacggatattgataaatcatgaatccacaatatgagatttaatcgtaccaccggtacttttcggtaaataattcatcatttcaataaatatcagtgccaattaaagcatattcttgggtgctctctaaagaaacttattgtttatttaaataggagcatgagaagaccaattatttgtggagtacgtcacatcctgcacgtggagctatttagctgcagtggccggcgctagctagttgtagacgatgaattggatcagtcggctcacatggctagtcattatcgatcgaaaggccagaaatctctgaatagtactgaagtagacattcacacatccattgattattcccagagaaattacaactgtttggctctttgctacaatactctctccgttttctaaatatttaacaccgttgactttttaacacatgttcgatcattcgttttattcaaaaacttttgtgaaatatgtaaaactatatgtatatatataagtatatttaacaataaatcaaatgataggaaaagaattaataattacttaaattttttgaataagatgaatgagtaaatatattttaaaaagtcagcggcgtcaaatatttagaaacggaaggagtactatattgtgtgtggggctccatttcaactataattgaaccatacacagtttcggtgtacgttattattggatcatcatatctaacagattaacatccattattcatgcaccgaaactgcaatctttgtctcttcaagaggtttgcctcggcggtacaccgaagcaagctagctatatatataaaatcaggattatcctcgctcaattatgccttggaaaaactcagaaatgacactacagtaagtatgttaattgggatgatttccacttcacctgtttaactggaatggccaccaatgcacatgtttggagcatacttttatgatcggagaaaatttaattaataccatcgctaatatgtgtgagttgtaaatcaccgcaaaggatactattagctacacaagtcataggagagccactgtagaaggaaaaaaatatgatgagaaactaattccttttttttaagataattgtcgcgccccgaactagtcccgaccggaactagtccgtgacgctccaaattaacctgttaatcgataccagtcctaggaaacagtgctggtatcacagggagacagaatatcacagcaacagaggtctctttattatagagtagatgtacagtcatgctgggctgcggacagatcccgagctcacaactgcattacaaaaggaaagcggaagccaggacttggaccaatcaacacaggcgcgacttgggaactaggccgaaaccctaaaactcatcatagccggcttgctcctggaagaactcctcatcagcaggatccgcttcatcttcttcagcaactgggggggattatttatatagagcaagggtgagtacgggagtactcagcaagccatgggaaataagtgtttaatgcaggcttcaaggaaaggctggtgtttttgcaattaattttaattgaactcttttctgaaacaactaagtgagtgcttctcaaacgacacggatgagacagtgcgtctcgtccggtcggagtatgtgcaatgtatcagtctttagaatttaaacaaggttggcacccggccaacagctttttcaacggccacccgggccaacaacttttcaaacggccacccgggcctagctgatcccatcagctgtagatttttcaaacaccgaaccccttttcacacagcaatttcacaagcagtagtcaaaccaaactacgctaggaatcacctcacatccgcccatgaccgtgggcacggctgttcgaacagtttgttaacctctgcagagggggtacactttacccacacgacattactaacccggatcacccagcccgtggggatcagccacgtcgggagacctccaagctttcatgacaaggcatttccaaagccgacacaggtttaccatatgtcgacgagaggggtcccagaccaacaacaggttaggtcccagaccatactgtgccaggaagcccaggggtcctccccgacaccaccccggcaaatccacatgtctctcggcatcaaggctcccctgataagctagttactcagccaggggtgtcccattccacccatgtggtcgtacttgtcttatgtttggatgaaattccaaggaatcggtccttaagtgcgagagcgggaaaccgtacacccggtacgtttcccggtccgcggttttggaaattcatttagttcgcaagcaccgacccaggtgtcgggttttccaagtattttgtaaaactccagttttacccaagttgttactcagattttaagtttgagggcaaccgtcgatactggcacagggtgcacgaatatcgaggcgcaactggatggttacaaggggacatggtatagcaattaacaatggaagaatcaaatgcaacaagttaggtaggtctaccaatctgccttgcagacggaacaacagattaagtgcaatcctatcaatgcataatattttgcaagcaatataattagatttcaaatataggctcaagatgttcaaaggtggcttgccttgctcgagatctggagcttgatcctcgaaatcctcgcactgcgggtcttcgggctccgaaactatacgcaaaacgggacaactcaacaaacggcgaaaataaagccctattaatgaactctaagcgtgccattagatagatctcgagatttgagaaattttggaatttgaacggagtcaaacggatttacggttgggaagatattgaatttctaagattattggatttttggtctaaaggaaaaggatttaattaaatcccttttttttggaaaagaaaaagaaaagaaaaggggagagggagggaatatagacttccctcgggcggctagggcgcggcccgagaaaaagggcggctcggccgagcttaacgggctggccggcccaagaaggcggcccacagcggcccaagacgcgcgcgcgggggagggaggagagagagccggtggaccgggctcaccatgcgcggtcccgggtgggacccgcttgtcagcggctcggctcaccgtgcggagggagtacgcggctcatgcgcgcgggcgggggagggacgcggtgcacgcgcgcggttcgcggtggacgcggatgcagcgggcccacgcgcagcctcacggctcgcggtggaacgcgcgcacggggagggactgaccggggttggctcgacccggtctaggctgagctggcgccgacgtggcgcctacgtggctgccacgcgggccggcgggaggtagacgaagacccggccacgaatggacggcgggcggcagcggcgagcggcggagcgaaccacggcgatacgggcaaaagctagcacaccgggcggttgctcgtgatgaggggagacgagccaacggctcggatttgccggaggaagcttgacggcggcgaatcacggcggcgacaaccggcggggagggaagagggaaacggcggcgaggccacgaggggtcgattcccggcggtgagagcatctacgcggtttcgggaactcgatgctagcgtcggattggacggagctacaccgagcgaggctggcgacgtgcgggtgctacggagctcgagcggtgacggcggcgagcacgcggcgagcgacggcaacggtcggggcggcgccggctaactacggggagtctactcgagctactaccgaaagctagggggaggagatggagcgaggaggaagaacggagggaggcactaccatgcgggtcggggcgctgtgacaagaggccgacggcgcgggagtaatctctccggcctcgggccggggaagaggaaggagagggcgcggccgaagtcctcttccgcgtccttgctcgtgccggctcctccgacacgcgcaacaacgaacggcgacggcgaacagagcacgggggcggcggcaatggcgcggagacgaaagggagaggaaaggaagggagggaggctggggtttaaatgggcggcaatgtcggtttgggaaccgacttgcgcggtcaagggcgcgagctagcgctcggcggtcgcggccaaagcggcgacaggtaggatgacgccggcgggggaaaaggggaaaaaggagagggagaaaggggcttgcccttttgccgattcgggaaaaaggaggaggggagcgggggcgacgcggcagagggaggagggacgctgcctccgtcccttggcggcttgcgcgcggagtggcgggggccgggcggtgacgacggcgatgacggcgggcggtttggagctgcgcgacgacacgggcgacagacgcggcagggcagcggggccggacggcaaccacgcggacggcgcagacgaccacgcgggcgcgcgcgcgaaccacggcgcgcgggggctggctttgcgagcgggaagctcgccagggatggggagaaggggagcgaggggagggggcgctcggcgcgggcgactcccgtgcacgcgcgcgcggcgcgcgggcggaacggagggagagggggagagggagcgcaccggggaggggagagggcgagagagagagaaagagatagagagagagagagagagagagagagagagagagagagagagagagagagcgcccgggagagggagggccgggggagagggggagatg

SEQ ID NO: 7769 - DNA, 7005 bp, Oryza sativa
cccccagggggagatgggccgggaggaaatcggcccatcgacccccgggggaggcaaaatagacttttgcggaggaatttgatttggaaggattggattcggaattggactcgacgatagatcggggattgagatcttgagatggcacgaacactagacaacaagcaaagaaacaaatttcgcaattagggtttttaagagataatttttccgctaggcgccacgacggaacgggcgctacaataatagaataaaacatcccggcctttgctcatcagagctatagccaattattataaaagtaacacccaaacactgagtgtagttcaaatgaattaaacacacccaacgaaataaaagatcaaactaagataaggagagcacatttattcaagtctatctgtgaatcttcatccatagtttgcaaggagttgcatgaccgttgtctcaagcctacgacatgcaaccttcataagctctcgatcatcttcacacatttgcagctgtgcccaaaatcggagccaatatgttgccctgaaaatcacctgcatatatgagatagatggtgatttgtcaaaaaccatatcattcctagtcaaccgcagagaccaacatatggcagaagctcctacaagtatgagtttactcttcttcttgtctacccccaagagccaaccatcaaacatattagatatggtagtaggaaggtataaaccaagagagaactgtactgctctccaaacaaattttgcataatgacactctataaaaagatgttgcatagtctcatttttcatacaaaaacaaaatcttaaattgccattccaatttcgtcttgccaaattatccttggttagcacaacccctttaaacaagtaccacataaaaatcttaatcttaagtggcatcttaagcttccaaataatcttgtttatctcaatataaccattattagttaaagctagatacatcgacctaatagaaaatattccattctgatgataattctatctaaagctatcagaggattgattcaattgaatatgtacaatataagcacacaattcatgccaatatgcaagattctgaccaactaatgatctcctaaaggaaacattgagtggaacagatctcataacattagcaatagtagaacttttccttcggacaatagagtataaagatggatatttgtctttaaaagccaagtttcctagccatttatctttccagaaccttatttgtttcccattatttataatccaagaacccatatctaggtatctttgaccttcatgagacctgacaaaaatgagaatcgccttgtttcttattaacttgggtcatagactaataaattattccgatattacaaagttactaaagtataagcttgttgttcttcttcctcctcccataaagttcttaacatggaagaacgtagaagtcaaagacaaacatctaagtcatatacaagactttaaatccgtggcatctcactatatcatattttttttaccaccaacaaccaccgccgggtcatcacaacttatccttcacttcacctatccaactattgttgtcgatgttcgtcctaccaatgatttgttgttagttcttaggattgcttagctcatagttttgtgtgggaacagagcacatcatccactaagacaatagtgaaaatgctgatgctcttgtggcaccagtggcaggagaagaggctttagggaagcggccatggccacaatggttattgaggttgtcatataactttatggaaaaactgtcatccataactgactttcctctattacttaaataatgaagttgttctccttcctgttctcccaccatccatgagcggttggatcttgattcgaactcccaacctatcatcagccacatatgagcccatacaacacgcccaaaccaatcgtgcgtgcttattggtatgcaagatatgttactagtcaaaataaaaggcgaaacatcctatttagatcatctttttcgatgtccctccttactctactattttgttcccctagtaggttaggcctacatgttagttactacttacccatgttttgggtttggacctaggacaattatagactttattgagcttggttgaaattaagaagggttaatttgttaagttcgaataattatatatcaaattttgaagaaaacttgtacgaatttgaacctctctcatcgccatgacaccgagaaaataaatatgattttttttcttcgtctaaatgtaaactttcagatggaagtgtgtgaaataagtgtgcatgcactcatttcaaaacagctctggtttggaacggagtggtatatactccactaactgtttgaagttaggttgccatccattttattgagggaatattaattgtcatcaagcggtactacgtgtgaacttaatcggaacgtggtcgtggtctgaccaaaattagctgagatttaagtcaagcagacacgtgcactgcagtttgagatcagctgcgtcttcagaacaccaaacacgcgtacgtgacaattggcaaccctttcgttcatattcatcgatctttcaaagactcaaacgtaggattataagccaaccaattaacgatcaatatatggtactccctccgttctaaatatgctactttgaccaacagtattcaaaaaagatgttttaaataaaaagagttgaatattatgatagtttatttaataataaatctagtaaaaaatgttaaaaaaatgttagacttgtcactattctaaaaatacttatattttgtgacggagggagtaagatctatttgattcagcacacgaaaccccgaaatgcagcgattaattaattagttgacaaaaaagataaagattaaaagaagatgaaacaagtcacggaggtgatttgaaaacaagggcatagtagtactattgtgtgtgtgtgtatagtaatagcgggtgttcacaaaacgagtgaaacataattaattaatccaagtaagtacacaaaagaccatggatcgatatgatgtagattgcatcaacgaggaacaacctgtactttggccatagataagatagaaacggcgcgaactgaactaactaattcagcatgcatcaagttaacagcgacacactaagctatagctagctagctcgtcatcgatccgtccggccggggcggcgagaatctctgataggtcgtcggatcagccaggtgcatgcacgaacgcaatggccgtcgccgtcgcgaagaagcccttgcgcgcattggctggggttttaaacttttggcgcggcgtgcagtggttaaattagtcgtagcacgcctcgccttgtccctctcgtcgccacacgcgtcgccgtgcgcgcgccgccacctgtagctgtagctctgtacatatgcatctcatccatcgcttaattacatcgacctgcaactactggcacacatgtgtacagctctcgctcatgtcatgcctcctctcgacgacgacgacggagacggcgatctctctaggtaattaagctagctaagctcatcctttatttggagtacggagtactccactatctactagcttgccaaaacctgacaccgatgtggatgacggcaattactaattgtgatcatcagcaaaagctagctaagctcaagtggatcaaagcagcaactgtggccttatctgatccattattgatatatatcaagtgctggagtatgtgagttgcatgccttttttttcctagccttttattcctttcaaacgtcatccatttatatatgtatttgtatacagagatgctgtgcatatatcgatcggaataataataagaagaagaggataacaaaaataacttcactttttcagtcaattaggtagaagcccatgctgctgattgccgcgccatacatatatatatgatgggacgagagagctagctaggcaaaagaaaatggatacatagatacatatatatataatcgatgctagctgctactgctgagatggatgagaataaattaaaggggtcattcgatgtggatatatggcggcgcagatgtatatattactccgcatattacatgatctagaaaaccggtcgaattaatgacttaatgtgacgacgacgacgaccacacaatctcctgcatactggtagctgatagtagctagctaacctagtgctagcatctcttgaccattaattccgattttctttaatttgctggtttcatcagctagcagccacacgaattggtgaaataaaaaaataattatcgatgattaatttgtctcgattgattactgaattcaacaacatgacctggcgtatcagctagaacctagcttgaaaatgattggaccggatcgagatctacagtatacagataacagatactgcaaaactgaatcacaagtacactagccattagtactaatgatgagaagtacctacgtacttcggccagtttgtcttgcatgcgtggagcggatctatagtataaggaccgatgactctcgataaaatctagtggcggagccagaaattatataacactggtagagaaaggggctttactcccggttagaaacccccctatagtcccggttatacaaccgggagtacgaatccgggactaaagatacccatctttagtcccgggtgaaataaccgggactaaaaatccatctttattcccggttggtattaccaaccgggactaaaaatggtggagcagtcccggttgattctttttttttttttgttgttgtttcattgctcaatcgatttgctccctaaatatcccaaatcatccacaagcatcacagatttgggaagaaatacatcacatattgcaaagaaatgcatcacagatcacaaatacatcacatcaccaaatctcaaacgaaaaatacatcacaaatcctaaaagaaatgcatcacaactcaaatacatcccagatcagatccaatatcacatacatcacagatcaaatccaatgaaacacaaaatcaaaaaaaaaaatcggcagcagatgggagggcgccgccggcctcccggtccccgtcctctcggcgtctgcgccagctcggccgccacgcccgcccgccgccgcggctcctgccgggcgccgctgctaccgcccggcttgccgccaggcccgcccgcccggccgccgccacggctcccgcccggcttgccgccgcgcccgcccgcccggccaccgccgccgctcgcgtcgggcgccgccgctcctgcctggtgccgccgctaccgcccggccggccgccgctccagatcgaggggaaggggaggaacggcaggggaagtggagaggaaggggatgaaggggagaggaagagggggtgaaggagatattaatgagaggggaggagatcgagaggagatcgcgcgcggctctcgggatagtctttgctcccggttggtataaacaaccgggactaaagatctatttttagtcccggttatttataccaaccgggagtaaaaataatggggatctgtctggaacccgacaactttttgaaccgggactaaaaatgatctttagtcccggttggtaacacaccaaccgggattaaagataaaaaagtacacctcaacttttcaaccgggactaaagatgctttttagtcccggtttttattagaactgggactattgtggaatttggccaaccgaccaaagatggtttctccaccagtgtaagactagagctaagttagggctcgattaatggagtattagttttctaaaaaaattacatggtgaatcaacaaaatttaagcaagtttttggaggcaggcctagggctcaagccctagctgcactaggcctgcctccgcccctgataaaatctatagcaaaattgtttatctatatattataacatcataatctaagtataattaacatattataacaacgatagacacactttaacaccaacaaatcgattttctgaatcggccatgcgtcgtccttaattgggtcgttgagtttggaaggaataagtgaccacgcatgaatacgcatacagtacctaccaactactagtagctaactttcactctccatgtacatatttcttcttttcggccactgaatattgaagctgtagtacgcagcatctgtacacacgcgcccgtgcatgcagaaatcgacttgcattgggtcaaaggaagtaagtaaggttggagccggccaatggtgtaagctagcttggagaaagagagaagctgcataacgactgcaattcgattgatcaggacaattaagcagttagctaattaagctaccagcagtacgtagctaattcgatcgaagaagaaggagacatgcatatataggagatgcagattaaggaggagcacacgtacgtacgggcccctgcttaattaattgtatgtgtgattatacattactacattaattatattcgtgcgtacgtgcgtacgcgcgtgtggtacgtacgtggccttcttctccccacgtgcaagcaagtccggtacatgcatgcttcctaccctcctatcgatctctccttgccccttatcgtacggctcctccctgctcgatcgaatatactctgaagaaatgcatagcgactagcgatcgagagtttatgtaggacgatcgacctgtttggttgtctgaagaaatagggaaaatattttaaactttcgaagaaatgtcctctctcattgtttgtatgtcactcgaatagttatgaaaaactttgagagaaaatattaacaatattgatcgatcaaaaaggaaattcagaaccatcgatcaatcagctgatgagagaaattaatattgtcggtgacatgggatcaggagtatcatgactagaggtttgaggcagacacaatcgcacacgtggcctggtacccccgagggacgtcgggcccgagggtgatgcgttcgccctcctcttagtccccccgaggggg

SEQ ID NO: 7770 - DNA, 82687 bp, Oryza sativa
cacctaaccacatttattgcggtttggctgagcgtgtcacgccgcatgtaacgcagtgcagtgcactcgtttatccggtctgtgaccagtcacagaccggtcagatcgcgggttaggtggcgacaggcgatctgacgcacgcctcgccccatcccgtcaggacgagggcttctaggcgctcgtccccagctggagctagcgtgttacctcccagagatggcacgttagtcctggtcagatatatgccaggcttcatcctaaccattacaggcaagatgttgtgtgaagaagggcgagcatgtagattgctaagttgacacgtggtggacaagaatgaccgacgtgactggtctgataccggtcatgtcgtcagcagacagccacgattccacgtcgcacctgctcccggcgaaagtggaggtagttgtgggccgtctcatcagaaggtgactcggacggcaactatacaaatctccgtccatttatgaaaagggggggtaagtccccacaaaaaagagagaaatggtgcatgtggtatccccttaagatataaaaggaggaccttgcccactgagaggggggactggacttttccagattagaaacccagaacaagggagaggctggctgatactttgtagctccttcatacacagatctcccaaaacacaggagtagggtattacgcttctcagcggcccgaacctgtatacatcgcccgtgtcttgtgtgtttcctgtctcgcgagccttccacatacagagagcttagaatctctccctgagtccccggccgaaccggcaaaggggggcctgcgcggtctcccggtgaggagccccacgctccgtcaaatatacaagagaacaaattaagttacgagacaagctaagtttgtacgtgttgattaattatcttattaacatcgatctgcctctcttttctatggagaatttcaggaattaatccaccatatttctgtatgcagtcatgcatatatagatgcatgcaagagttaaggaacgaggcggccgggtgcctttgaccaccagcagtgcagctctggtagcttcatatatactcgactcgatcgtagcttgcgaccacggcacgctagctatatactcccaagtgaagtgctgttgcactcaacggaaagagaagattttgatggcttaatttgtcgtggtcaccacgatcatgatcatccatctcacaattcatgcagctctacatgcatggaacgaccggtctagctagccatttctttttccccctttattttttccatggaataattaaacaatcctagagtctcttcatcaaagtagacgttgatataaagaccgtttctcttctccagcaataatatgcatgtatttaaatatttataattatatacgtacttattgtttatgctccaaatgattgtcttccacaccctgcaggttttgcttatcatttatgtatatgtgctgccatattgcaatcatctgccaataaaaaaaatgcaacttgctgatagcccattgcactttgcacaagacgacaattaaacaaggaaaatccacgtgtatatatgattaaccaccatatatatagttgattatgattttattatgtggcgttctagctttgatcggctgcgacgacatatatgcatgtacacggatgacttgaccaaatgactgccgtaaaaggacagactacccggccggttcgatctaaaattagacgataagaacaaaccaactgaccagtagtaatacgttgagagaggacgtacgacaaaacaattaacatgtgtttcaaataaaatatatactcccctttcctaaatatttgacgccgttgactttttaaaacatgtttaactgttcatcttattcaaaaacttttgtaaaatatgtaaaactatatgtatacataaaaggtatattatttaacaatgaatcaaataggaaaagaattaataaatacttaaatttttaaataagatgaacggtcaaacatgtttaaaaaatcaactgtgtcaaatatttagaaacggatggaatatgtatcgaatagattaacctcgagctagctactggcagacataccattgacaggtcaatttatagaactcgatctcgatcgaaagatgaaccatgcatggtggccaccttttaattatcgtgacatgcacttggaaacccttttgatctcttaggaaagctagctgcagacaaagtagtgaactagctgtacactctgaataagtagttcatctcaagaagatagacgagaataagaagaagaaaactttcatgggagataacaacgtgatgtttatcctctcctatatattgaccatatatattattttctctcattggccagctaattattagcgtacgtatatatacggctctagatcgggcgccacgtacgtgttcggattaatctctagctggtaattgatttggtaataatagtgctgagatagatagatcagctggacaccagagtccgacgttccgttgaagcatcgctaatgtcgattagtacagttatggtcttccaaggtaaaaggacgtacggttagattaattgtgctcaatgatgaatacagccattcccttactgtttgctgcgtccagtttagattgtgacatgaagaattcaaggcctgcatatatatatgcgcataatatatataatgtcgtgtagaggaagcttcaatgtacctgtaaagatccttaaaccaacttgagccaactctcccatttactgttcttattttcaatcaagaaaaataccttcatataagggcaggtgttgtgtaatttagtttactagctagggcatgcttgaaagtcattcattttgcaagcttttcatatggaacaatttgatttaatttacgagcatgatcgatgagtgtttgcatgtttacacggatctgacaaattaacttgttctggaaacggtaaacaaattaaactgaacttttctacgaattaacagctgataacgaacgcatgttctgaacctaacttttcttttaaagataactatcttttgaacctaactagagggtccaagttagatagggaagttctgtaagtgcatccatcttgagatactaaggctaagcactaagctagcaggaagcaaggtcagttaagcatcagcagctagcagtagtgtagtacaacctggcttcctaagaaaaagatggccagccagacacatggttttgaatggttggctccggtaattaccaacgtgatcgatgtaataaatcgtgttgatcacagctggtaaaaaaaagagagagagatgaagattaatttggtgagtttcttgatttgggatctaacaggtgtcgacattggcgaggagcagatcacactagttactgccgacgggacacgtgtaggctggttgtggaagagacggttaaaaaccgtaagatacgccactcttccgagtccaatacggtgagtactaaagatctacgtattcctttcgtacgtacccagctagctagcttagctactgcctattattcgattgatgtttctttcacccgtgtgtgcgcgtgtctatgtctacgtaaaaacgtgctttcttttttgtggaaaaggaccttccaatgataaattgttgataaagccaaaccactaattagcatagctgcagtgacaactgacaagggcatacttcactcagtcagatatacagcccattgggccgtaaacacttgggtctcactcccgttcagactgtttgatggcccaggtgtatctcaagcccatacgacactagcttgggccttgatgggccgatacaccataacaacttgcgctcaaagtgggaataagtgcatccaaggtctcttaacttgtcaacgaattcgattttcatcctgcaaccacaaaaccagatacaacggatccctcaattatcaaaaccggtgcaatataagtcccatggtggtttggaaggcggttttggtttacgtggcgtctacgtggctaaattgacccggtcttcatctgacgtggcaatttgatttggaaattaataaaaagagtgaccccacatgtcagctacaccaaaagaattaattaaaaatggtggagcccacgtgggctccacttgtcattcactcccctaatcttcttcctcctctctctccccatctcccctctcctctctccaggagctggcggttcggcgacgcggccggccggcggcagcggagccagagatgacctcggagacgaggacgccggggagctgcgcctggacggggacgccggcggtgattgttgttactggactcagagttggtgttgttgttgttgagctcaccgtggtaggagctgagagggggagaaggagagatggggcggccgccgtgctgcgacaaggcaaacgtgaagaaggggccatggaaggcggaggaggacgcgcgccaagctgctagcgtacacctccacccatggcaccagcaactggacctccattcctcagcgagcaggtcgtgaaaatcaacgatatcgccattgctgctaatgggatcgagcttgaggtgcatttgatcatatcagatcagattaaaatatggtgtttttgtttatctcttctttttccctttcggcgatgcggcgtcaagggaggttcggcggccaacgatgccgcggcgaccccccgtctgacctcctcgccagcgtcgagtcggtcgcctccgccacctcctgcggcatccacgtctccaagttctccgtcagctttccccgacgacgaaccggactccggcttctcgcccgacgacccggacctcctgcgcaaccgccccgtccccgaccggctcctcgtcgtctccgccggcgtcgcagccaacctcctcttcgccttcctcatcatctacacccaggcgctcgccgtcggcgtccccgtccaggcgcagctccccggcgtcctcgtctccgaggtcatccctggctccgctgccgccggcctgccgcatcaccgaaccgccagctcctggagagaggagaggggagatagggagagaggaggaagaagatgaggagagtgaatgacaagtggggcccatgtggaccacaccatttttaattaattcttttggtgtagctgacatgtggggttactctttttattaatttccaaatcaaattgccacgtcaatgccacatctatgccacgtcagatgaagaccaggtcaatttagacacgtaggtgccacgtaagccaaaaccaccatccaaaccgccatgggacctatattgcaccggttttgatagttgagggacccgttgtatctggttttgtggttaagggatgaaaattggatttgttgacaagttaagggaccttggatgaacttattccctcaaagtctcaatttgtcgccagattttcgtccttaaccaaaaatacaatccctcaacttacaaaacctatacaaataaggttcatacatagctcttttgactaggctgcttcatcctacgtggaattgacgtgacgcttacacgacaatttaatccggagaacaacaaaaggagctgacatggcagcagagacaaagtgtgggacccacatatcagctgagtcatgctggcatgtgggatcaccacatggacacatggtcaatcttcttctctactgtactgcccctaacagaggtacagaactggagtagtatagatcaagaaaagaatgacaggctcgtcttactttcaatggtacaaaaaaaaaatgtatataccccttgcatgcaagtatgcaactatgcaagctggcgggtccttgtgtatcactcattatcaggctactgtatagaagcaggttaaatcaatcgatttcagtaacaaaatggtcacttggggcgtgcgcagcgccgagcaagcgaacaccctccagatccaaaactttacggcgatgacgccctctgatcgtagctcccttgctgaactttctgctgtctgtctatcaagatgcaacctcaatggcacttcccagtggccatgctgcttccacaaacgcgttgctgtaagggactttctttaccaaggtcatctcttggtgagaaccaacacctgcgagagtgcaagagcaaaacaaattagtgataaatttgtgcaaaatctgtaatgcggtcttgattatatttagttttaacgagacataccaaatccatccacaagtaaggtgtactggtaaacgagatccatgcagatatatggaatgttatccttttggacaccagggtaggcagcttcggcgtccttcaagtttaacttacatgcacgcttggcagccttttcaaaatctgaaggtttaaccttagccacaggtgccttgggattcacaaatccagcctgagcagagaccagaaaattgtttactggtgtatcatcatggcaacaaaagcaaacatcttcagtagttcaacaaccttacctcagctgccctgtcgaagaaaaatgatgccacaaacaaattcttctgtccagcgccaccaccaccattccaaatgccaccaaaagaacatttcatgtgagtgcatgcttggtcaactttaagagctttcactacatcatccctgcattttgaataactagcaccagatggtgaagccgacgcttcaaatttgccattgccatatttgtattgccctacaatcacaatgcaattagaacaaaactatcttaccaacatagaaaagataaaattgcatctccaactattgtcacagattggtcatttgtgttgatgaggatttagatttatacacatcactataaataattctaactgcagactgatggttggaaagaatatcaaggaaaccagtaaggtatttgtttcatagagaatttgagggtaacctcatttaaaccaggttacgatccactataagggtgtgttccttaccacctcttcccaacttctatttctcgttttccacgcacacgtttgccaaactgctaaacggtgttttttttttttgcaaaaaaaattctatatgtaagttgttttacaaaattatatcaatccatttttttcaagtttattttagctcatgcttaattaatcatgcgctaatgggtcgctttgttttgcgtgtggcgaggtgaagttcccaacctccacctccgaatgcagcctacgcattacattcctcccttgaccaaaatatgcataagggtaacaacaattgaaattttaggaacaaacataagctacttggcagggagttaaatgatagcagaagaatatggtagaagtatgttactagtaccttgatgcccctccaatgtacagtagctgtaacctttgccattgccggcttttaagatctctgctctagcagccagcaacccataatgcaaatagctgtgaagaaatgtgtacagttatatatgtggttcaaagactccagactaaaaacaggtcatgtgatgtcatcttatacagcagataataaaaaagtaaggagtattaagtttgtggctatgtcagattaagtgtttgctgtagaacattacatagaataccacgtgatatttaggtagaatctttacacataaaagtacccttacgtttggtctggacttaagtttctcaaatttgcattaatacgctattcttgcatttttatcaatacgagatagtatcttagaggattacaacagctgtctgctttgcaaagaatataacctatgaattggcataggcagacatcagaaataggcatgacaatatgccatcagatgcttaaatggattttgaagattgttaccgtatcacaactgaataacttttttcttgacaatgtagcagcagccaaaagctcaacggtatttcatactaacctgtgaacataaagataatatgttgttcctttaagaaacagtttcttcacatatgaatcttcaccctctgatggtttaggagccttcactgcatccttctctgcaattgcatatgccatctgcacagatccacctccaagatcaaccactccaactgtgtctgcgtaagtctttcccaatttccccagcagataattgatggtaacctataaggatagagaagagcaacacttgttatcagttaatggactaaaagctagacatagaatcactagttgtgaacagatcctaaacactcaaaaggtgaattaactgtcagaacagtgcaccacatggattcagatgatctgcatctattttcagggaaaatgttgtttctggtgcccttactttcaatgtttagctttcgtcatttggattttgtttcgtcatttgtttctggtgcccaaattttgtttttcaaaaatgaaaatagttattttgcctaattcactcatgaaagcgaaaatttctctttttttatcatgtcctttaaaacttatatctttgaagctggcagatgtcagctctaagagaattggcagatttgttgctgaacaaaatagttttttctaaacaaaaagaacttatattgtcaatctgacaaatgtgaggcatttctaataatcaggagcacaaagtaatgttctgaaccatatgaataaatcaggccagttttgtacccattcatatgcgccttcctgaggtccatcaagaactgtaacccaatccggttgggtcttgaacgaactcttttcgcgaagaagatccctgacctgcaaaaattgtgagtgtattcaatattagggacaaccaatataaattcagtgatcgatcaaacaacaattaatcaaaggtgaataaaagcaaaatttaccgcttgcaaaatctcctctgatttttctgctcccaacgctcttagcccggcggtggcctgtgtgtgaattataaagcttattattagaagatgaccaagcagcaataggaagctctactggtatcgtacaagaactcaccccaactctaacaggagtctggccgcgcaattccacgggaaccactcgtttggcatcctcaaggagagagacgagcgatttggcagcctcctgcgggttattggcgtactcgctaagccccggctttttctgcaaaaggggaagtggggggaaattaagtaaaaatggattgagagatgaaaggatccctagcagatccagatccaattgggtggatggatcacctggacgaagagctcgatctggtcgccaatgtggagcagatcgaggttggcgtcgaagcggaagacgtggacgcggctcccggagctcccggcgtcgaaaatgacggcgtacttgttggcgtcgagggggccccacctcctgccggcggcggcggaggaggaggcgggggagcgcggcatgaggaggaggacgagggagacgagggcgagcggggcgaggatgacgaggaggacgccgcggtagcggtggaggcggtcggcgagcgtgtcggggcgggcgccgccgccgggcagcgcggagtagcggcgcatgttcttggcgtcggcgtcggagggcggggcgaggaggaggtccggggaggagggcgtgcggtagcggatgcggcccggcggcggcggcgacggcttgaccgcctcctgctccgcggaatccagggcggagagaggtggatctgcgcggcgtgggctctgcctctgcctctgagatcgcagtggagagtataacgggtggggtttgacttggcggggatcgcgtcgcgtcgagatgggcgtcgtcgcgagctggaaatgcgtgcgcgtgcgggtgcgtgtgcgtgtgtgtgcggcgttgggatctgcggcgagagaggggttcgctgctgctgctctgctccccggcgagccgagcgccagaggaagaggacaaagtggcgggcttggaatggggacgcgacaggtttgctcttgctgacgacgatgcggatgcggtgcggtttgcttcgtgcgcgcgccggctcgatcgatcgatcgcgcgtcccccggtcaccggctttgcccgtttgccgtgcgtgttgctttcagagtttggctaatctgtgcgcggtccacgcgtgtaccgtgacttggtttggtacgatcgggcacgacatgttccttggatttgaccatgtgtatacatcaagaggcgaatgcgatcgatcttttgtggtttgtttatatatccagaatgcttttattttcattcctttacaaggcttgcctctacggcttatgctttttttctcttttacaaaattaaagtgttgatgaatattatttattccagaattatatattttgatttttactgctttttctttaagaggggttaatgtaagagacaaacgaccctgaatatataatctttcgacacgcaattattggaatattcaataattcgcttgctataattgagcatataagcagtacactcttgttgtattctttgtcctctcctcttatgcacgaggttagcttctcttgagggatatcttgcttatctatcatgaataacaaacgcttttctcatgatttcttcttgtcccatctacatataagataacatatgtaacctaacatgtctaccgaagagcatattctctcctctaatgcatgaggtaccatttataggcggacattatgttgtttgtctattttaggcgtatagatagtagatgattatacgacgaacaactccaatggctagtgtagtattatcgctattggcatttatgcgttcctatgtattgtattcaagttatagtaatccttccctttttaataatacctccatccagaaatatatgggattattcccaattgggtacaaattaaggaagaaagtatacaccaaatctgattgtgtgaaaagacatatatagttaacacgttgaatgatgtgcatagagtacatctttaaaaaaaaactactaaagtttggtaggagtgaatgaattttaaaatgcactacatattagtattaatgagtttgtgagagccttatatgctgaaatcagtttgttgctgcccttgttgcctcagtataacaaaaatcgtctatattcttggacaaatgaaggagaaataatcccctatattcccgggcagatgagtagatgtcgacaatgattttgtttgcaaaatgggaaaaaataagataaaacctcctgaaagaaaaaaaaacaaaaaagagatttgacaaaattccatagcccaggtatcgtgatagaaaattttgaaatacgttttgtttgcaaaatgggaaaaaaaacaagataaaacctcctgaaagaaaaaaaaacaaaaaagagatttgacaaaattccatagcccaccgagtcaaaggagttactaggccgagggcaaaagttgggccgtaatcggccagccgcgcaagaagtaaaggaggcttggactgcgacgtaaagcgcgctctgggagtctgtgggctggaagcctgcaagcgccgggtctgggaggaaggctgggccgtgttgtcgcgacgctatcacaggcacatgcttgaacaacacgctgggcttgcttttgaccgcgatctcactcgattctcttctcgttgacttgtctcgtgccattttctcgtctcttcgctgtatgcaccatgtgttcacgtggcacgcacgtgcaacgtttcatataatccacgcatgtgttccctttttgactcgtacaagtatgaatagtatattgcggtgctataccttttctttgcgtatcagccatctactgaactgcaagtctgcaacgtgatgcgaaaagaaaaaaaaagagctgcaacgtacgtgatgcgaggactgtatgaaactgctcgcttgggttgggccttaaggcccatcaatatcgagtgcttagtaatatgggccgcttcgctggcgccgctgtatacaaacgtgacgtgatacgtactagtacagctttgaacgcacctcgtcgatcgatgcaaagtgcgatctgcattaatagcgttgcgtctccttgccaacctcctctgcatgcggtcgcttcccaccgacgcctccatcacatcggcgcccgtcgcggtcaactcgaaatcaacataccaccagccgcgcgcgtgcagccgtcgtcgcatctcaccatcgcagccatatcctctccctctcccacttcgcctcatcactactccgttccctaaccaccattcctcgccatggcggccccggcggacgactactacggcgacgacgacgacgagtacgacgactacaacccccacccctacggcggcggctacgacatcttcgccacctacggctccccgattccgccctcccccaccacctgctaccccgtctcctccgctgctcctacggccccgccgcctaagccgtcgcctactccgcctccggcttctccaccgcctgcgcccactcccccgcaaacgcggccgccttctccgccgccgcagcagcagcagcctcggccggtttcgccgccgcccgtggcggagccgtactactggcccaagccctacgactacggggatgcgccgcgcgagcagccggcgtacgccacgccggaggtcttccggggctggcccttcttcgcgggggcgcgctgccactcgcggtgcggcggccgcgactactggaggcagttcatgcgggggctggattacctcttcggccacgccgatggctacggggagcgccgtattggggtggactaccacggcgtccccgtctacgccaacaggaagggaggcgtcgaggaagccgtcgtcatacaagtggagccgccggccaccgggactgtagagtggcaccacgccgccgacgacccggagtacaactacaacaacggcaatgtgagcgaatacaccataccactcgggatttttcacttcacttctgacttgctattgttgttcacttgctacgtctgctgtcttgcatgttgagccagcgcttatcttgggatgacaatgccaaagatgaaacatatgcatatgtgcagcacaattacagttcgtatgatcgctcttatgatcagtcttacagtcttgatgccgtttccgatgaaactacttggtttcctaatcagaactaccagcacgtgtacaaagaggaggaatctcagtatcaggtactaattaacttatcactgatcaagaagaatgaggtcaattagtcgtcagcctgagtatttagctcaattgcgtgcaatagtactgtaatttagttatgtttgattcatttttctgagaatatgctagctaatcttgtcagtggacatatttgacatgtaaaatgacagaaaatggaacgaaaaggattgtttattttgagggagtcgctttctgtgactagacagtttaatcaatgacacattagcgttcgcgaaaaaaatcaatgatacattactcttgtgtagcattcaacagatcctgcctgctatcttcgcttctaatccctgcttaatattaaatttgcgtgcaggaaatcttgtccagctcttgtgcagaaagtaagatttcagctcagcctatttattgttacaaccagcagtttagtgaacaaccgctacatgttcttgttgagcccccagaaacagtttattctcagaagttggagtactatgaggtttgtctgtcatctacaaatgctgtttacagtgtcttcatttggtaattatgcatttgcttgttcaggttgagttcatcaatctcaagggagaacactttttttttatgtagtcttgtgattgtcaattaaataatttgtgcagagcttctcaacatacaaccaccataacagcaacgatgattcagatatgttgggacattcatatgacatacagctgcccgatgaacatgtgccagatgaaccatttgaaccaattaagccttcttgggctatgcattcgggatactatcagtcctgcacagatggggcatctgctgaattcgaaaatgtaagttaggtagttatttcaggaattatgttgtaaaaaaaatatccaactgagactatctttttcacatttgatgttataccgatatggtgataccttgctgcttcaagatcaaagtaattgtattattgaaattttcagtggaagctatcgttatcacatatgttgtgctactaataccttcctgaggcaatattattttttctttaaactccttgagtgctacattttatcggaccatgaacttttttattggactatagctacttatgttttcctttactaattcgttactttgacttgcagcatactttaagctccagtgaattcagtggtattgcaagcttatttgcaacttccttctaccctcaacaaacacaaatttatgagtgtcatggagatgagaatgtttccttgcagcaaaattggcagtgcaactggaatgtggtttctgaaaatgatttccaatcggtaagcgtaacggtgtctatgtctgtgaacgtgcttttttaataccctatactcttatttttatcgctccattttactcctatttgtgtactgttgaatgtgtgtcatggtcggtacacatgtagttgaagtgctaaggatggcgcacagggggcagaaccaagcggcagcagatagaccatcaatgcatttgccgcacctatcgtacctccttagttgtttgattcaatttgtttaggttgagatttgttaaactttttaggtttgttaggggctggctttatttaagagagcttggcattatctttgaaattaagagcaaattacaagtctactctctcatcccctgttctctctgcctctccccttttttggtgctgcctggtgccatctcattcaaccatgggtagtaagactgttaacctatctagctacttcccactcctatcttattagatcactccctaacgcccgaatatattatattgttcttggcctcatgggtggctgatgacgatcaatgaaaacttcagacatgtctgtgagtgatgctttttttccccttgcaaacgatagaattatgaattagtatctgttttcgttttggatgctgtaaatttaaaatgtctggacctttatagtatgtcccgtgtatcctttcacattcttctgaaatatttatttttgctatttaatatgcaatccatgacacaatttgttttgttgctcaagaatggccatcacatgatctcatttgctgaagttcaaaatggcactgcttggctgcgattttttgcggctgcagctgtgcataatgtctgtggctgtggcgcacagccgtggctactagcagcagacgcagccacaaaaatgacagccaaacaagcccaatatatctctttcagatttagttaatacttggttgctctttgttccatatattctgatgttagtgtaacttttatccacattcatgatctaccacacttgccagtgttagtagtaattgggatttacttgccaaaagaataattctcagactccagcagataagtgaggttaactctgtctttatggtatagttttcttaacaaatcagcaatctcagtacccttgctagacgattttaatgagtgttaatagtttggttgtttgtgctttgctggtattgttgctagatttcaactgaaacaatcttgtatggtgcccgcatcacatttttatggttgaaacatgagtgtgcaactgtgcatgcgatgtctccatgttgtcttttgaactgaaatatttctccatttttatttgcagggttacgattccaaccatatgaatggctccttctggccgtttggagatcattcagcataataccacatagtctatattgttgtaatttcactcttatcttttttatgtacatttcatttaaatttacccggccaaatgtaaatgaaaaaaatatatataagaggttatgcaccaatgtatctaggttcagcatataatgtaagatcattgacgctgttgttgaccataattacttctttttatagtgatatccagtttctttttaacctgagaccataccactattatttacattcaaccatacctctgaatatattatcatattcttgtattcctgagcctaagactgttttacccatttcaggttcctctaatctgcaccgcaattatttggcactacatgtttgacttgcttgaatatataagctgatacctactgttatgctgtttcagttttctttgagtcctggctgaaggaattagcgtattgcatttcagaaccaaatgagcttttcaggatcttcacagaacatagcttgctctgcgtatcatttgataattggtacattatggcattcctgtcctgttttagtttcttatgtcagttgaatcattatgattgatgagcgcctttttcccatcttccttacagcaagtcctactcagtataatcctttgtcagtagaacttttttttcccaatttatttcctttgtcgccaatttggacgggatgagcatatttggtttactactttagtttggttttcaagattatgcagatttgtgtgaacacaaatcctgggtatgatatctggtacaagttggctatctagaaactgtttgttcttaactcgtcaatcaatcataccagcactctatacagtactattttcaaggttttgtaccatcatgaaggcttgatcgtgaagcaacaaaaaaagggatttggaagtagacagctacgtcctgttgtaagctgtaacttatgaagacgacttcccttttccaagcacaatctaatgatagttatgctatctcttttggtatctgctaggcccataggttgctgctgtcaaataggagatctattgtcgttaactctagtgtttgttggttgctattttcaggtcaaatctttgcaactctcctggacctggcccaattaggtcctcctgtcagggccttcaacgggaacctggagagcgaggaaccaataataaaaatagaagttctaaagctacatatgacggtatgttgaagttctgaagtatattttgaacttaagactggaaaacatcagagcggctataggtcaaccaatagcactaactgatacacaggtccacttgttttccatactatcttatgcttgtttagtggatgataatcaaacaaacaagccttttcttccctctacagttttagctgccataatatattttacatttcaaagctttgctactgattgttccctgctcttgtgaaggtgtatcgaagggtaacatctttctcctgtaattaaatctgctataatagcaggcccactcattggagatagatatgtttttgattcccactttcttttcttgaatcatgatcttttaaataagattaccttacccctgggaaaaagcaaagacaggccatagaaaacagaaagataccgaatggatcttaaggccatcatagctctctgctttctcatgtcacctagttgagtccctgtagttgccagaacttgtttgtaaacagttgaagaatgattgccttttacattactacgtatatatctgtaccttttttttttcctttacaactgccagtaaaaaaagtgtcaaaaaagttgggtcgaacacaaacagctgtcccgatccttcaatccttttagcaggtattagtgctactgttaagcaaatattaactaccgccgtttaggtagtgatgcagaataatgttttaatacctgaaaccatttaaggtggttgctagttctacccggtagatatgtggagtaaacattatacctgactacctgagtgcagttgaaaacaagtgacttccacaaagggtaaccccttttgtttgtgcacctcaacttacagcaagtttagccagttagtaggaatctgggagaagtccttatcagacctaaaatgcatgccagcatggaactaaagtgtagagaaagtaaatgcatagcgtattatgatcctttatttccttcctctttgatgcaccaaatagctgcgaatctatgataagacgtttcttagtagtgctagtggtgtaaacatacaattcgtttaagccttgttaagtttgactgttttttataatgaccatccacacaaaattaccattcaaaaattggaaggttgttttctatatgtaagttgttatagaatttcttgtgatggcttctttcccttgctaaatgaacaatatcactatcacagtaagttatctattttttctatgcaatataagtaccaacaaactcatttgacaggctttaataatcagtgtgtacaggtctaaagtggattatatttggaatcgtattgagtatgcaccatctatgcttgtttgcctacttgtttctgctgtagttttagttttggtgcatggagacaaggacgagaagcatttgttattgtgaacacgtaggcccatatgatctcatgattctgatcagatcccactattaattacttagtgtattattgaaaagggaagggcaaagagggagtcagatttataatttatacaggtggactaaagttgtcgtttgaatggagagaaggccaaagctaatgatatccctattctctaatccaaactgtaatgtgtattgtgtaggcaacgaggaatggtgacatctacagctcgacctgagccaccacagcgacctacctgcgtttggcagaatggcaggtatgtttccccccttgcccttttatccgtgtttgcttctcacctcctgacaataaaattcaaacaaatccgacaagttctttggtggttgcttatgcaaaaaagcatataatctcagcatatctgtcatagtctcatagaattgagccgtgatatagatttctagcttccatgtagcttcctcaagatattgcgatcttgtgaagatggcatgtagcatagcagtagtgattctagtgtaatcggcgagatatctccactgtggagtggtctcttcccgaaaatttcgctgtgtccagcaagggtccaattggtacccacatgggtgggatccggggtgggggggttttggttactatttgctcccatctcctgctgttgtctagtgacctgaactgacccacaaacacacaagaccatgaaaagttttcttgctctgtagtatgtactctgtactggtgtagtgccttgcaaatccatgctgaacaaaaaacaccgtgccgcgcccatgccccatcctttgcagacccatagccagcctgcccaggtctctctgttggactcacttgagctgcctctgcctgaccctgagacatgcagtccggttgcaatgcaaattctgaccggcgaacagcgaccacgagacggtgatgttgaagggaatcaaaatcgatcagcaacatatgcatgtgggtgttgttccatttcgcttttggatgtactccccagtatagtggtacgtacaagagtgacatcaaaccactgtttcccctcacgggttcatatgagttacctgttggggctgtacactggaggggcactgtcaattcaaaatcctagcatggacattgccaatttactacgagttctatgtggttgtccccatgctaccgcatcaatcgcccaatcaattacccaaaacccaagattggacagtaggttgccgcacactagcctccctgcatatgcaaccagggtagtgtctgttgtatttgcgcaccaaagtacggcataatgtatccgcacaattattagcttttctttatttttatcgtgtgctaagattcctttggattgattggatgaatttcatacgatttatgtcggattggaattcttgggaaattttatgtcctttggaacaaagaaataggatgccagaattcctatagattggcctcatatgaccctaattccataggaaaataaacatgagctcaaacatcatgtttctatctttctttgacaagtcccatgcacccggtctctctagtttctctctgtcattaatttacttcctctcttccagaataaataaacctagaatatgatgtaaaattacctagtaaatctgaataagagcacctatccagattggccatagtaatgtacagtattattctagtatagttggtttatttttggacggagggatatatgtttacttcctacttcgtccgtaaaaaaatcaattttttgaggaataatggacaaacatagttcgttattagaaagttctattttccgaagggtgtagggaacggacgaactgagccatcgtttcacttaattgcgaaataagcgaaacggcatatttgcaaatgaaaagtaatttgtgaataaaacttttataaacgtgttcttagcgatctaaaagtaaatgctgaaaaataaacttcgttgaaaaaaatctcaaaatcaactctaaatttaaggttgaaaatttaaattttgattgataagcataaacataagcgaaaaaataggcccttcaaacacccactatcatcgttcctgtgttttggaatccgattcatgtttatttttctgatcctgcattccaaaaaggttggtgacctgctgaggtaggtaatggggaaaataataaatgctggtgatggcaacggggttactcttaccaataagatcgctcacaaaaatgtcgcatcagggagaacaaagcacccaaggtacaacactgttgtatcagcatcaattatcaacccatcgatgccagataagctcctagattagggacctgcctacttgatcaaggaagggagcgcatcagcaaagggcatcaatcataattagtactgaaacaaatgttcctggctaatctcttgacagcgtccaggtcgtcatgagtggtcttgagctgatcggttggggttcgccatgttacccatcgcattcactgtcacgtaaaaatcgatcagtgcaccccacacagcattcattgggggggggggggggggggggctcccgtgcgctgctgtaccttttaatgtctgatgtttgcagacagtggcttgtcagccttcgctcgagcgctagtggttgttgatctgggcaacagacattgccactgcacctcccaccaagtagtttcgaaatcccctcagattattattgataggcacttaagtttacctaatccttccttaattggcatctaacatcttttttgctgtggccaattcccataaagtccctttgcctactgtacgtgtaactcaaaaacaattttaggctctgttggtctgcagtaggtccacaaaaatcaaataattaattccacatctataggagtattatgttaaatattttgccctctctactatgaccaccacccaagtttacaaaactgaacaatttatattttcttcagttactaaaaccaatttaaataccctccagccgtaagaacttttcctgaatcatacagaacaattaaattcatatgaaattgatatatgtgcctaaaggggcatgagaacttctcttacactatattggttttgtataggatggagggagtacatgacactttgtaacgaaagaatgaccctgttatacttctaaggtacagtatattcgtggcgttatacttctaagttatattcgtggcttcaactagggcaattccaaggcctggtgatgtagggatcagttttgttagtgagccgcactacagtgaatggctacgtgactgatttcttggctacatagaaattgatcggtagagccgtagagatggctgcgtctacctagcacatgagccgcagcatagctttgttgctgcagagcagtcacgggcagctgaaacgtgcaggcctagtgatcaagcgcatcatcggctcgttctcgctttttaaactgccaaataatttctatataaaaattattctaaaatattaaatatattcaattttttaaatttgtaataattaaatttcttattttgcgtgtcttaattttaatcttcagtatggctccattcttttgtgattaagttgtatattttatctcgatttttggtaacatgtttttcaagctgttaaagggtgcatatgaaaactttctatacaaaagttgttttaaaatatcaaataaatttatttttcaatttgtaataattaaaacttaattaattatgagctaatagttttcttgttttttgcaccctaacttcattttatcttctatagagacgaacacaaccttatattatattaaaggggatacatgaaactatcccgttcggacgggatgatcccttagagcttaaagatattacatgataactggatattagccattacctattaagtatcaagagataccttagaggtatcatattgtccgaacgagtatcagccaatatctatcaggtgtgaagcgatacctcgtagatatcactccatctgaatgggataccatattgtagcatttccctacattataccactttacacatgttttcgcacatgctagctgaagaaaatattcggatcttatgtttggctctaactatgttgaaagttcactatcgatattcctcttttttcgctatggaacacagaaataacacaatatccgtgcttttaaaaatcgtactaggagttgaggcactgatagctccaataatcgccaagaactcgtcaacgaagaacagaggggggggggggggggacaggcagaggcagaggaggaactgcaaggcaggcgtgggcaatttacttttgatgattgcgcatctgacaagagtgtgcaaggacaggcactgacatgaggcacatggtgctgaatcagtgatgaggggcagccatgttgcagctgtccattgggtgcactctggtggcccccattcctttcgggtctggttctttttgttaacccgactccttcaaaatgtactcctactactccctactttttcatcagttttgtcacataaataaaaagcccaaaacccgaacgacaattcacgcctccgtctccgttgtttcgatggcagtttagcagctgccgacgacgtcggccggagcggaggaggaggaggtgtttgaacccaacacaccgccgtgcggccgcgtcaaaaatgtgtgctgccgccgcagcatgtgcagctacaattgcatcgccgcgtttgcgtatcgtatcgtatcatcaccggccttgtcgtgtgtccccctttgtatgagctgttgtggtccgtccggtcctatgtttgacaaacaaaacatgccagcagtaaaaaaaaaaagtacgtacacacaaactagtcacgtactgtacgcactcctactgcagtactgcactagcacaacaaagtagcaaacagtggtagctagatcaagcgagtgactttggcttgtttgatcaacttaaaattatgagaaactgacggccattttggattagtatatatgacggttttgttttgaagccaaatcattggcattgccaatatccaatttgatattttctatattctactcaatgcttggttctaacttctaaattggcctccaaccaaggccgtgtttatggggtgtttgggagagaggggctaaactttagttcacccccaactactctaaacttccaactttccatcatatcacatccaaaactttcctacacaaataaactttcaacttttttttctaaacttccagctttccccaaactttcaacttttttcagaaactaaacacagcccaaatacaactctaccctaccaaaatgttggtagtaccaaaacttgccaacattttggtaaggtattgaatcaaacaagccctgagaaacatgtagttgttacagttttttagtttctgacttatagtttattttttgaattgtaaaaccacagtttctcttgatccgaaaaatttatatacaatttggaggagtttctgagcttgggaaaagttagaaatatcagaaacttcctcaaacatattcagggactctctgcaattgtttgttttacactttcaccgttccttttggtgtgtagcagtagaagaacgggaggcaataatgtaggcaaatgtcgggtgtcttggtacgtaccctagctagcttgggtggtgcgggcactgcagtgggccaaacttttttttttttgtgtgtgtggcgtcccggttccagcgcagcagtcctgaccgagacatttgtctccaccagtgacaaatccgtcgtgtcatctcatgggggagctcacacacaaagactacgctacgccacaaatattgtctactccttccgatcgatcttttccatgcaaacgatgataccatgcactccttccgttctaaaatactatctcaagttttagaagtatactacatccctcctaaaatactttgttctaaaatgaagctatttttctatctaccttctcctctcaaccaatcacaaccattttttttcatctactttctcttttcaaccaatcacacacttttttcaatcattttcacctactttcttaatacccgtgccaacctcaaaaatgcttacattttgggacagaggaagtatatgagatcaacataatgctaaaaaaaatgattggttaagatgaaaagattcatggagaagtgaattgtaagagatggttatgattgcttgagataaagtaaatatgcaaagatttaagttgtcatatttttatataaaatttaaatgctgaaaaaatttatatcttagaacgaattgagtaaggttgtgttcgttttagagtttagggtgacaatgtcttgttttccattagtgtgctttctaaactgttaagcgatgtatttttatgctactatatataaattttatttatccaataaacatttttaagtctattataattaattaatcataagctaatggcttgtgtcatgaagttttcacctccatacgcccaaacaaattcagcctgagtaggaaaatttttttagaaatgaacttgtgccaattaccttcccgtacatagcactatagctacaatacttttttaaagagagagagagagagagagagagagagagagagagcatagcagcaatacggagcagtagttttctaggtgtgtactgtatgcctttgagacttaaaaaatttccagcaaagagaagtgcacagtgtaaacttgatgcatgtgttgctttgtccgtaatgattgatgcgcatttcacggcaaatttgagcaatctaagattgatcatgccccccccccccccagtaggttaagatactgtttagcatcttaaatgcagacaaaatggacaagatatcagctgtggacaaatgaactactcctagatcaaaaaagtgctgggcaatgaaggctagtcgtgctaatttcggctagtaaagtttatcagtacaagtagctgctacctaaggtcttatctttcggctcaataagcagttgagattgcaagtggatcatcacttcactagtaggagtatctttttttgaactatatattgatggatcacttcattatcaaattaagctgatcaaacctccttctatatatgcatagtacactagtaattaattagagagatcaggatactactctattaaagtttgcttatttactcagtatccgtgatttggttgggaggcaacgagcttataggagatctctcatgtatgcaagcatttggcgatctcatatataataatgcatcccaattaatacatccacacacagaatgtttcattttctgtcaacgaaagcatgcaggtacgtaagtaccctagctaactcaacttctttgttagtcattatcgttaagctcatcccccggataatcatgatgattttaaggccgcaagcaacataagcattgagtacgtatacgtggttgctaggactaggagtactctatcacatgcaaacccaacataagccgccctgtgtttgttgcaacgcgtttgatcgagcacacaactggagtagtagtaattaattaattagtgctggatgtggcaaattaaatgtgcgtgatgaatggcttgttaatgacgatgtctcacccagagagaccggcaacttaatgagcccagtgactttataacatcactgcccgtacaacacacattactctgtcataggcttataaattgttggatgtggatggatatattggatccggtctgaagcaaacgaaacacattacacggccggggcagcatccagccactacgggggtgtttaaatgcatgtgtgtaaagttttaacatgtcacatcggatattatatagggtgttgtatggagtgtttggacactaataaaaaaaactaattacataatccatcagtaaaccacgagacgaatttattaagcctaattaatccgtcattagcaaatatttattgtagcaccatattatcaaatcgtggagcgattaggcttaaaagattcgtctcgcaaattagtcgcaatctgtgtaattagttattttttagcttatatttaatatttcatacaggtgttcaaacattcgatgtgataggatgtaaaattttgaggtgagatctaaacaggccctacattgcatttgcatctgcatccatgcacatcatatattcgacattgcgatatgagaaaagctttagatttcgtcgcacatacgatgctatggttttatcagtcacgggcgcaagtgaatcagttgtagctagtagcttagctaggttggttgttgcacaggctgcagctgctttgttgcgtgcaacctggtggaccatgctagctagtgtgcatataatgcaatacaaccagcaacagatgcaaggctccaacgttgcattgctgcatgtatgtatgtatggacggtacgtgggcctgtcacatcggcagcatgcgtgcaatgtacaccggcaaccagccggcaatggcacgtccggttgggatgcacgctcacgcccgcaaaacctccttttcttttctcccaattacacgaaaggcacatagtacacgtgcataaaacatacccgtaaatgtgtacttttaatgaataatgtttggttaagacccgctaaaataatgattttcgcatgtgactctcttaagagacctgtctatgaaaataaatctattttcacagatagacctcttaataaacatgcctaacacaaggctcgtcctcactccctcttattttctcttctcacctatctctttaaaaaacctccttactctactcggccactcccctctctccctcttatcctctcctcacccaaggccgacgggagcggtggcacctagggcagtgacggcgggcggatctgaccccagcagacggagagacaacaacaatggctcctccgctgctccctcttcctctccctctccctctcactctccctctctcttactctctccttcgcccctcatcatctttgtctctcaaactctataggctggcagaacacaaaatttgacaatttgaccctttccgaaatctaatttcgcaaatgaaacgtggccaaaacttatttcaaaaatgactcttttgttcaacaccaaatggtacagtgctaaaccatacgatttggcgctaaacaaaagggtcgtttttcaaataagttttggccgcggttcatttgtaaaattagttttcaaaaagggtcaaatagtcaaatttaatgctggcagaagcacttgaggatagcagcgggtccagcggtgcgtgaggaggtcggcaaaagaggcgcacgttgacggcggcaatgatgtgcatcgacattactagcggtgttgcctccttggggcatctccaccgcctcaggagtgcccaaccccctcacggatccatcactgtcagtctcgagtgcagcagggtctcgacaacaatgacggcggctgagatggtttgagctagagttttgactttttgaattttcaaaaatgtactctcatatagtcatgtatatcataaattgaactctgattggtaaatttgtggacacactattgaccattacaccatcggtattttcccgacctcttgtttcattgatagcaaaatttgctaaggacatctaaactttgtgtaattggctggaagacattgcaaaatcgcatatctgctaatggacaccataaaatttgtatacttgactgtaggacaccgaggcaatattttatcaaatttagacataaagagttgaaattttaaaaagacaaaattacccttagcctgattgaaccatcgcaaccccgaaccctatacccacatgcaccctaccctaatccccatccaaagaccctaaccctaggcgacggcggtggcagcgagagctggcaagcagtgctgggaagcaggtgatggtcctgatggaactgaagtggatagggctgagggtaattttatcgttttaagacttctctcccctagttttgccaaaaatgataaagtattatctcgggtgtcctacaaccattacataaattttgtggtgtccatcaggcatcagcagcgacatgattttgtagtgtccctcagtaaattacataaattttgaatttcatgaagcaatgtactaccaactaggagttgtagtcttatggacaaaattctgtgcttaatcggctataaattaaacatgtgtactgcttgaagctttgtatccaagcagtactggatggatgaatgtcaaacaaaattctggcgggaatcgaactgaattgttgtaatcactggtacaagtactagtactaaaactaaagcagcgaccgtatgatgatgagtcgccgtccatttgatagcaacacgaccaacaagttgcgttgtagctagcccgcgtcaggtcgtggcatatccatccatccattcatctagctacacaactatacaattctagccatccatctgtccttctccccatctggcctttcaattagtcctctctcttgtcgtctgcgtctcctccaaattatatatcttgtcgacaaattggcacttagcaattaggccctctttagttaccaaaacaaaaaaatttcacccatcacatcgaatgttcggatatatgtatggactattaaatatagaaaaaaaaccaattacacagtttacgtgtaaattgcgagacaaatcttttaagtctaattgcgccatgatttgacaacgtggtggtacagtaaatatttgctaatgatagattaattaggcttaataaattcgtctcgtagttttctggcggaatctgtaatttattttgttattagacaacgtttaatactttaaatgtgtgtccgtatattcgatgtgacacctcaaaataaatttttttccatctaaactgggccttagcaacaaccatgctctcatcacttaattacgagctagctatagccaagaaccaaacagcagttcacacccatgattggcacaattaatttactactaatcataataattaatactcctagctatactaatcattcatcccatgcatgcatcactgagcttgcatacgtaccagcagctgcatcagcaggaagaggaggagatcgagctggatcatccgttgtcgctctcgaacagagaacgtcgcaacagtgacaggttcttgattaatctatctattataaaataagcatgcaaaaggaggaatcaatcggcagatatgtatgtgtagaatctagcatcgacataacgattggaggatttgtctgagccactcttttgggtccatgaccatggtgaatcacctaatcaaccccacttgtgggatcatttgtgtttgtatatctaaacaaggttctcggaacagaattgttgcatcaatcatatgctcctgtccatctaactactgactatatacaactgcagatatatttactaactttccaagtggattcgaccagccaattcatgaatttggaatggggaagagcaattctaacttctcatgctgccattccgcaggataaatcatgtcgggcatatctatttgtcagacatcttaagctcggtttccctcaacataattctactttgccaacggataattattatagtgtcctatcatattgacataatttcatttatcaagagtaattaattaggatatctatttcatgttttacccatattaaatatctttgaaatctctcactttggaaactacacaagcagttcccattcttttctgactaacatacatattttaccttggtttcatcagcacgttttttaaattgctaaacggtatatttcattcggaaactttttctttaaaatattagataaatcctcttttggattggtaataattaaaattcagttaattatgcagtaataatgttttttttattttccgtgccttaacttcaacttcattttcaatagaaacgaaccccactttacaaggggtaaactcgcctaaaaacgtacactaatctcgaacggcataatgcttcccggaaaaaaaaacataccctgactattccagtgatactgaatcttacagtttgctgtttgccaacctgaatagcgaacctcctgaagccaaatatccttgagagatccgtgcaaatgattcgccagttgggttactgcacccccttcttggtcacctcaccatcatttttaaggccgtgtaaccgtgttcgttgaagttggaaactaacccctcgcatgcatatataatacagagcgatttattagcatatactccccccgtcccataatataagagattttgagttttttcttataacgtttgaccactcgtcttattcaaaaaattttgaaattattatttattttatttgtgacttactttattatctatgttactttaagcccaacttttcgttttttatatttgcaaaataaatttgaataagacgaatggtcaaacgttacaagcaaaaactcaaaatccattatattgtgggacggagggagtaattaattaaatattagcttgagtattttttaaatatattgatatgattttttaaaacaactttcgtatagattattttttaaaaaaaatgtaccctcgtagtttcgaaagcatgtgcgtgcgtaaaacataggatggagttgggaaagtcaataaacgaactcagtataaaagctttaccccatgaaaaaagaaagagtagtaaactagtaataaggcaccaccagtgcaactacttctcgcagctaataggtagccaaatctttatgtatggtgcaaagcctagataagccctttccatttcctaaaagaaagcctacagaagctttgaatcccaaatgttagatggatctggtcaaccggaaactaagtgacaattaaattaacagcgaccaaaccaaatcggagcacgatcaaattaacagcagtaatggtccccaggcaattggtgccgaccagagcagtgttctcacggcgccaaaaaggctaattcgatttaaaaaaaaacatgcatagtagtagaagggctcggcgtaagtgagtgaggaatatttggttgccagcaacgcttttttaggctgtgttcgacacccctcgttcccgaccctctctccctcgttttttcacgcgcacgtttttcaaactgctaaactgtgtgtttttttaaaaaagtttctatacgaaagttattttaaaaaaaatcaaattaatcaatttttgaaaaaaaataactaatacttaattaatcacgtgctaatggatcactctgttttccgtgcggagggaatgagttcccatcaggacatgcgaacgcagccctagtagtataagattagaccagtctgattaacttaaataaatactatttcctccgttttacaatgtaagattttcttgcattggtagattcattaatatatatgtgtgtgttttttcattaatatctatataaatgtgagcaatgttagaaaattttacattataaaacgaatggagtagctactatatggttgtagctaaagttatagctagcttccctcttagtagtaataaattaggttctatactcaatgaagagaatggcaaaatcctcttaaaagggtagtaaggactttgatcatatactttctcgctcccaaaaatacttcatttttaatctcacacatatagatataaagctgaaaagactgtaatactgtgcacttttaacaaatttaaatgtattaattactctaaaagatactccctccgtcctaaaataagtgcagttttgtactattcacgttcaacgtttgaccattcgtcttatttaaaatttttttatgattagtatttttattgctattagatgataaaatatgaatagtattttatgtgtgattaaatatttttaaatttttcacaaatttttcaaataaaacggacagtcaaacgttgggcacggatatccacagctgcacttattttgggacggaggtagtaaagtcttcgtgggacaagtgcgatagacttaaaaaaaagtaggctgtgtttagttggattcaaagtttgaattttagttgaaattggagatgatgtgactgaaaagttgtgtgtatgacaggttgatgtgatggaaaagtactgaagtttggatctaaactttggatctaaacacagccgtattgttgcgagggaggtagtggcattaagcaagtacggtaaattttgtttgcagataaccttctgtaccataaaaaaaagaaccagagatttttacccttctctaaaaagaagtgtctctatttagagatttctctacttagatgaataaatcatactctcttcgtctctgagtatttgatagtagttagttcgtcttttaacaaatcaacgtcaaatagaaaaaaccaaaggtaatatgctagcagcaaatagtggctgacaaccatatagtcgtagaatatgcgtgtacaacatggtctcttgcaaggtagagtagctacagtgatggttgccggtgcagttgctttcagttgagcaagtgggtaggagccgtagtagtagttaggtgaatctgatgtgctaaaattttggggaattgaagattgtggcaaatggcaatggacatggcaatggcaaaattatggcaagtgaggaggaggaggaggcagtgctaccctgtgctcccttgtgttgctccaaaacaccgtcctttgcagtagcccaggctccttaactgcagcatctattacttcattacacaaccatcttgcacgtgtcctgtccatcctctgcatatgctccatgtcctacagcaacaagagatactacatactgggtgtatccagcactaagatttccattttatttttaccacagtgctatcttcagtatctccccaattctaaattaacacatatatctattcagattgatatatcaaatcttatattaaagttgtttattttaaggcgaatggacttgtacataggagtaaaatcctagagattttttttgggtcagaatcaagtgtatgttttcggtacaaacacaaacctgcattatgatccatcatacaggtcatgatggaagttgtgcagccatgcatccgtgcgaaacaaaacaatccgggagattgttgttgttttcggggaaatttggtggtcgttttcgaacagtaggctgatttgaaggaagaaacggggagaggaaaggtggtggtgagctggactgaaatcagcagcggtggtgactgcaaccggccaagcaggacgacgttgctgctgctgttggagtcactcttggactgatacggcggccacaggagggaccacgcagttggtgacgacaagggatccggagaactcgcttcctccatgtgactatccatccatcattcgaactgggaggagcaaacttttctgcctgccttgatgaaagctcctcccctccacaatttctcaatctccccggaaacaaatcccctgtaggatttctgaaaattctatatgatccatagtagaaattcgatttcgatcaggtgtttgggaaccaaggattataaaaaaacaaaaaaaacgatgagaaccgctttttttttctggttttcgttgacttcgttgtggatcgagctgacaaaccagttggtaaatcttttcaatttttaaaaaatcaaataaaatttagaattttgttaacatttgtttaagtttatggttttcataaaaatagacaagaccactccggagtggtattcagtgaatgattttgcgaaccatgtgtgagactcgtttgagtttcaaaaatttttatggaattaccatgctccggtctaaggtcatgttcatttttttttcttattgattattgcatgcacgcttcctaatggtattgtggccgagtttagttccaaaatttttctttaaactttcaattttttcatcacatcgaaacgtcacatcgttccaatttcaaccaaacttccaattttgacgtgaactaaacacaccctatatttccttgctaaaaatttcttcattggtatatattaggtgatgccctgcgctttgctgcaaatatatgttatataatgaagaaatgatgaaatgatttgaattgaaatattttaaaaatgatttgagaatgatgatttatcatgtatatgtttagttttagaaagaaataaattatggatataattactatatacttgcatgttaagctttgtgtgttttaatgggttgatgtgatatgcttgtatgtaggttttaggagtggtaataaataccatatttgcatgtttatcggtcattagtgtacattagttttatagaaagaagagatttcgtagaaaactttttaaaattaacttcttcactttttaaatatttaattcattctggttcaagtgtggaattatactacttcacttagagcaggtacaatagcagactataagccaactataaacatattttaaggagataaaagataagagataagagcagcatgctaaagatttgtagccagatgcagcacggacttcaagatacacgtgtatgacaggtgggaccaaacattaattatttagagcaagtttaatagtatagccaactaattacatactacactattaatacctggtcccatctgtcatacacatactgtgtcttggagtccgtgctatagctggctacaaatctgtagcccgctgatattctctctcttcatttatctccttaaaatatatttgcagctggcttatagcctgctattgtacctgctcttataagtaactattgtatgaattgtctattaaattgactatatgtgatttggagcaaataattagctatactattaaacttgatcttaggattctggtcagaatgggattaaatcctgcgaactgttggtgaaatttcgacgaccgagacaacatatgcccaatgataccgtattgatttgttttgtctgttccatgcattggttaggctaattctcacgctaagtggctatagtacccccgcactacagtacagtgattactggtcatgttcaaaactcaaaagaaacatgttggtagagtgaatctgaacaagacgacaaatgatcctatctctcatcagttccattgtataggagtcgtagtagcaggagtattcaacatttctacggacgctctcgccagcacaaaattgaatcagacaagcagtatactatgtgctaagagcaagtttaatagtgtagtctactactagctctaaattatctatagccaatgtaatagtcaattcatacaatagttgcttatgatagtattaatatctggtcccacctatcatacacatattacgtcttggagtctgtgctgcagctggttacagatctgtagcccgctgttcttttctttcttttttttatttctttaaaatatgtttatagcttacttatagtctgttattgtacctgctccgatgacacaagcagttaacagtgagaccgctccgaatgtccgacattctgacgaagaagatgttactactagtcctgattcagagtttttcaccgccaaaacagggaggtaaatgcatgttgactcgtcggtcagggtaaagcccgtacgcttaggaaacgagtcaagggattcttgatgacagtgagaggttaaaacccaagagtacttccattagctatgctagtaattactgctacctgccgtgccgatggagcatccgggtggtgttaaattggattcttccgtttggtggagacgaaaacgatttgggagagaattcgtatggaaaatcttctatactagtatacgaggtactagtactacagtacgtagaagcagaagctgaggaagtgaagtggagtagtactcgtacagtaggcaagaacaaagctgcgactgctgcggctgaaaacgacggtgcaacaaaagcgagcgaaaggcgaaaggcgagcaatctgtagtatctgctgtgtgtggcctctgtattatctgtcgcttccgttccgtcatgccaaatttgccatggtagattggtagtagcaaacctgcagccttcgctcgcacaaacacacgcaccatggcatggcatgccatgcaaaggcgcacgcacaggcacgcgcgtgcgcacacaaaagtcggtggaacgccaaaagatgagccaaaagctaaccgggttgataaaaagtccaccagttgcatcaacgtggtacccgaccttgtttatttactacctttccccatctagtctaatctaaccttacttagttactccttcagttttaaagtataactatttttatatagcttaaaatcttatattctaaagtagagtaattagtaaacacataataaaatatagacacatatcctctttcatcaaactagttatcgttatctatttttcatgaccgacaccaaatacctagagtttgggttaggccattcacgacggcctctcccttctcaccttagacatcaatgtggcgtccctctctagcacagatcggggagacaggccgatgagcttagcggcgtggagaggagaacgacaagcttgctggctagggttcgagcgggtgcggcaactactctctccaatgatgaccgttgtagcctcgcatggggtgtagagttgaggcgttgcacaaggccatgaaagcgcatggccacgacccccacagcgtggccgcgctattctcactcatgccgcacgatagcttttctgacaaagagcgtgtgcccagtttaggttacaaatctcgttcggccccactccgagccaagctgctagagaatcttctattatcatgggttgatcgaatgccacatatgtgcactgaccttatagtttgcgcaagtgatgatgggaagaaatgtggcattatagattagtagattagtagaaaaaggatgtgccttggatcaatggaggcaacaagaaagttagcaacaaacagttgatgagacaattagaaacagattaacatggtgcagagacgatgataaccgattgatggttattcttccaaggccatcaatacaatgttgcgacatggaaaaaaaggaggggagcatgaaaatcatgcgatttgaagatcaaattataaactgttatggtttgatgtaggagcgttgttgaaaaataagggatagtacctagtgtgcgggtggcgtaatagagattgagagctaggataatgattaaatgatgaataataaggtaaggtggaaattgtaaaaatgtacacatgtttatttaagtgttacaggttcacccaataggatagccacacattaaaaatcaggatattgaatccggtacatcttaaatctacatgagcaacatccaaaagataggagtatgctcataggccttcatagagaagagctaacctcacactcatcattgctcttctcctcgaccattgaggtcagtgagctacgatgtgataatcacgaattgagatcgcatgattaagaaataggataatgtcataatcaggagatcgtcgggagaatgacggtgacacgggcataaggcggctctggtacgacaacagattatatcagtttttcttcatgtaagcttacaccatatcttatgttctcgtggtttgatactatgcaatcgtctttcttttctattcagattcattgttaaacgagtagctgctatatttcgggagcaagagaacaatagtactgaagtactacagctcccatcgaatggcatattcactcaaagaaaaagctaatttaaattttcaaacttaattttgacattaattttgagatatttttaacgtagtttttttttcagtattagcttttaagtcaccaagaacacatatataaaagttttatttattctctaataagcttagcttattagaaaaaagccaaacgataaggccctacatgaattgatcacaatagacgccctggccttgctgaaatggtaatgtcacctgctgtggttgacgtggcaactgcgtatcatgcatgtaaagccgatttactcgagggagggaaatggaaatggaaatagagtgccctgatcacaaagacagcagcgtcgtccacccaacaacaaagaaacaaaacaggtggggccccacccgtgcagtgggtccctggggaaagtgatgtcgaaattatcccccgtcatttgtttattggatttgtgcatgataggacgcgcttctgtggcgacggaccgaaagcgaccgtgtttgtttgacagggaaatcagacgcagccattgcattttttgcaattcctcccccctcaacccacaccacccctgcataattccaattccaaccggatcatatgcacttcctaatccctcattagtagtactaaactcaaactcgcgtgaagagttgagatggattatgctttccttctttttttcttttgtctgaaatctgaatgaactctctcttctgatcgccatctcgtatccactgtagcagttcatttttcagagagacacccatctacagttaaaaaaatggtgagacaaggccattcttacggggaaacccgcagtttgaaggcataaaaaaagagaggcaaatggcgtcgcagcgtgtgaaacagtatccctggggacagagacggggtttaagataatccaacctcatgtcgataaatatgatttctcatggggaagtgtgccatcttatcgtgaaaggccctcatctcatctcgctgcagcggccctgcggtttttttgcagcagcagcggcagcgcagtgggcagaaaggacaaagaggaacgggacggtggctgctgcagcctcgagaaacgctcccctcacctcgtgtgggtccctcccggtcagcaccccatattacggccgtgtcactcatcaccaaaaagctcaaaatcatgtatctgacgtgggatgtttgatcggacgtcggaagaagttttctacacgaatgaaaaaataatttcataactcttcttaaaaccgtgagatgaatttttttagcctaattaatacgtcattagcatatgtgagttactgtagcacttatggctaattatggactaattagacttaaaagattcgtctcgcaattttcatgtaaactatgtaattactttttatttttatctatatttaatacatatgtttttggaaaaaaaattgataactaaaccagactaattcccctattttgttacctcattattctcgtattccccttttattaccgtacggatcctcctgcagtagactggcgcaattaaatctccatcttcttgctcgtacaacgtaaatactcgtctcgtattccccttttattaccgtacggatcctcctgcagtagactggcgcaattaaatctccatcttcttgctcgtacaacgtaaatactcgtactactactgccagtgtacagtaagaggaagagagtgatggagctagaggctggagtgcactggagcggatcgagccgagctcagctggaggagctggagctggagctcgacatgtataaaaatggggtccacggagatccagatctatccaacgctccacgcacccatcctcctcacatcaggcagcaaaaacaaaagcaaaattacttacagcaaaaacaaaaaatttcaccaaaaacaccctgaaagaaggctcaaaattacaatgcaaaaacattttcgcgaaaaacaccctggagaaattgtggcatcacctgtcactcccccggccccaacaaaagcaaggggcaagccaagtaaagaaaggagtagtatagatcgatagggatgcagcgcactagtacgagtactacttctactacatagccatagcttagcttcttgttctagctcggctgcgagcgagctcttcttcctctgggggaaaatggagctcttcctctgctcttcactgcctcagtggcgccgctcccactgatctctctctcgtcttcttcttctttgagcttgctttgctgcacactctagtggtggtaatagaacacagctcagcagcagcagcggagcaagaagccaagaagccaagaagcaacgagtgttgtggtaaagaaagcggaggaggaggacgaagaagctcgattgcttgcttgctgtggagctcgccatggacgcctacgaggcgaccaaggtggtgttctcgcggatccaggcgctcgacccggaccacgcagccaagatcatgggcttcctcctcatccaggaccatggcgagaaggagatgatacgcctcgctttcggccccgaggcgctgctccacaccgtcatggccaaggccaggaaggagctcggcctcctcccggcgtccgggcccgggacgcccacctccgtggcggcggccgcggccgccgcccactcgcccttcatgctctcgcggcagaactccgggcgctgcggcaccgcgccctcgccgctctcggtgtcctccccctcctcgtgggcgcctcccccggtgttttcgaggaacaacagcatcagcaatggcgccggggaggagatggtcggcctcggcgacgagctcatcagcccggccaacggcgggggcccgccatcgcccttcttcggcggcgacccgctcatggacgagctccagctgcaggaccagctcgcgttcctcaacgagggcggcgtccccgcggggcaccagatgcccatgttcgacggcggcgagtgccggagccccggcggaggcgacggcggccttttctcctacaacctagggtgggcgaacggtggccccggacaccgccggagcgcgtcggtcagcgagctctgcctcggcggcgccgacggcctcggctggaagccgtgcctctactacgcgcgcggctactgcaagaacggcagcgcttgccggttcgtccacggcggcctccccgacgacgccgccggcaagatggacccctccgccgtggagcagcagtgtcaggacttcctcatccgctccaagtcccagcgcctcgccgccgccgccttcccctactcgcccaccggctcactccccggctcgccatccgcagccaccaagtgtttgagcttgctcctccagcagcagcagcagcagaacgagagccagaggtgccaactttttccacctccgagctcctcctggagtaccagtatccctttaacttagctccgattccgtcgatttgcagggcggcggcagcggcggcgctgatgctaggcggcgacgaggcgcacaagttcatggggcggccgcggctggagcgcgccgacttcgcgagcatgatgaaccccggctcgcgccagatttacctcaccttcccggcggatagcaccttccgcgaggaggacgtctccaactacttcaggtagtatactataatcccaccgcccaccgtcaccgccatgccatagctttaatctgatgatgccctctcaattgaagcatctacggccccgtccacgacgttcgcatcccgtaccagcagaagcgcatgttcggcttcgtcaccttcgtctacccggagacggtgaagctgattctcgccaagggcaacccgcacttcatctgcgacgcccgcgtgctcgtcaagccatacaaggagaagggcaaggtccccgacaagtacaggcaagccgagcttacttacagtccacattgcctctctaggttgatcccctataaccaatttgtaacttgctgttactttgcaggaagcagcaccagccgggcgagagggtggacttctccagctgcactactccaactggactcgatgccagagaccccttcgacatgcaccagctcggtgagcttttgcgatcatcttcttcatggtgattgggtgaatgattgttgctgaaatcgcatgagtctgtttgtaatggtgtcaggtgcgagaatgctgcagcactccaacagcgcgaatgagatgctgctgaggaggaagctggaggagcagcagcaggccgccgagctgcagcaggcgatcgagctccacagccgccgcctcatggggctgcagctgctagacttcaagtcgcgcgccgccgcggcgccgacccccattggcaatcctttcagcgcttctcagaccgccgccaacgcgaccggcgagtcgcctcccgattccggtaggacctggtgtatccgaccgaacgacgtttcacctgttgccgcgccagatgcagtgttgctaatgtttaccatggcggatttgcttgcttataggggagctcggtaagggaagcggcttccttcttgctcacaagaaggcggtcaacggagccgataaggaggaatccaccggagagtcctccagccctaacacagacagtgaccaaaggtggaattttgcgattaacatattgtctcatcgtcatcatttaatcatttgttattttcgccacacttagctttcgtccagcaatgcagacaagtaacatttcaccaaactgatcttttttcctctgcccattgtgcttgctctctttggcagtgtggagcataatctgccggacagcccgtttgcgtcgccgaccaagtccgcgggatttgctcgcgatcctttcgctcccactgaggcggagatctccgccaccgcgtcgactggttgtagcgccacctatgttggcatcaacaatggcgccagcaatggcggcactaaccatctcctaccttctgccttggacatgccctcaccaaaaccttatttcttccccatgtccaggtatgcatcataataatgtatggccccaagtgctattttagtattgcaaattagtacagtatgcatctgggcgccatgatttgctgagtgctatcattcattcatatgcatgcaggctggcctccgatcacggcgcgatcggaatgtaaagttgttctgaatggaagtgagtaatactactactgcctaatcctagtaagcacctcagtcctcttgcctttccacaaagtctatatcaagctctcaactccatgcttcctagtattgaatcatttgcttttcaccccccattggaatgatggtgccttactctcttttcctctgtccttgccatcacttgccccttgcaggaatactagcagcaaagaaaaagagaatagtggaatataggaaaagagtggagaagttgcagcatagtgttagtttcagtcacccccctttttttttactttccttttctttttcatttttcaagaagatagctttattaaaccataaagagaagaaagaggatgccctggcctccagaagagaagcagcagcagcagcatcaatcaagccaccaccaaccacaccaccaatgttttaaaatgcagtgccattcagataaaaatttagagcccctcctattactaccatatcatatcaccttagttaatcttagttactattaccacccaccgacccaccaccattgatgaattaccccccaaagctcttgataagctaccaccaaaatagccactagttttatagcattaggggtgatgtttagccacaagactagtactagtaccaaccacaagatacatgtaacactactactgcctgattgcagctgtgtgcaaggcagtgagtacagcagatatgtaatggacccaagaacaagtgacaggtttgagtgagagagagagagagagagaggaaggcttaattagctagtgtagtgtatgtaaaatcacaagaagatgaacaagtcagtcagtgtaggtgtgatgaaaggggaaggaccactcactgctgatgctgcaccattctgttgtgccaatgtggagatgtgtcagcgttggtgttcatggtccccctgatcagcaaatgcagtcccaatacaagaaaaaaaaaggaagtttctttttttcttttataatttcttcatggccttcgcctcataccatatgtatttctctgaatgagttgaatcactcacctgtcccaattgcgttgagattcaccttctccggcgacggtggccgcctccatggggcggtgctggtgccggggtgggggtcggatacggagaggaacggcggcggcggcgaggcttgagttgttcttgccgtcgccggcgccagcggtggcgcgggggtggggactgacggcgttagggcttgggtattgtttacctttgggagagtagagtattagagatcgtagggtaatccgagatttatgcggctggatgtttaatattaccactttagatttggtattatttaagaactgatgttttttttcttgctaattttcatttttagtactttgtccactgtagttgactgtcatagaaagaagaaagggaagataaaatttttagaaataggttagctttggtttttaccattatgatgccgcctaattttctactgctgcctccaaggtgagtaggactacatatatgttcccactctttctaaaagaagattcggtcgaaaatgggaattttaggagaataaataaatgggcatagtagctctgctagtggtaataacgcattattaaggataaagaagagggaaggcgtaaaagtggcacctttggtgacatgcttttggggatgctagtgccaacagccacccccagcgtcaacatccagtaataaaaaagaaatggacgtgaatacgacggtacaattaaaatactcccaagaaaaacccacacaaacaagttatcactccctcaatcccattttaacacagctataagtgttggtgtctaactttaatcatctatcttatttatttattttataaatcatctaataataataaaaatactaattattaaaaaaattaaaataagataaaacgatcaaaattagatatagaaacttatagggaagttctactacttctactcccattattgtgatctcctgtaaataaacttgttgcagcagcagtggtaggtttgctccctacattcgcagtgccaatcatcctatgaataaagcccaggtcaaagtagtaaaaaaaattaatccattcgcgttttcaccgcagcgccggtgtggtagatcgggaaaagggggtggggggaagcaagcgtgggtgtggggcccaggatgtcaggcgtgggtgacgcccacgtgtccgtgccgctgtgtgtgcgtgcatccgacaaggacgctacactgggccgggcccatttgctgccggatttccgcggagcacatcgtctcgtctcatcgcatcgcatcccatcccagatttgttgcagcagccagctacccgcccccagctactgcactgtacgtgtacggtgtacctgtacacgtagtaactttttccctttgtcctcttttcaatcagacgcatgcaatgcattgcacctactcctactcgctgtatagtagtatactacagtaatcactagtactagtaaaaaggccgtaacttttgggcgtgtccgctgttcggatgcacgtgaatgcttgcagaggggcgcatcatcgatccatctttcaattactagtgtggaccagtcaaacgagggcaatttgcaggtaatcaccctgccttaggctctgcttagagagcttctagctgaacagtttagtttttggttcacattatgagaagttgtagaagtagaataaaaaaataaactaaaagtttcagattatcagaagctaactaccaaccagctgcttttcagaatcttaaactccctaaacaaaccctaatcaattaacagattcagcacatcaggagagcagaccggctggatggtacgtatccgtggctttgcagtttgcaggagaaaggcacagtggcctttcctgaatggctgaatagtcaaagcatcgatgggcagcagacagggttggccacgcttgggctggttaattaatccaagcttttctctatcaatgaaatatttttaatgaaaatatatccgtccatttgcttggcaagtgtgcgtgtgcgtgccatgttgttgtgtggcacctcactggagggtacactacaggaggagtattttgatactagtactagtgtgtgtatgatacattggcaccgtggtcgagtcgagagagatggggctttgcatgtgctccccatgtgcccactgccctgtgcccatctccggtttgtccccctctcgctcaccctgattcaatactactacaagtattccttctttttttttaagacataagtgtgtacaagtattattgtttgtctatgtatagtacatctcgcatgcaatgtatacggatggatggatcgatcaaacacccctgttattagttgatttgtgaccatgcatgcgagatctaatccatggcgttgttattggccacagcggctgcatgctcatgtgtggcgacgtacgtactactcctacgtgatgaagctgccggcataaattttccggcgacaggacaggcaccagtacggagagcaacgtaagataactctgcatacgtgtgtgtatagatccacgtcaattagtcgcaatactaactacgtcctaaaatgtagctatttctagcacagtagtttgtcctaaaatgaagctatttttctacctaccttctcctgtcaacctatcacaatcattctttttcacctactttctcttttcaaccaatcacacaactttttcaatcattctcacctactttcttaatactcatgccaacctaaaaaatacttacattttgggacggaggaagtatatctcagtactatcattctatcgaaatgtcttgggtgatgaaaaattactccctccgtctcattttaagtgcaaccataattttccgcgctcaattttgatcactatttaattttttttatataattagtgtttttattgttataagatgataaaacaagaataataccttactcgtgacatatgtttttattttttattaaataagatgaacggttaaagttaagcatgaaaaactatacctacacttaaaaaaataggatggaggtacctagcatgcatttccagcagaatagacggatggacgatggatgtgctacgtccaacgcatagctgcgactacagctacagatggatggagactatgccgtcgctaccatctccgatggccagaaaacgaaagggatacggataattaattattcgagacgaggtatccaattttttcttggctttcttatcacccgagactaatccgatatttccctgcacaaaccagtggttcattattcggattacatctactactctatgctcttgcacggccaattcggtctctccccaatcagcaggctttcccatgtctgtctgtccagcaccaacaccaccaaagataaaaatcatcatctccacctgataaaagtgtggaacctctcaaagcaaaaaacacctgaaacctcaaggcctgtagcttgaggttttgatctaaacaggcccttagtgcatgcaaaagcagcattttttttcctcttttctgaatcttcacctgataaaaagtataaaaaacagagagagagagagagagagagagagagagagagagagagagagagagagggatattgggctcctgcttctgcgacaaaaacaaggcctgacataagccgccatggtagtattgtacaatcagatgtgtggtcttgatgatgattagtatatgatcgaattgtattcgtgcattcccccccacagacaatggcgaatttttgtcccagtccaattcttcccatatgaccaaaccagttgcatccccttgcactactgaaggatgcattttgtgagatttcttaaccttgaaaggcagcatgcagttaccagtactgttttccaaattcgagacaggctttcatcaatgaaggtggtagtactccagcacagtgatactactatattcgatcgaggaaagaaaatcttgtttgtttaggacataccagttgcaaatctgtctgtccctgcttgcttctgccgctcgcttcttgtttatcactccatctcccccccaactcgcccttggtacgtggttcgctgcaggtttccgaggtaagtaaaaattaacgagacgaaacaccatgcaagctactagccccgtgcgcacgggagaccgcgccgtcgtcttcttcgtctcggcgatcgatctgttcgtacgttcgttcgtggtcgtctgcaggttggtttccttcagacgcacggggacgagtttgttctctaccagtactactactagtagacagtctacttatactagcagtagtatatatcagctgtgtatttttagccgagttggggttggagtggtgtgtgtgtgtgtcggcgtttcttggcgggcgaggcgttgtttcttgctgtgtacggtttccatgtttgttttgagtatgttcatcgctaacgtaacgactttaattgctagctgctcctgtttttgcagcaaaccgatgcgatgcggatgcgaatgcgaatgcgaatgcgaatacgagtcgtctttaattcgttagttgatgcggatcgagctggattagttgttcacatgcatccccatttattagggctatctcccctaatataatcctctttgttaattttgagggacaatcacaatctctctggtcgaaactaatccagcgcggtgtgtagggctgatgaaatttgatgccagcccatgagattctccttgcgtgttcaggtccatcaacaggatatggcccaatctaagctgggtttaatgtttccttcctcgagaaacggatgaactaagcacaataaaagcccaccatgtgactgcaaaactattagcatgtgtttggttgggggatatggtgggatgggttaggtccattcctgttatttgggatgggttggacccagtttctgtttggttggagggatagaacggaccctgttttttgtttggtttgagggatatggtgggtcagaatggttctatcctctgtttggatggagggataaatgtgggttgttttggtggagatatctcctggtgaggttacctcacatatgaaattacttggacaaaatctccataaaatccaggataacatgcacaagtactagaaatacagctatgtattagttcccatgatggttttgacggttagcccacatgtcatcagcaagtccttgtctgaactgaaccatcaatgcatggtcatttgcttgcccaaatggctctgttgtggtctcacttattaaatctaatggatctgtaataaactgatcaattccatcatttatgacccaattatgaataatgcaacaagctacaacaatatctacttgagttggataagggaagaatggggtggcatcatctagaattttgaacctcctctttagtaccccaaatgcacgttcaactgtgacacgaagggacgagtgcctaaggttgaacaactccttctcattttgcaccggattattcccccactctttcaagtggtaccggacagcacgaaatggagggaggaatcctggtttggctccatatccagcatcaactaggtagaattttcctatcatatgatggagaagttggtcacatttctattgagatggagaaaatgatgaactaaattgttctattaccttggggtacaagaaggccattttcacgttccaatgcatctcttaaaactacaacatcatgtgctgtaccctcctaaccagccaagacataagtgaaccgaagatcaaaatctatagctgccattacattttgcgtggcatgagacttcctaccacgaaaatagggctccatattcttctcaacagaggctctaatatgtgcgccatcaatagctccaatacaatcctattttatattcaacaccataaaagattagggcacattgaggtttgttcaaatatataattgaaaatgagacacggattaatctcacaccttaaagtaaggatcccacctagggttcccggtaattttacttggggtgtccaatgagggaggcctaattagttcatctcgcagctcaccaacagcatgaaacactttgttgaaataacgactaactgtttctccggacctatcaaaattagtgcgaactaatctatttctaagattgtgccctactgtatttataaacatagctacttgttcctcaatagacatgtggatggtatcttcaagcaaaccacgatttctaaagagcttacaaaaccgaaagaaataatcttttctaagtctaagcatgtcgacacatgtggtatcgttcctccaaatttttgtgtttagatactcaattctcatcctatccctttcaacaattgggccatatttaacaccttccctcctagaaactctctttcttttcctagaatgaataatcatggccatcattgacaacaatagattggcagcagcagcaaaaattaaaatcttggtcctcttatccatctacaacaacaatcaaagaaaattaaacacattgccatgtcattctcaagcataaatcatctcatcataaactacttgcccaaattacatactaatacttgtttccatcaggaaaataagtactatgtaaaaattgatgaaaccccaaatcacatactaatacttgttcccatcaagaaaataactgctatataaaaattgatgaaaccccaaatcacatactaatacttgttcccttcccatcagggaactaatacttgcccaattcacatactaatacttgttcctatcatgaaaataactattgtgtaattgatgaaacaaaaatattgcaatgtgcttgaacagaagttgtggacagcaagggcattcatgcaaacggagtcgcacagatctagcattataaacaaaatagcagatatggtacatagctagggtttcattaccttggctatggaggtgagggggagctgacggggcgggagaggcgggagttccggccgtgggactggaaggaggaggcgcagcagggcccgtggcacgacgccggcgccgccgccctctctgcgccgccgcccccttgcgcgctagttgccgccgccaccctctctcgatttggatttgtttcgcttgtgattgtgaaggggaaaaaggtggtgagaaaagagatagggttactctcgcgtggtctcacgtgatgcgcgagaggaggtgggatggatcggtccgccacattttgccgagcgagaccaacccgcatatgggcagaatattccttttttgacccaacccagcccacacagttcttcaaccaaacacctgtaaaaatgggacggctctagcccaacccaccaaaaccttgcaaccaaacacacgcttagggtactccctccaactattttcattgtatcacttaacccttaaactttttattcgttttaccaataaattgttaaaaatgcttcacttatttcttaatagtatttgtctctttaattttacctctctatacacatcatttattttggagtcgaaaatattttcatttgtttatggatgtttgcttgaacttggtgtttaaatcagttttaagtacttccaacctatgtaaacaatgttaaaaagatctaaaagaaaacattgaaacatagtataatacatctatcatctttatcaaatttctacgaaaaatacaacttacataggaggaagaaagagagaaatactattacagagtaaaataaagtgtagaacaaactgaaaaaaatttacagggttaaatgctccagcaaaaatagtttaacttaggaggaaaaaagaaactgccgtgcatgcgaacatggcagctggaagagtttcttcgctgcagttggatgaccgaacaaaccactagtagcttcagatcagatgcagatggaagaaagaaagagagacagatcgagagaatgtcaacgatgacattgcggcgaggggaagatgatcacatcacatgacggcacatgcgctcgccgccgggtactcctcgtacacgaacttgccctcctgaacgagccggcaacccttgcaccctctgcacgacgacggcccagggcagcacatcgcctgcatcggcgccgccgccggccacccgccgccgcggcaggtgccgcacccaccgcagtacgaggggcctccgcatggccacttcggcgccggaacgccgccccatggcgggagctggtggtggtggtggccagggacgaacgctggcaacgccgccgccggggcttcgcactgcggccactgcgggtggacgacgccggcgccccagtgggtggggtcgctgcacggccacgggtagcagatgccgcacatgttggtgaactgcaggttcaccgtcgtcgacgacggcgccggcgtggccttggtctcctccttcacctttggcttctcctccttcttctcttccttcttgccttcctccggtttcttctcgtcgcccttcttcttctcctcctcggatttcttcttctcctcaggtttcttttcctcaggctgcttcttctcctccttcttggcctgatccggcttcttctcctccttctttgcctctgcaagcttcccaaattcaatgtctttgatgaccccgcaggccttgcatcttagcttatgggcgagctcctctggcttgaaatggcccgatatgatcaccctattgttcgagttctcataaacgatgttaatgatcttctccttgtctgcttcatgttcgttcaattcaaaccacagcttaatcatatactgtaccacctttttggccttacgccacaacttagttatgggattaaatttacataattcagcaagtgcattgatccatacatacctttgagtttgttaaggactttctggatcttcttgcaacacttttcacactcgagatttgccttaatgatcaaactggccatttgctataaaagcatccatgcaatacaaaaacagagcttaattctgcaaaaaccttaatgcatatgcaacctttgctttgcagcaaaactgtggaagccagaaaggaggaccaaggactcaccttgtctgccatgatggatccaacaatataatcctaacaaagttcagcaagttcgagtggaggcatgttgccaaaaaggagtgaaatttatagggttgttggtcattgcaatactataatcgactagtactttacattgcggtcaatcgtcggtgaagaggagtctaccatgattggtcacttcaacgtgctgaaaacctaatccctcttattcaagtagaagattccgaacaacaacctagtgctccataattagagagaagagtcttggaagcccaagttacagagcatataatggtacgtctgtcaattttcggtttagtactaaaaaaacatgctagttgcaatggtccacaaactgaagctgattaaaatggggcgccaaatcgatatgctaggagtgtaacgacgttcgagcttctagtgacagactgacagacagatgttcttgctaatcgatcactagttaattaaagctgattaacatgttagtagacattagctagctagcttgatcagattcatcgttggtgaattctttaatggagagattgctgttggagttcaaaccattctggagtcttgacccgtaccctccttcctttttcagcaacataaaaaaataagataaattttgctataggacatctaaattttgtgtaagttgctgataggcattgtaaaaaaaatatgtcacggttgaaagacactttaaaaaactagtaatttacttcaattcgaaagataaattcttaagaaagaagagaatgcccatataacaacatgcttcaaatataacgctagagtaaaaaattaaaaattatgcaactccacatttaccataattccaagtacatcactagcatacatcgtattccatcctcattgcaacttcagatcaaaagctttcgatcctagacattatcgtcttttagaagaaattctctccaatcgagttaaaattatcctccagcaaattattaatttttaagtgtctttcagcaatgacacgttttgatgtctactaacaaatcacataattttttattgtcctgcagcaaatttggttaaagaagaacagaaccctgggagttcatttaagaggaaaataattagaaacaaaccacgttccaagtgtgattggaatcagcaatacaattagcaacccaataaaagaggtgaaacgtgatcgatgaactgtacgtacctgatgacactgacttgcgttgtagcttgattagcaacatcaggcatgcatgcttgcatgcataaggtcgtctaacaatggtcaaattaagcaggttagatgccactagatagctggcataaagtacaattataaatgatccatgttagttcgtctgatcgatcatcaaacgctgcaccaaccgccatgcatgcatatgctgattagtagtaattatctaaaaaaattctgattagtagtacttaatatcaatccagatggccgccggccggccggccggaggaatagttagttgcggatgtctgccgagattgccggcgacgatggccgatgggtcccaatccgaccgtgcagtgctcggactctcaccatggtttgtaccatacgcagcgcgtgacgtgagacttaattgttgcctgctccctcggtcaaaaaaaaaatcaaactgtgggtttccgtgccaaattttgactttccgttttatatgaaatttttttataattagtattttcattgttgttagatgataaaacatgattaatactttatatgtgacttatttttttaatttttttcataattttttcaaataagatggacggtcagacgttggcacggaaatctacggtttgcattttttttttaagacgggggagtatagacgagacacgtcctcatgcatctgtggttacagtacctgagtcaactggagtcaactcaaaaccgtgggcttcgatctgcttggtattttcgctggcatacaaatcgacaatcaaatccatccactgctccatgtgggacacgttaccgcatacgttgtcacaagagatttcacgtcccaaaatcacatcaccggtgcacgaatttggtactggatagtagtggtttatatactcaaacttgtgctcacgcagcctttcattttttttttaataatgaaacttgtgctcatgcagcctttcattttttttaataatgaaaataaattacatcttgggtctccgtccatggacacacagcacactttgtcctcactcgtgcgcactacccatccctaaattgctctaggccaaacacgcttaacatcagagttctttagagagcggcttccggaaaaaaaattacaacttgttaatatgagtattctattaatcctattaagctctaggacgggatgtcacaataggacatgaaaaaaaatgttgaactaccataaaaaatgctacatatactcttttaataagtaaataaatattttttatgtcattatgtaagaataaattttgccataaataatgccttgtataataaaatcatgaatataatagtcttatataacaaaattatacacttccaacaatatagctagtctacaattttcaaatttccttcatatgtaagggcaaaatgatcattttcatagggattaaacattcaactaacgggatggatatgaaagggatcaaaaccaaaatttagaggtatacaagggagtggacaaaactcgggggtgtagaagagattggctaaactttcagaggtatagaagaaattttctctaaaagaaattaaaagaaggcctttcatgaaccatactctccttcccgcacgtaaaacggagcacgtattattgtatgattaattaagtactagctatttcttttttcaaaaatgggttattttgattttttttaagcacatttcatatagaaactttttgcaaaaacgcaccgtttagcagtttgaaaaacgtgcgcgtgaaaaacgagagagggattgggaacttgaaggtaagaatacagccatgtggtgtttaggaaggaggaactaaactttagttcctctaaaaaaatataagttctgatgggaggaagctgcatgggtagctattcgatcggctattccttcatgtgcaagcgatgtcaaattgtcaatcactggaatacatgtctcaatccaactgcacccgatcagctcaacatgcgcccaatcgaccactcaacaggcatgctgattactgagttttgtccgttgtgatgatagctagtgtacatacagtgcatgcaaacactggtacgataacatgtcactctaaaacacagtagcggtgtctcaattggattaaggcccatcaaccaccaacctagctacaccgcgagacccatttgtgtgatatactgcgatgagccaatgaagtactactacttactatacaaaagccagttagatgaagttttattgcgagaataagttaacaaaaccgcaaatttctgccgctgaaaatcgattagaacatgcatatcatcatttccactgtactcgtgtatggtaaactgcaaattactgctcaaaagagggaacttgtgtatggtacttcagtggtatattttcagacatacaaacatcaatatatatcctacagtatatactaccggggagttattcaaaaccttcaattctatgcatggagaattcagatgtgctagcaaatatagtttagggtaaatgggcaaggttaggctgatagtttagaggcagctcatatgtctaacttcaggctatgtatattcagtggttcacattgatcacaatcctatgctgcctaatattatccaatagcaaggccgcatgagctagctggaaagcataaacagagcgcattgcatcaaattgcctcaccgtcacagcttgctccaatgcgcggttggttctcttaaccacctctggacattttctgacagaaaaaactaatcctctctagtagtatgtgacatgacaacgaacagggaccattttagcactaagatgggaagtggccgatagcacatttagcaattttcaggctcatatatcaactgcaactgaagaacatagcatccttaaaaaaaccaaatatgcgattgatgataaatcagagtggtgtgctaataaaattttaattgatgaagtctgaaactctgaatcgacaccgcgatctgccgtccagtttcagatctcaggagtgacaaattagctccttttcggttgttcgcatgctatagtttactgttgaacaaacctaactaatatgtagaatgcaaggtttgtgaaagggcatatagcctagtggttgcagtgatctgagtagcactctaaggtcctgagttcaaatcttcataggagcgaatttcagattgggttatttgagggctagttccctgttcgataggctaagttcctaggctaagttcctattaaaaaaaagctgtatatatccggttggatatagaggccgggtaaaaaatacccttctccagaaaaaaaatggaatgcaaggttttggagcttgacacggtgatggattctaataactcatttagatgacatgcaataaacgagtgaacgcctactcgagctattaaaacagttcccgcttgacacccttgcctctattccggaactacacagcagcatacctgggtgaccgcccgcgtctcacggcggggatcaccggcttctcaaaatgcgagttgaaaagagtgagaggggtcttgtgcactgtctgaagcggcgtcggccggcggccgtgggcgagtactcgaggcgagaaaaataagggccggtttggtttgaaacttaaattaggcttgtcaatatttaacaatttaaatagtgtttaatgtctatttggtttgaaaataggccatttcaatagtgaacttaggctattttggattcaatccaaacacaactttaccttaccaaaattagtcatacaaaaacttgtcaaaatttagcattgacaaaatttggtaatacctatttagccctcaaaccaaaccaacacaggcttggcttcggagtacgcgtcggactagtgtacggcccagaccacctaaaagcccaacatacttgccagttgcatgctacatacggattacggtccatttaatgttcgggcttactatctttggtgctaagcggcccatatgaagcagataaccggatcgctaagagaagtggcgaaccgttttttcacaattaaaaccactctcctattttcacaatattgaacatgttggaggagagtaagaacgaacgaggctggaagctcagattacatctagatcatactttgttctgaaatgtttaagaccaaaaatataaagaggacatgaaagtcttgatatctcagatacgtagaccttatggaaaatcaatctcaagcttaagttcaatgattgtagctgcatttctcccccatgataatactctcactgtcccaaaatataagagattttaaatatatgtaaaatatcctaatactaaaaatctggacaaaatctattcatattcgtagtattaagatatgtctcatccatctaaaatctcttatattttaggacggacggagtacaatttataatattcatatccaaatttcaattataatgaatgaatcaccaagtgaggaagaacaagtcgaaatgtacagtagaggttaatcacagaggtgtcgaaagcttccaatagcagactttccgtgtgaagaattcgataaataatccatgtacaacaactaagaaccaaaaaacaatgactatcaggattacatatatttacccttattggcagaagaggaagggaaaaaccgtcatgaatcgatggggcgtgaaacacagccatgagcccgaagctcgttgaataccctatctaacaatctggacagtgccttcttccaagagaacgagtatctggacaatgaggctgacacccacctttacttgaagactcattcatatcatcaatacctgcaaagcatgtagtccccatatttgagactaatcccatcgcaaaaaaaatagttaatcaatcctgtcaattaatgaatagaacatgctttgtccactcttctgccgacatttatgaccaacgatagcaacccttctcctgttccacagctgtatttgtagtcgtagtgcacaataaaagcttttgggagctatagcatccagtcagtacgccacataagggtgagactcgttgatgcacactgctatcggttggtctgattcccaggttcaattgtgtcagtttgtcagggaattatgttgcactcatccatgaatttatcgtctcgagttaggaacctcttccagtatctcctgtagcttggtatacctaattcaagccaaggtttcatattgccattgtagtgcaatgctgcagaactccgtgcaacgtcttcatcaattgcataatcatatccaagtccagatagaatcaacctctcatcaaggggataaatgaggtgttggaaagataacaaacttagaggaaaggctgctgctcgcagagatgtctcatccttcgtcaagaactgcaacacaacagagtcagattaatacgtgcaatataatagtaaccatgaggtgcataaaaaacagtgggacaaataattttcagactgagactggaaaaacacaagtagcactacattatctttccagatcaccctttgttgtgcccttttcttatcatatgctatcgcaagaaaataaatagaccagaactataccaacctttttcagaagcagcaggtagttctctgtaactttgtgcttcctccatttatccaaatttataacatttattccagacatccatgcacatgacttggtatcaactgttgtactacccaagagatttctcacttgacccagtcttaaaccacaaaattcgatagcaccatttaccttgtcccccatatcaagagaccacaagaaagaaagatcacgttgaacaaccacatcatcatccaacacaaccaccttatttagatccttaaatatttctggaatgaagaaatgtgagtgactaaataatgataggtattccattcttgtcttcccagcaggttgctcagtactcctaacaagaacacggaactcctcggacagatacaggtgccgcacattaaactttgttaacttctccttgataatatcctcatagttcacgacatggatagctgcctctctgtatgactttttgtcaaaccagtatttcatggcatagaaattttgagcatcagttaagatatgaaaaatgattttttttgggtcctgcgaaaagaccaacatgaatataagcaacacccacctcgaatataatgcaaaaactaaacactgtaaagaataaaaaccatccacatacctttgaactgttcactgttgagttgataacaaccgaagcagcaaggatgttcttagatagtatgacatagtgcctaccatgtgcagcactaaatttgcgagcagaagaatcatttgaacccagtgaagaggatgtgaaatactctaatgtcaacctcatagatagacagtgatgactcttaggcaacgtctgagcaccaaggttgtagaggaatgcactctgcttcatatgaaagtgagcttcatcctcagtcatgtcaagtatctgacgaagtttcctgtcaacatttcgacaatctacagtgcaagattttgctctagctattgtttgctccatctgctccatcttcttgttgatactgaaatcaattgataaatatcattaaaattatgaaagtagacttatatattgatgatgggaaaattattcatcggttgattctatactattttcagatgaatgcacatttttctcaaaaaaaaaaaactatttccccttaagagataaagagtttaaatggcattgtaatttgcaagatatccagatccagtttcagtaacatataactgcaactttaagatgacaatgaaatgaactgtgaaagaccagaagagtaagcaccagaattttaattcttacaaggacggtagatcagcatcaacagtcgatacactaagaaccctctcatggtcttgtatgttttgcttcattagcacagtaagttcctcctgtccttcaagcttcgcaatgcttggataatatgagcgtgccacaaatagttggtcttttagccttttcacaatggagtccttcatgactactttgtgttctctggaccagagacagtagctaccaaattcaagttgacaagccttctcattttccacttcatctgtgtttgtgcctttgtctagtctctttctaactttgctaacctcctgaaagcaatgcatgctcgttagtacctcttgttgaaaaaaaaattctcaggaagaaaaatagagcgctctatgagaatgaagctatcctcgagagatactaggatgcagtatatttagcattgtcctaaaattttgtccttgaaagatactgggacacagtatattttcagcattgtcctaaaatattgtccttcaaacatacagggacacagtatttttcagcatcatattattagaataatggcatgttattacatcagtacgactaaaaggaaaggtaatttttggcgttattgcatactatctacaaatatgtgtttgacctgaaaatatagcatttgataacttctagcatcataatacttactactactgttactgcaggaccttagaattccattttaatgactgaacgtgtcacaaaagtagcaaaataaagtacaaattcgaatgctagaaagcatactcttgtgccttgagttgactccttcacagcctctgatgggtcaacttttggtgagggaagaactgtgtatagatatgaaaaagaatactataaatatcatacagaataaaagaccaatcaggaataactggaatacagcatatagacttcttaaacaaagagcagcagtgaacatattgttagtatcacaatgacaacattgtttctaaacaacatttgcatctagtatgtaaagtaaagtattgggaaatggtgagaagcaagagcgtgggactgaagaaaacttgagttcacatataatatttaggatgaaggaccatgcagttgaaattatgtccatatataaatatataatcttcatgttactatcactgttctttgtgtaacccgaaatgctagatttcctgttaagtttaccagattacttcgtatagcctataaatctataattcatgaatgacatgctagcattggcaacattttagtcacatctaaaaaccttagctgcagaaaatgaactgaagagtaccttttggtttagtgctaatacgggaggtgtgtcgatcagtttgcttatgcttctgcagccctccgctgttaactttgggcgtcttctttggtgcatcctgaaggggggaaaaagaatgtgttagtgttgcagatgcaaccacacaacattggcaattcaccaactgctacaaatactaattctaatttttcatacatttttgcaaactattttttcataattcatgaaaaaaatgtttaagtatttcccttgagaggcaataaccaacaaggatacagtgttgtcctcggaaagctaacacgctagacttaaaattcacctctaagttgcaggtagcaaggattagacaagtatcagtcgtcctggccactcatttattacatcataggagtagataatgcgagcaccttacgatgcattggcaccaattgaggtttcagaagcaaacaacatttacaaagcagtcaccatcatcgaacaggatttgcaaatgcgaacctgattcagtccattgacagtaccgtcaccatccgccttctccacgtgatggaactcaggcaaaacaacctcctaaaagccaacgcgaaatgcaataatttagcgcgcgacgcagccttgtaacacatcgaaatcagaagtaggtgcaggagaaggagaatgggggggttaacagttgcgggtacctgtcggcgccgctcatccgtcgtgacgtaccctgcatcacattcacagtcacagacaaaccaaatcaaacaaaattatccggcggcagttcgaaattacagaaccacagagcaatcgaacaacaagtcgatgcccagatccagcggaagcggcactgatccgagcacgagggggcactgcattcccctcccccaaaaccctccccactaaaatggttccagaaaggcgagagggttacgaaccggattgagagcggtcgaagaggaaggcgaggggaacgagcagcgagcagaggaagagcgccagcacggccacgcgtggccccctccgcctcttcgccggcggcggcggcggcggcagcagcgtcgccttcatcgccacctcgccccactactgacactgctcatggcgaaccgaatgcttgggggaatcgaagcggttgcggtgctcggccacactccgcttggatttgaactgaacaacaacaactcacaattcacaactgatcgatggatggatggatcgatgggtgggtgggtgtagtgcgagtgcgagtgcgagtgcgaaaggggagtggagaaagatggggaagaaagaaagaaagaaaaagaaaaagagagagagaaagccaagccgttgagagggccagcgtgtgtgtgggcgtgacgtggggtccagctgtcacgtgatcatgccaagttgccattgccaaccgtgtgctcgctgctgggccggaggcagcgtgggccgcccgttcgaggatgggtggcctgtattggtaacgatcctagctgggccgaaattaggatcgctgccattgatagctatccatattccgcccaaaactgaacgtatcgcaccgggaagtccatgctccatcgcagccaggctgtgtctgacactagtcttcactgaaaaccaactagaaacaaaaaagaaaaaaacttgatcatatttgaggctaggagcagactctgattcttctacaacgaatcagggtcactggatatgatgatccttcaaggccaaacggcactagtttctaaactctgaacaagcagaaaaaactgaatgaactaaagatcagttgttagtgatgaacaggtgaatttttcatacggataaagagggaaagaagcctacactcattaccactaaattttatatatacatcatttgagaccgtatatgttcctagatatggggttactagcattgacaaccaactggtaacattccttcagatctttaatttcacataatcatgtagcagccattcttcttgtacaccagaaaattgccttccagattgtccaacatctcgacgacacattctcttttcgacccattgaagtgcttgacaacatcctccaacgaaacctgcaacaactaagatcatcaacgaggaacaacatgaattccaatcgaagaaaattcagaaaaaaaagatgtcttaccccattgcgtccttcaaccagttctagtattgcatcctctgtggcaccgattgcggcagtagaatttacaccttgcccgtctatcttttgtagtttacttgctggctcatcaccacaaatcaatgacccatcagtttggcctctccttgtcaaagggcttgcatcacaaacatctgcgccaacttcacctccattggaggtggtctttggtgcctctgatgtcttggactggatcccatcagtaggaacagtaccaaaaacttgatccgacaatccaagtccctcaattgccaagaatgtctggatcatctcataagttacctgcaagtatcatgttgcattttgccaggtaaattaggccttgggaacgctttggatgaactaatatctaacttggcagtgcataagaagcagttgtttgttgatgcaacagatctattagatattaacaacagtagtctaatcatgcatggaggaagggttacattttctggaagttcatctttgattggcttcaacttttcatgtgatccaagctttgtaatggcaagacggatctgtgaggctatctcatgtgtaagtcctacctcctcacaaaacctactccagtccatctcacatccatctcgagcagcatcaagtatgtaggaaatgactgttttctcttttattggtactgctctgcggtaatgctagaataaaccaggatgttaagcagtgaacttaccaaatggatctatagcaaacaaaaacaagggcaactcaccgcaactttctggaacgaaaacttcattttctgccacaattcccatgaacaaaatttcgcgccacccaaactccttgggagattattttgtgtaggttttggagcagcaggtatactttctacagccgataaatcatccacaggaagattcaattcttttgccaattgtgtgatattttggatgaaaatactgccgtaatgcgagatgaagtgctgaaaaccaaaggtcggacattatgagtattaagacaaaatatgatcacatccgtcgtattttccagtagggtgcaccgcaaaaaagtttagtgctctgtgttatggcataaaagtgtgttagctactattattttctgaagtgatacctggttaacaccatcaatattagccaacctagctatggtgctaggcctgaacttcgcaaagtttcttagtgtctgatcaccacatatagcgtacctgaaataatggattaaagagattcaattcagtgttgctccaataagtaaagagcctagaaacctaaacctattgttgtcaacatttaagtatttaactcacggcgccgttccaatatcttgtgcaagttgcatcctgacattcaagagtacttggtagattttcaattcatcctgaaagagatccaaaatgagactaaagaactctaaaataatgaattttacaaataattcctctgagaaacttacctcagaaattttttcagattctgatgggcccaaaggatttaagccctcttctttacactgtgaaccaccatgcccctctagctcaatcatctctgcagtcagctgtaaaaacagcgatgctccatcccctttatcagcagtggatagaaacttgtacccattaggactaacactgaacatagacacaaggaatcagtgagttgtggctgtttgagcattcatgcttgggttaactggagtcaataaattcgaaatgagctagcaaaatagaacaagtagaatattatcttatgcagtgaaaaagaaaatagtcagcacagcacctgatggatctaaatgtatcatggacagtctccttcaaataatctgcacacagaataaaaagaaataacaaatcaaagtgacaatgaaagacaggacaaattgttgtgacacctgatgaataaattcactcactgtagccattaattaacagtacagcattgacaaaacgatactccgaaatctgaatttcagtgctaagagacaatttaagaaataaacatggtagaaaaatacagatcttgagctctaaaaaaaaggtctctaggaatgaaggtatacgagaagaagggtatcccaaaaaaagggtcagatgaaatgagctattatggtgcctactctgtacaaaatatgctgtttgcatccgtgccatatgatcgaggacctaaggtcatgaaaaacactacttttactaaaagaatgaactgcagcatcacaatgtttattgatactattattttaaaaaaatgcaaccatttattttctccaagaaaacgacactgtacatatgtacaaaacttcaagtcagcatacagaacatgtatcttagcttgcacaagaaaatgactaaaaatatgtagagagaggcatacgatggtaccatgtgctaaaagcaggccgccaagagctttccaccagtttggtggatagtcttttccccgcccatgcaatggaagtttatcaaaattgttttcaactattttcttgacctacaaaatgagaaaatacttaccatgaaacataatcctttacaaaattgttactactgctcaaggctaaggtatttttttcaaaaattattagttgtatcacttatatcttattatcttataatgaactaatttgtgattatgaaaagcttgaacgatcaccaggatagtgcagaaaatataagacctaaatatacattccttgaaatattctattcacattgatctttgttcccaaaaacattatcagcacacaggtgatcttatccaatcaagtgctaatggccaatttatgtcacaagctggcaaaaatcacaaacatcaggatagaaaccatacacgtgatccacggagaacatcaataggcaaattaaggccccaccgtccaccacaggacttaatgcaggacagcaacaagaaggattcttttgacaaatccctctcgttttttgtccttgtgcaattttcacaattacctgcaaatcaagagatatgtcaaaaaccaatgagccactagcagttgaaataagactcgaatatatcttactctttttaaatggaaaacattactagatgagttcaaactgactcttaaatgtaacatatatacttaccacagtcagtggtgcggtcttcgccaaagtactgcagcaagaattttctgtgacatgtagcaagcaggcaatatttttgtgctgccatgaaggactccatgatggcttttcgatgagtttgctatcagtgaccaaaaaaatatgagacactaaaatagtaagcaactgaaagaactaggctgcaaatatgtaagatatatcactttggcatgaacagagatacgatgcacataatattcacatacacttttagcttcagcacaatagaaatcagatttcataaaatcacttctttggtaatatagccagcagactgaaggcagtccatctcttccacaacgcccactttcctggtagtaggattccaggctctttggacatccataatgtattacacatctaacatctggcttgtcgattcccattccaaaagcaatggtagccaccatcacaagtacttcatctctaacaaacgatctgtaaaggagaagcataaattatgatgagcccctattgtaccagaccaatattgcaaaggcagcatgcatattataaattgaaaggtattaactactcatttcatctgtctaaatatctttctagtctaataacttcatgatctagtgcatacgtaacagaatgccaatatttctacaaacattaaagatcaaattatagcactgcaatattcatagatgttcgtttttcctcatgaaaattgtggcacgatcaataaaatttaatacagttatgcaaaccgtagccaacaaaacaattatgcaaatcattctttatgcaaacaaaaagggagtaaagtggaaagcataatgaaatgtgcacaaagaaattaaagtagatgatatacctatgtgattcctctctagctttatttcccattctaccatggtaaatgctggacttgattccagcagcaaccaatgcctcatgcacctgaaagaaaacggcttacaagtcatcacatgtgcacctattacgaaagttcaaaaatacgtaaatgcatgataccataagctgtaaacctgttcagtctctcggatggtagtacagtatattattgttgagccacccacagtacagttctttgagacatccttcacaagttcattgataaaggccatagaccggttgcatgatttcacgccatagaaaaggttaggacgatcaaatgatcctaccacaatgtgaggaatgcgcagggtcaaggaagtggcaatgtctccacgtaccctacaaaattatatggcactggtcaaaaaaaaattatatggcactatatatttggtgattggaagggaaaaaaagaattagccactgtaaacaaaggtaacgcaacctacgaggctataacaagtgaacatgtctattttgaaaagaatgagcatcaatatattttattacaatagaaattagtggtcaaagttacgttttggggaacttgtcagtgtccaaaacagcatggtttcatgaacagaagggagtataatcaaatccctgcatttctgtctacaatatattttacacgcatcaagaccaaaatttagtgccaatgtgaaatggaaaatgacatttctcccaaagtcaccagctaccgcgcagcccccactctatcacttgattcacagtttcagacatgctgtcagtttacatatgaacacaataatggaggtaagttacaagttttccaagccatttccagcttctatgatatgtggagtattgtgccaatagagatataattatacccctctaaaaaacatacagctatacactctcactattcttactttaaatagagaagaaacataataatatgatattattaatgggcgaaaattttaccaagcagggaaacaactaatagtgcaacatctatacctttgtgtggctgttgcagttaaagcgacaaagggaacacccactagaaggtcacgcaacatatgcaactgtttgtactccgttctgcaaacaagaaagagaattgcaatcaagaaaaggtcagctatttattaaactggatggtgtgagttttaagggtgggagcacaaattggtaggcagtatgaataacctgaaatcgtggccccattctgatatgcagtgtgcttcatcgacagccaacaagcagattccggcagcctgcaagttactccaaaacctgggaagaagatttagaatgtcaaatcaatagaccgaatgctatgttatcaaacccatgagtgatttgttgtgtccatgaaattgaatgagcatgcctcccatttccagacaagcaaatacataatcaactattccttttagactaaccacgcataatcacaaagtggatgtgactagagtttatcaaaagactactagagtctgccttttaccttgaaggaagtgagacagctttctctggtgtcatgtacagaacatcgaatgcgcctttttcagcctgaccgctaacagagatgtctgtttgggtgctgccaaggtattcagacttcacgccatgctgctttaagctcatgacctatttgaagtagataagacccacgattatgttttcttgtaaaaacaatcaacaaagatcaaagcaataatgatctgcaatgagtatttgaaccatacctggtcttgcatcaatgacagaagagggctgacaacaacagctgtcttctttgtaacaagtggtgggatttgataactgcaataaaaagaaatcaattagcaatcaataactaatccaatgatttcctggaagaagaattagatgatttatgtatgtgtatacccaatgaagatgaacttaactacttaatatagctcataggctctatattactatcaaaatcattatgttttatttttctaagatagcataaatgcacactagaaataagacaaacccaattctgaaagaatgttttacctgcccaatcaacaaattacacaaacgccaatatgaacattacacggcgatacaacaacccatatatcaaccaaatgcagcattccaatttagatttcatcactggaacgatctaacttgcacatccatagaaatatccacgatagctagcaaacagtggcaccgcacgaaggaagggaacagccacagcaaaattttccccacagggaactaactcaccagatcgacttgccgctgccggtggccatgacgaccaagcaatcccggccttccaggaccttctgtatgatctcccgctggtacgaacggaaccccgagaagccgaaatacgtctgaaaaaaaaaaagcagaaacgccccagttcaagcatccagatagggttttagcccgcgggatcgcggggctagggtttattagggaatgggaacgccattagggcaacgagcacttgccttcagagctgcctccatcgtacgtggtatggggctcgcgcgcgcggtcgcgcccccgcgtcggcttcggcgaggggagttcgattgagcggcttcgggaagaagaaggcgaggcgaggcggctggggtggagtggaaggggaatgggaggacggaacggagcgatcgggaggtggtggcgaaatgggtggtgttttggtgtttttggccgggtagaacggaacggggagcgttgcggcgggtctttttattggacttcccgccatttcttccgtttccttttttttttccgcatggtcgcgattattccttaataataaaaagcctgtgaggcccagttttagcccattaggccttgtattctttttcgtgtggtcggattaagtttacttgtggtccctagttatcattgagttcgaattaaatccttgaaccgcaatagttgaagtgaaacccccatctttcaaaaccaggttaaataaaacaatatacgatgattgggccccacatgtcttttatttaacctgattttgagaaagtaggattcaacattactgatattacggttcaaggatatcatataactttgaacttcggattcaacattactaacaggcccaccgttggcacattaggcttcggcaaagccggccgtatcaatttatgttttggcaattattgttaaaatcttagttgtttgatttggactgatgctaccttggtttaaattttgtcgaaaataagcatatgttgagatacagctaccactgcagttttacagaccacacaaatatactacctacagaaatgtacatagacagatcagaaagttctaactggatacgttgtcgagcaaggcctctgtatgattttgggttcacaatgctaccctgaaaatagcaacgttagcaatgcacccagcaaacaagattagctagcatctctccgctgacagaattcagaaattttagatagctcgactgagaaatcctgaaccagaagacatctctacacaagtcctggcctcaaatgtgattacaaaaactcctatgtcagataatgggtgggaaatgtcaagaggcaaagatcacaacaaggtgtcgactacagtggagattgcctgaggtcctcctcgctcaagtaaagccaatgcaagatcgtgctcattccaactccgaagcccagacgctatcttctttagcgtgtccagtttaatgtcccgcaaccatgacgggacaaacttcaccaccaggaacacaaagcgcgatacatatgccttccaggtgccatggtcacaacccagaagaatgtgcccatccaatacacccgccatgaaatccatatggtttcccaccactcgtggccttcttgacaggaaagacaatttcatgacaggagaagttctttccgctccccagagcagactaccacagaagaagagcatgttggccatggcgtaaccttggagtgtgcttgaaactggtccagggtctttcatactctcttctcgagctgatagcagcagcgtaggcaaggtctcctcatacaatacctggaccagaagaggtccacctgcaacacacaggagtcccccaccaagcatcgcaacttgatgcgccatacatgcagcgctggatagtggcgtgcgtcctgattttaactgtggagggccactggaagagaatccatttgcaagtttgtcagcccactcaatgacttgcttcaggattacctcactcacaaagtaggtgtcatggaatgttcgacaagttctcaggtaaatgaaaccaggagccatgggaagctgaagaccttggccggtgattgcatctcccattaaggcaccaactccacggtttgcagtaaagtcagacccactgcacgaggaccgtagaaaggatgagaagcaactttggatgagctgtgcaactgcatctttatctctgccgaatggagaacgcagacaagagaggatgataaagtcatgccatcttctgactttctgtgtccataaggctgctatgatgggcatacttggccaggaactgccccctgcgcagttctctagtgcctggccactgatcgcatggatatactctgaactcttatcaagcttaaatgtaattgttaagctgaccagcgcagccattggtaaaggaagcattggtggtacaccacctgcaaaatgaaataaagaaactatattcatgaagtgatattaaatggaatgaacttaaaagatcatataatgatggagctgaaatttatcagtaattaggtgtgaagcaatgcaactaaattgatgcacaagaataggatgcaggtaatacgtggatagcagctgggaatctgaatgccagcagatgcgagaatttcctttatttctgcttcgatggaatgaagagaagcaccaggactaggccattcagttccattcatcgggaccattttccagattcctcgtgtaatttctgctaagaagtagctaacaattgctgcaatagaagctggcaagaagtccacaagatctctcaaacctgcagcacataaataagattaagacttggggatcaaatcaatacggtgacatgaaagaaatggagtttcctcacttgtagtcaagtctcggctggaaaaccgtccatgagcacatgctgtaagaacagcttcaagaacaaaaggaacagcttctaaaaattcccatgcaggaactgttggcctttggtaatcatctggtgtacttacagaggaaccactgacactactgctagaagtggatgaaagattgccagatgatacaacaggtttgttcatttttctgcaaatcatactcaaaatcttgtttgcaacttgatgaacaggatttttgttgcaaagaccagaaagggttgaagctatgcaagcttgattctgaaaataccaagcccttaacttggggaaagaatcaatataaagtggttgagcaggaacctcatttaatggacctatgttgttgctagagtttctactactggcagatgaatttgcaaagtcaatatggttattgcgcattaacagcaggtagtccagagtaagctccaatctaactgagcctccacgtccagctagacagtattcttgtgggggtttataaaatttccacagtcgaagaagacaaagaaatgcacaagagaagaccgaataaactgatatttcaccaacaatggcaggcttgtggttagatggaggtggtatggacccaaaaacttcacagattggcattaaagctgcagcaacatctggaacctgtattttacaaataataaatggtataaatacatataggtgcagacatggagttagcataatagctaatatgatatagacatgaaaataatcatgtatcatgtaatgaatgtgtgtataccattatgctagtcataagtaaaatattaatatatggtttcagtatatcatgtacaatggctctcacaaaaaaaaaagatatggggaccaaacgacacggtaagctatggcagtcattaactgttagcaacaacaaatgatagacattacagcttactgcaacaacaactacaaaagaataagaagataaaatgttagcaatgagaggcaaactgtagaagatttgaaattgaggatatataagactacacaagatcagctcccatgtttaataatttgcctgtggccttacagcagctgcattgatttgtaggcagttccataatttttactttgaggagaagtgaagaacaaatcaggaggatatttttttcccctttcagaagattaaaataaaggaactataatgaataaaaaaactatgcaaaacattcaccagtttgatattttgagaataaattgtgcaggtgatagtacatgatgtattgctcaccattccatacaaagaaataatgtggatagcatcaccataagaaataccaagcaagagtgcatttaatgtagacatctgagcaaggtagtggctcatgctgccctgtgttgaggaatttgagggcaatggaggtgataatagcttgaccaccatgcggaccacatattcctgagacgacaagtaaaatttaaataatcatcattttaggttaaaaagtatgcaagtgcaaatgaacctttttggcttgctcataagcacaaggtcaaatcaggggcatgaccacttgtaagcgtgcagtaagataaggcatacatcatataggaaagaataggaaagacgaatttgcatgtggacatggccatggcagtagtagacacatcaaatgcgattgaattgtatttcagttaaattgtatcaataaggtgagatttttttaaccatatgaacataaaagttgaaatggcaatataaacaatttccaaacttctttacacaatataattaatctaaaataaaggtacctggatattccaaccacaaacaaatgatgcaccacaaagaatttttgcagcagctgatttttcctcctctgaaccatttaatgctatgtgatataacctatccaattctgtggtgctgaaacagaatttcaaattaaggcaggaacatgacaatgccagtcaatagaccaaaaaaatgagcatgaattgggaaataaaaagaatcattgaatcgagaagaatcagcttaaaaatggagttcctaaacgtgaagtgctagtcctagtgtcttttctaaaattcaagctccaattgtttcagagtatatcttaatgtttacgttgtttggaaaatggcagaagcgttacacatttaagttatcatcttgcttgtggcattggttgtctacacgcagcaaagtggtaataggaaaaagttcctagctgcaggataagtggttcacttggctactattcatttgctggttttcaagcaggctctaacatgtgaaaaccaaaaggttgccaaataagtgaccgtaaggatattgaggtcatagagcaaggagatagtaaagatcaatgtagatggatcttaggaaaggtttggggatctgttccccccaactctcagagtgtcgtctcccagagagaagtattgatggctacgattgaactactccatctccaggatagtttccaatcggacattacagggcaatgcatgcactggaaaatgctctaataatatggatatccaccatatcatacagagagatgtaaggaactaatgtagttcttcggttcagatgaggaacttagtagcatcaatgatgtaagtgtaaccattcaaggccaaactcctaatggtgaatggcttcgattgaattaaatttccatttttgtcataaaaatatataatttcctgacatgtaaacctggaaagttcagcacacattggattttcttttcttttcttttttttttttgcatccaacacacttgacctgaagaattcagagagtttgcttagccaggggtataactcgttgtgcaataggtagtattctttcttaaaaattgcagtgcagcaaaccagcccataaaatttataattttctatactaagttactcgctgctagtataactgcataccttgaagcaggagtagcaatcagagcatcaataagtggacctgaaagtggtgctccttgcataaagtttaaccagggggattcttggggtaatgtcgcatctttcaaatgcccagatgatacaacatagccgggccataagtaagaagatgtatcaatcaaattccttgaaatacaggcttcaactataagatgtagcatattcccaactgaaaagggatagatggtaagaacaaaaggcctaaacaactttacatacaaaaataaatatatttgcatatagaacaaaaaggaaaagtggtagtgccaatctataaaagatgtgaaagaaagaaagatgcgagtatttgtgaacaaagaaagattgttattttaaaaaaaaaatctctactatcaccactaacacaaaggcatggatactcgtgtcaacgaagaaaaatgtgaagtatatatagacacggagaatattatggataagatcaaatctcaattgagtatcagaagtgtaccagtttttgtcgaagagtcattttggcccatcatgccagggttgccacctccagacttatagttggccttaaatgctgctgcttttgaggctgcagcattggctgcatttaccactgatgaaggaggtactagaagtcctgaatactggatcaaatcctggagtgatgatacaagtcctgatgtttttggaagacttttgcttccttgagctccatggacatcagtttcttctttaagaattgcaccaattgataatggaataagagctaatagcatgcatagtcttgaatctagatgaggaattggtccttcgagaggttctctagcctatttagaacatttacatgtgagacacaatacaagtgtgtgtgtgtgtgtgtgtgtgtgtgtgtgtgtgtgtattcaacaataatagccaatacagaaaaggtctatttacccgctgtacaaggcgaagggcagaaatccaaagagctttaaaggtttcctgccaactcgcctcattaattgcttggagtgtcttggtcatttctgattaagagcaacatgatattagtcaataaaaacatgttatctcataaagaattgacagtaaggcggtgttggttacaaaaaccatgttcatcgacattgctagccaacatttaagatgaactcacggcacacagatagttcaatgtattgcagccattttaaagaatgaatacagaaaaacaaaggcaaaatttatgtcaattaatcggattgtgtatgcacacctttcagaacctcgatagcagatatggcgcttagatgttttccatcaattgcattctcaacatatatgtcaaatataacccagcatgcagctctcccagctccagtaaactggcccagcatggagccaccatatttcatgttaccaagaacacccaaaagccttttgttgtttggttgataggctgtattgctaaccctccacatattcatcaacagatcatcaattttatgattagcagtcaatagtgtctccaattccattttgtgagcttcaaccaagctcaacctctggcttaacacactgaacttttcaggcctaacctagaaaaactgtctcattagcaggcatttgtaatgtgcgtcacgcacaaagtatgtcaggagaaaaggtgtattctttaaaggttcttaggaaatttgcgatgatatgaatcaataaaaaaaaaacttagaattggatatttggatagcaatttcctctaactgagcatgacttacatgttcaggaatatcaagcgcagaaatgattggatcttcctatcagcaaccatcataatcaacacatctaaagccataacagtgttcttccggcgtagttgtgcacggtgctcgttttgcttctcagttgaaacccctttgacatctaagtccatatcctgtggcccttcaatagcgtaaatgctcccctgctcctctgtcagcccggatggaaagccacagtcttcaagtgtgcaatcgatcagtttggtgattacaaacatcataaagaaaatgatgacatgtccattgtcgattccagaaaatccataaatctttgacagttgcaaagcatcatcgatggactttgttatcctgaggaaaaaaaaacagcaattccattttagcaacatccagcaggatacaagcgactagtacgttctgctctgttgttcatactacagaagtacaggcaattgcagtatacccctactttgaatttggcggtgcagggtttacaattttgttgaaaaccgatcaaaaatcatgagatttcgtgatttcgagccagttcaaaattcaatcatagctactgattgtgctgtgcccttgagaaagttcatgaccgcacactttccgatgtcacattccaaagcagaactcttacttgtctcgattaggcccggcctccatggagagaaaggaggatgtgacgttacttctcagcaactccaggtagagccggtacgcctcaggctgcgcccgccgctgcggcagcaccctgcaaaaacccaccatcgccaaggagtcactcacaaaatgcttgggaagatcaccgaatccgcgccacgaacgaactgggaaaaggggacccccgccgacctcggggtgaggagcgcgaggacgtggagcgggcagaggaggcgggaggccacggcgtggccgacgagcttccacagcgagggggagttgtgcgcgaagcagaggttggagacgaggatcccggcgaggtccgcgctggggagccccgccccctccccggcgacgacgcgggccacctccaccgcccacaccagcggctggtccccacgcgcctccgacgccttcagcgccgccatcaccctcctctccagctcccctcccccgcccccggcgggcaccatcgccgccgccgccgccgtcgccgccacggtgacgacgccgacgagggtttggatttggaaatttgcaactgtgtcctcctcacgtggatggaccgcccctctcgagtcttccgattcgtgcgggcggtggcgtttatgaaaatggcggggcagatcgatctgggccgtccgatctgatccgagggtcgggcacgcctgtcaggtgggcccggacgcggagaccggacaaaatcatcgggtgactgtgaccaagcacgaatgattgggaaagaaatggtgtcccatgtagtaaaccgttatagctgttggctcacaatggggaaaaagagtggcacctgtgtgttcatcttgttgagaatctatgtgtatcgctgttacgttttcaatggtttttaaacggattgataaaatatgatgcttaggattgtgtgaattcatttattagtgtgttttgtgcgagtgatggtgtgttgatgtggattagtttctctgcgtaataaagtagcacatgctaaggttcaacggatctggagagctgtggccacggcagacgtatgagctgacgcaacgtttttttcgtgtttgtcatttgtgagaccaacgaacatagtaaacctttgctatagtcatttttcagatcttgcgcccgctttaagcttccctttacaattgttttgtgctttgtctctttgttgacgtagaaataaaaattgggtaaattggaaccatgccattataaatttgcaaagtttgagatatgtcatcggtatctcaatgacatctagaacccacatgagtcaatgacatgtgggtcaggatgacatatctcaaattttacaaaattataatggcatggttccaattttcctaataaaatttcatagccgatgtaagttggtttcgaatgccacgttaaaatgacacttgtttcttctatgttgtctaatactatatctctattaaaatattatcatctagtgatagatgaacacattgtatttaaatttagagtgttaggatatgtcacatagatatcaatattttgggacttcaaaagtgttttagtgcaattaaagttaaacagttgcacaagttctcttttttgatttcaacgaaaaaatgtcgagccgcttgatattttccatgtgtttcggtagggtcggggcgatcgatatgcaaccaaaacaatcacgctcactgggactgacagaatcatcgagttggtcactcgttcaatgagaaatgatggtcatcacacgatgcaaagaccagctgctaatggatgattaacacgttgtccttccttgtaaccccgccgataagaacgttgaccttttgtaaaaaaaaaacaaacaaacttcgtcaatgacacactattataaagtgtactactagcagtgattcagtactgacatgacagtatgacacattgacacttacgacaagtttaatagtatagccaattaatagctgcaaattatctatagctaatataatatacaattcatacaatagttgtttactatagtattaatatctgatcatacctgtcatacacacattacgtattggagtccgtactgctcttatctctattcatttatctatttaaaatatatatttatagctagcttataggctgctattatacatgctcttacggtagtaggccgtaacaaactggtagctcgtccatgggccattggattttctgataccggcctgtggctaacagcccatctgtctcatccatttttcacaattgtgttgggctagtgcgcgactggaaggccttttgttatggaataatttaatggccctccctcatctcttgctcccgattaaatcacctctctcaacagtaaaaccaaataagtttattatgttgtgcaccagttttgaaagacgagagaagtgttatacccaattttacggttgagtgagacgattcaataaacagaaagacaagagggagacaaacagacttattccttttgatatctactgaggcccaatattggtgtcactcagcctttcgccacagcccagcaagtctcacgccgaactgggccgtatatacggcctgtgggcacactggcgctactagctagtactagtgtgatgtgctaatatgctatgctgtggtaccttttgtattcctacaaatttactgcagcaattttttttgtgtttcaatcaggaatgtaaatgaagtaacgacctttttttaataaaaaaaagacagataaacaagttgccaagcattttggggacctgcatggctccttatattctacaaaataacaactgtaaaatttttgtgtttcactttcaatcagggtcctaacatggagtagtaatatcctccaggaaaacaagttaccgagcaatttgggtgcctccatttccatgcaatgcaagcgtgaaagtgaccatgttattttcaacttttttcgcccaaatattgaaacagataatttgctttacgcttcaaaatatatgttgtctcaacaaaattttcttctactctattacttggacagcttgtattcagctatttgataattttatttcttgaattatttagtttacctatctatcaagttgataaaccacagcaatataatccacccaataatctaaatgaaacataaggattgctattgaaagggaagataaaaaccaaacaccgaatttttaaggttgacgtgaaagttagagatagctagggtcaagaacatccacatcactattcgctagattagcaagcgtacgtccatgtagatgtataatatcaacaccacctcaccacacaacaagttgtgcgaatgaaggccacagaaaacgaaactcaggccctgcactgcattccgatgcacaaaacaggcactaacagggataaggtcgtagctgcaacaaaagtggaattgccttgcctt

SEQ ID NO: 7771 - DNA, 2018 bp, Oryza sativa
tatctacgaactataccagctggacgccctcgacgtctctattatgagttgctggattttgtaagtatcgttcagttagatttcttattacgtttcctttaattaattaggtccttgtatataagtagactatatataatatatacttccttttatcgttgtagaatggagattcaaagggcccgacggtggggggttttcgatactggattcatcgaccctcagaaagtaaacgtcgcaatgctcgaccagtatccgcaagccacagaggaaaatctcatccatctcctgaaggcgcagcattacaagacgttcatactgttgccgtacaacacagagttagtttaattttactgtcttcctataccaaatttcattcccatacgaacatgctaagtgtttcatatgtaatgcatcccacgcacattgcagattccactaggtgctgttactcttcgacctggaggcctgcaccgtcaacatatatgactcaatggataaaaaagagtctacgtttgacaaggttttcgaacttatagacaggtattgtcataagttcctatgttaattaagaatcttgttataattaattgctactaagaatcatagctttaaactccatgtagggcttggtatcggttccgtcatttggtccgcggcaaatggagagaaagacttatgcggaagttcaattttcctgtgagtacacatgctctacatttatattgaatctccaattcaaatacatacaagtgtatattaattagatgtctcgccgtttgtcatttatttatagtgcgcaaagcaaaagcatggaactaacttgtgtggctactacgtgtgcgagtattgccactgccttgcaaaccaaatcatcaccacaagagagctcgatgtacgtacaaataaattcaaattttcattacgtatcgatttgttgtttaattactaattaatttcatacattcatatagtttattcgcatgagggataacctgatcacacacaaggaatttatcgcggcggttcaagaacaactcatgggattcatcaacaaacaaatccttgatcccaagggtgaattctactacgacggaaatacaattcataggtccttagcttctgagataacgactactactacgtcgaaatcgtagctagctaggacatcataatggattgtaattaatacatgtctatttttctatatgcatgtgtacacattttctttaatgtaaatatatattttggtcatatatatatatgcaaaaaaaatgttaagtgctttcacatatatatatatatatatatatatatatatatatatatatatatatattatatgcatatatatatatatataatatattatatgcatatatatgtattgaaacatatatatgcatggtatatataaaccatgcagcaacagggccatgcaaaaaaaaaaggtcagctcaatctttagtcccgattgatggctcagccggccacgtggctgagccatctttagtcccggttattttacccgggactaaagatagcgatctttagtcccggattgatagtcctggtttagaaaccgggactaaaggggggttacaaaccgggactacaaacgctttctccaccagtgtagagatcctaccttttaccataaactccctttaaatagcaagttttacggttaggtcctttgccccatctctaccgtttatttttaatccgatggctttgaatcaagtggtgacacgtggcaaatttttagaagggctaaccagatttatagggcgccatgtggctcaataggaagccagaagctataccctgaattcagttttagagattggagttttatatatgtaattatacaagccaagcaacaaccttgccatatgaagtagagtgaaagaagagttggtgtatgttataatttgttaattattaatttttaatttcgaaattaaattaacgaagagccatattgagaaacctaactaatgatgccttcgcttgaa

SEQ ID NO: 7772 - DNA, 8782 bp, Oryza sativa
ccctcgctcgccggtgagctctcctttttcatccatctccggccggccacattggtcgttgcggtcgtcctctccacccctaatccctctcctcctttcctataggtgtcgcctccgcccgtccacccctcctcgtcgccgggtcaccgccgcctttcatcctccgctctggtcgccgtgctcgccggtgaggctcccctctgctcccctttttccctctctcccgtgtgcgccgccatccttcgcgcgtgcgccgtcgccttcggccgctgctgccgcttttcgcgccgcccgccgccgcctcccacgccgccggttgccgtcgccagcgaccgcatgccgccgccgttcgccatgcttgccggccgacttgaagccgaggccgagcccggtggctgctccctgcatcgtccgatcggcttgggccgatccggacccttggtcccgtggaccggccgccttgagccgctgacatgcgggccccgcttgccggcgccgccccctcctttgatgacgtcagccctgggtattattgcgcaataaattgattaaggacttttctttattagtaaaaacacagtttatcttctaaaattcataagtaattcatccgagctctgtttaagtccattcaagtctcagtaaattcataaaaatgcaaagaatccattaaaaatggttttgtttcctgtttcagtagtcttatagcatgttttgcttgtgtgctttgtttgtcacgtagatttcggccgtttcgtcgatccgcggtttctcaaagacgttgctgaggtctcatcagttcgagagacaggcaagtcatgctttacatttgatcatattgtacccaatttacaaataccttgcatttctattaattgttgcactcttttacaatgtcatgtgggatgggtcctattactcagccatatatcgtttaccatatgccattgataactggggtatcaaaatgattagatgttggtttaggaaatgcttagccatgcttagttcaactagtacacaaaaggggatcacattattacatgagcatagttcaattttgactatgagcatagttctggttggtgccaccgcaatggtgttagttatttaaaatacactgaatggtgggttgtgcgtgcatggttttgctggtcgcacccatggcaattaaggaccggttcacgggaaacactgggagacttaccgtgcttaccacaagcgggagtgggtaactgcttgatctgaggtatagctcaaccctttcctaggcaccggtggcgagggtgggcgtgatggagttgggtcggccggggtgtccggttgtctagctgccggattcaccgcggcacaagaggggaccgcccactaccttttgaggggtgggggtgaaaccttagcatggtgtggatggttagggaagggttatgaggagggtcttgtcacgatttccccctttgcagtgtcatggtgatacttcggggcatggcgacatgtgtggaatcgtgtcttgtgggtacagttgtacacctctgccagagtaaaactattcgaatagccgtgcccgcggttatgggcgatcaaccagatttaccgtgattagtctcacccctagtttagcttaatgaactggtgtagttcaggtggttggttgggcctattgcaatgtggtgtagcgttggacaatgtttggttaatattgattaattactacaactgttttactgctttcaactactgtttttaaatgcctgctttgtgcaaagagcctttagcctccttcggttatatcctgcatcatacctcctcttccggtatgacttgctgaatacagttggtagtactcagtcttgctctcttttcccccacaccagagctgaagatcttcctagtgggaagtgtcttaccgaagttgatttcgtcgctgtcgtcaaggattacctgtggagtggagtcaccccgctgcagaagtcaagtttccaagtctagctcgtttttcttttctgctgcatttgtaatcatctccatttttgtaagacgtggatctgtatgtcaaaaattgtcgtttgtgtaccctggctggtcctagacagggatttaatgcacattcagcttcgaaattctggttcgtgaatttctgggcatgacacatgtcttcttggcactcagtccactcagtgacgaagtcggctaaagcttgggacttgatcgaagttcgcggcatgaaggatatatccagggacatcaattctaaggcccactttgctatccgcccatttgcttcacgattatgaagtatatccccgagtggaaacgatgtgaccaccgtgaccgagtgaccttggaagtagtgaggtaatttgctgacggtcattaaaacaccatataacagcttttgaacctgaggatatcttgtcttggagtcagccaaaaccttgctaacgaagtagattggtcgttggactttttgaacatggccttcttcttcacgctcaacaactaggactgtgcttacaacctgggaagttgccgacacgtataacaacagcggctcttgcggatgtggtgaagctaagactggtggagtagtgagaagttttttgaagtcttcaaaggctttttgtgcttcgggtccccactagaaattgtctgttttcttcaacagcttgaaaaagggcatccccggctcgccgagtcgtgaaacaaaccggttgagcgccgccatgcaaccggtcagcttttgaacatctttctaggagctcggcggtttcatgttgaggatggcattgattttctccgggttggcttgtatgcctctacgggacaccataaatccaagcagcttccctgacggtactccgaagatgcacttttgagggtttagtttcatcctgaaagcgcggatgcttgcaaaggtctgttctagatccgtaatcaaatcatccttctgcttggtcttgacgactagatcatccacataagctccaacgttgcggtcgatttgagttgaaaaacatctttggatcatgcgtggataagtggctcctgcgttctttattccaaacggcttggtgatgtattattaggccccgaagggcgtgatgaacgaagtctttaaccagcggatctgatgatatcctgagtaccaatccactgagtagctcgcagccggccgttgagtcaactacctggtcaatgcgaggtaacgcaaagggatctttggggcaagacttgttgaggtcggtgtaatcaacacacatgcgccattgtcccgtcttcttccgaactaggactgggttggccagccagtcgggatgaaggacttccttgatgaagcctgctgctaacagcttggtcaattcctccttgatcgcatccttcctatcctgtgcaaaacggcggagtcgttgcttgattggtttagcgtcttccttaacaagtaaagagtgctcaatcaccactctaggaataccaggcatatcagatagtttccacgcaaataaatctttattattttgaagaaagatgatgagcgcgctttcctatttacaatctaactcagcgcctattacagcagtcttagtaggatcagaggaatctaggggaatcttcttggtcttggcgtcgccttctccgctctttggcatcttggttgcgggcacttctccttcgcttgctgtggacgtagccagtcggatttcttctcgggcgagcgtgatctcgcgggtctgggccatctcacagctttccttgtcgcatgtgacggcttgcttgatgtcactccgcagggatatgtctcctcgaggaccaggcatcttcatcatcatgtaggtatagtgcgggacagccatgaacttggctaacgccgggcgtccgagtatgacatgatgttctctgtacggaaattctcccgagtgctgaaagtaataggaagagtgtggccgagtggtgtaacaaatagccccgggatgactctgtgaaagggcgcattactcggctttaattccgtgcgagggatctgcatgtcgtccagggtcttggcgaaaaggaggttgagtgcactgccaccattgatgagggatctgcgaagcttgacgttgtgaaccaccgggtctagtaccagggggtaccgtcccgggtggaccactcggtctggatgatccgagcggtcaaacttaatcgttgtctctgaccaccgaagatattggggcgtgtcaggttgagcagcgttgatctccgttcggtcagcttttgctttctcttggattcataagccaggggtcaaccaaagatgtggttgagctccttgcgatggtcttggaaaccagtcagtgcatcatcttcaccatccttcttctttgacgtgctttgatctccgtcggaggctttatgtgcgttcttggcgtattgttctgcaaactgtttgtagacgaagcaatctttggccgcgtgattggaattgggatgatgcggacattgggagttcataatcttgtcaaaggtgttgacgtgcgaacgttgtcgggaggatggtgtagtagttgccacaagttcctcgggcttacgcttgcgatccttgtgattggtacttccactcccccctgtagtcggtgtatctttcttcggcttccaagtggtgcccgactgcttggacgtggtaatggcatcttcggctttggcatactcattggctttttcgaacatctgcttgaccgtcctgggaggcttgcgcccgaacttgccgactaggtctgtgtggcgaacgcccttggtgaaggcggcgatgatgacgtcgtcggtgatgtcggagatcttgttgcgttgctcggaaaagcgtcggatgtaatctcgaagggattctctagacttctgaatgacgttgtagagatcaaactgtgtaccagggcgttcaaaggtaccctggaagttggcgatgaagtggtcgcgaagttccgcccatgatccaattgtgccacagggtaacccgtgaagccaggaccgggcagaatccgctagggccacaggcaaataattcgccaattgcgagaccgtagacggtgagccaagactccgggttagtggtgccgtcatacttctcgattccaatcggcttgaagccggctggccaatccactcgacgcaggtcgcttgtgaaggcagcaactccatccacgtcgtcgtcgtagcgatctggagaatggtggggagcgtagcctcttgccgcgcggcgctggttgatagtatcgcgaagatcgacggggcgcctgcgatgtggggagtgtggtcattcaactcgatgctccctgtgtcgtttgggtggcgagtggatagatcgctcgtcgtgacccctactcctgcgagtagatcccgcgccgacgacgctgaggcttggttggtgatagtcttgagatcgaagatggggaactcggctgccagtcggcgtgtggacgcttgcggagttaatcgggaccaaggcggcgatcatggtcttggtctggttcaagatgttgacgacgtgattggcttgattgagcgcgtcttccttgaggaggatgtcgaggagggtgatcgctgcaaccgcgttctgttgggggggcggaaaaccgctgtcccctcgacgtcttgttgcccaataagttcctatgcttgtcgcccggcatccagggcacgttgtcgccagtcctcagcctcttttgcagcccgttcgcgttcctgtggctcacattgtagccgttctcgctcttatgcttggcgctcctcttccagtcggcgtcgttcggcttcctgttgtacacgtagttcttctgcttctcgggctttacgctcttcttccgtctcattgtcagccatgaaaatgccgaataaaggggtgtgtagttgtctttcaaacccttcgtcgaagtcgtcgaggtggcgtagtcgtagcggtagccgaagtcgtcgtactccacgatctccgatggtcgcgagtcgatgccgggggagctgaggtagccatccagttgttcgtcgaaaccgtgccgagaggctggagtatgacaccgacttccctggagctaggccgggccggggctaaagccggatcccacctaggcctacggggagaagacgcccttgtggtgaatacagcagccaaatcatcgggagtttcatcaggattggcggataggccccatcgtcttgatcgggtcgtgttgaagtagattggatcccgtccgagtggtttgaagccaactcggtggagatgatcttggggtagacctcggccgagttcgggataccgaactaggtggagatctggcctcttcccgactggtttgaatccgagtcgaggagagaaatcttgccgaagtcgttggtgatgaagtcgaggctgccgaattggaacgcctgcccgggagggaagacaaagtcgtcgatgccggaaacgaaacccatcgcactagtcggcgaagaacttgacgcttcccatacctggcgtgccaactgttgaaacaagatttcgacaatactaaaagggggtggctatcaggctggaaaagtggatgggtttaaagacaaggaattttatacaggttcaggccttcttaatcaagaagtaataccctactcctgtccggggattgatccaccaagtatattattgatcatatgatctgggaaaaaatcgtgcccctagaggcacccgtacctctccttatataggggaaggggtccgtattacaaaatacagtccatatccctaacggaatatgtagttacagataaaatacaatcgtaaccgactaggaactcggatgtatccttgacatacaagtttagaatttaacccgagtccttctaaagatattctatctagacatggcaccccatatccagtcggactataaatgccttgtaggcatggggtatccataatctccacacagctataggttgggcatgttttatatggtgtaggattacattatagggtatatactgtttgccacaagcgttttgactttgttctgatcgaaatgaaaagattgacctgctgaacacactccgttcacgtcgagtagccatagtagcttagaaccgaatgtaggcacacatcgtaaagttgtaaatgcaaccatagtagacggtgacgataattaatttcaacaatgtactaggatttatccttacagaggcattatgtttaaacttgcatgacatttttattcagatttgtatcaccccgatgtttcaacttgtcacacacgatgatgcatgactttatttttctctcctgtactactatactgctacaattcaataccagataccaccgacggtgggaatgctacagggagcagtgttgtagcttgggtagataccgcatattgacggcatgtttagggccaacatagcttgggcttgagcttgactctgatcgaagtagacgctagcaaactgttgtagctgtagctgctgcacaatagcctgaacactgctaatggcctggcagtgagactgttgtgcgatcatcctgagctgttggcagcactgctgctgcatgacttggcagtttctcagttgaaacacgggtgattggaagaagggggttgccactgtgctgcactgctgccttacgaactcaccgcatgggctaagcatctgttgctgcagcatgagatgcggctgcagctgatattgcctgtaaacttgagtaacagcatcaaactgcgcagaggcactgcatgcagcaatagcaaggagagcaaagaagaaaatgatcttcattgtggtgggtttctagttcttatgcttttgctgtaatgtttgagttgtgagaagaatgaagggggtttacattgtgcttgtctatttatagatgcgatggatgggttttctttgaattccttatcggttgctctagagtgtttgtttttgttggatattctattgggatcagagtgagtcatgtcatttggaagttacgtgatgtgcctccacagatgtccttgtataccatcgtcaaagtaactttattgcccatcacagatacttgatggttggcaagatagataatgttatgactcctcactcactttatatctcagtgtgacatggtgtcacacccagaaattctcgaacccgaatttctaagctgaatgtgcattaaatccctgtccaggaccagccagggtacacaaacaacaattgttgacatacagacccacgccttacaaaaatataaaagattacaaatacagcgggaaagataaaagcgagctaaaccgggaagcttgacttcagcagcgggcgactccactccacaggcaaaccttgacggcagcgacgaaaccaacctctctgagacggctccaactgagaagaacttcaactctggtgcgagggaaaagagagcaagactgagtactactgtcacgcccgaaaattcactagtaatttccgaacttatttgtgcataaaatcctcgtccaggaatcagccgaggtacacaaactgacaatttaatatacaaattcatcaaattaactaaaacgataaatacttacttaagatgcacttagtcctcaccatgaagaaaactgcagcggaaaataaaatctagcgaagctccggctccactcccacaggcagctcaactggggtataagccaaacgtcttctcctcctagatcttttttcttcaactgaggttgattgattattgcaagaatgagcatatgacatactcaaccagccacacagcaaatatgcaagtgcacaaggataccaaaggatggca

SEQ ID NO: 7773 - DNA, 3850 bp, Oryza sativa
  unsure (1)..(3850): unsure at all n locations
tattaatgacaccaagctaactacggatcaattgctacgaggcgcaccaatcgaaaaggcggaagtgaaatacatgtacgaactcggtaaaccgcttgtcaagcctgagcagttgcagtccctacccacacaaatgtacaagttccatcaactgtacatggagatgagcgccaccggtagagagatgatcggagcgaggatcagggacacagacttcttgcaaggagatgacattctctggatcaatttcaagggtatctacgaactataccagctggacgccctcgacgtctctattatgagttgctggattttgtaagtatcgttcagttagatttcttattacgtttcctttaattaattaggtccttgtatataagtagactatatataatatatacttccttttatcgttgtagaatggagattcaaagggcccgacggtggggggttttcgatactggattcatcgaccctcagaaagtaaacgtcgcaatgctcgaccagtatccgcaagccacagaggaaaatctcatccatctcctgaaggcgcagcattacaagacgttcatactgttgccgtacaacacagagttagtttaattttactgtcttcctataccaaatttcattcccatacgaacatgctaagtgtttcatatgtaatgcatcccacgcacattgcagattccactaggtgctgttactcttcgacctggaggcctgcaccgtcaacatatatgactcaatggataaaaaagagtctacgtttgacaaggttttcgaacttatagacaggtattgtcataagttcctatgttaattaagaatcttgttataattaattgctactaagaatcatagctttaaactccatgtagggcttggtatcggttccgtcatttggtccgcgcaaatgaagagaaagactatgcgaagtttcaattttcttgtgagtacacatgctctacattantattgaatctcccattcaaatacanacaagtgtatattattagatgtctcgccgtttgtcatttatttatagtgcgcaaagcaaaagcatggaactaacttgtgtggctactacgtgtgcgagtattgccactgccttgcaaaccaaatcatcaccacaagagagctcgatgtacgtacaaataaattcaaattttcattacgtatcgatttgttgtttaattactaattaatttcatacattcatatagtttattcgcatgagggataacctgatcacacacaaggaatttatcgcggcggttcaagaacaactcatgggattcatcaacaaacaaatccttgatcccaagggtgaattctactacgacggaaatacaattcataggtccttagcttctgagataacgactactactacgtcgaaatcgtagctagctaggacatcataatggattgtaattaatacatgtctatttttctatatgcatgtgtacacattttctttaatgtaaatatatattttggtcatatatatatatgcaaaaaaaatgttaagtgctttcacatatatatatatatatatatatatatatatatatatatatatatatatatatatatatatatatatatatacacacacatgcatttgcataacatatatatgtataaatacatatatattatgcatgtatatgtattgaaacatatatatatatatatatatatatatatatattatatgcatatatatatatatataatatattatatgcatatatatgtattgaaacatatatatgcatggtatatataaaccatgcagcaacagggccatgcaaaaaaaaaaggtcagctcaatctttagtcccgattgatggctcagccggccacgtggctgagccatctttagtcccggttattttacccgggactaaagatagcgatctttagtcccggattgatagtcctggtttagaaaccgggactaaaggggggttacaaaccgggactacaaacgctttctccaccagtgtagagatcctaccttttaccataaactccctttaaatagcaagttttacggttaggtcctttgccccatctctaccgtttatttttaatccgatggctttgaatcaagtggtgacacgtggcaaatttttagaagggctaaccagatttatagggcgccatgtggctcaataggaagccagaagctataccctgaattcagttttagagattggagttttatatatgtaattatacaagccaagcaacaaccttgccatatgaagtagagtgaaagaagagttggtgtatgttataatttgttaattattaatttttaatttcgaaattaaattaacgaagagccatattgagaaacctaactaatgatgccttcgcttgaaatttattatttaagattgcaaaagaaaatgcatatttaaattaagacaaaaggaagaaaagcacctaacctggtttgctcgctaaatttgtaaattaatcacaactattcctcctgttttgcatccttcattcacccgcctatgaccatattttaaaagaaatcttccacgatcaccttgtcattggtctatgctaatatgctttgtagattgccatggctttgttgcacgggttctgcagcagaactgcatacatgatgcaagcatatacctgtcattagaaccgtcacttaaattatagatggtggaatgattaacgaaacaatacttcactgtgccggcgtagtggcaggagattcgaaccgggggatcacgaacgagatgtggccatctcagcggccgctcgctcctcactgcactgtttctgcagcagatactactactgcaagaattcgccgagtttgacgcccgcgatgatcattgtcaggtagatgcatcgtccatgaagtatcgattttgttcatcaacatgacaacatcttaatggccgcgtgcatgatcatgatgaaaagccactggaaacaattgaaacgaccgtgcggacggactaaagatgatgaaacacgatatggattggtcaacacacttgtatattagatgggtttttggaacacgtatataataaattcgttctaaattaaaacccatatataaatacgtattataatctacggatctttctaattaacgcgtgagagctcctaaaagtgtccaattagtataggtatagatagatagatagatagatagataggttatagatagatagattgtccatatagttgatgagtaaattgtatcgcgaagggcggtagttacacaaggacaaagcgtgattcctacttttatttatggttatcgttcatcactagaaattaattgcaaaaccccggccatctaccgatcatgttctttctatttactcaacctcttcatctttgttcctgttgcaaacgcacaatcaaaaaggctacagtagacggcatggcttcacttttgaccaatcatctactgttggagacatgttacgaggattttcgaccagaactgccaaaacgaatcaacgaccatggggcgaagcatagccaaggctccgggcaaagccgaagctcttcgctaccgagttggccatcttcgccaagaccttggatgatatgcagattcctcgctccgagctaaaaccaagcaatgcgccttttcatggagtaattccaggattatccgcaactccactcggccagatcaccctcccggtcacttttggcactcgggaaaactttcgcacagagaatatcagctttgaagtcgccgatttcgagacagcataccatgccatactcggacgcccggcgttagccaagttcatggccgtcccgcattacacttacatgatga

SEQ ID NO: 7774 - DNA, 24562 bp, Oryza sativa
tatcatccacagccactgcatcatttcatttctgcgctcctcatctactattgagccactcaattagagttagtcagagagggcaacatggctggagctatagtgagtgtttcaactggtgccctgagcaccctgcttcctaagctctccctgttgatccaaggggagtacaagcttctcaaaggcgtgaagggtgggatctcctttctgaaggatgagctgaccagcatgcatacccttctagtgaagctggcaaacaacgaggagaacttggatgagcaggtgaaggattggaggaacaaggtgcgtgagctgagctatgatattgaagactgcatcgaccttttcctgcacaaggtgagcagttctaatgctaaagcgggccttgtccggaagacggcagctaaaattagaaagttatggtcgcgccacaaaatcgcaaacctaattgaagaacttaaggctcgtgttatagaagaaagtgatcgccgtttgagatataattttgaagaagttgctgataattttagccatgttcaaattgatcctcgactgccagcactctatgtggaagcagagaagcttgttaggattgatggtcctagagagaagattatcgagtggctggaaaaagatgaatctcagaaactcaaagtagtatgcattgtgggctttggaggtcttggaaagacaactcttgcaaaccaagtttatcacaaaatgaaaggtcaatttgattgttcttcttgcatgccagtttcacggaatcctaatatgacaaagatactagttgatttgctcaaagaattgggaagtcgtgttgatacatcagatgatgagcgtcagctcatatgcaagctcagaacattcctacagtgtaagaggtatgtagaaaaaactgcaaatggtgtttttccatatattttaaccatgtttgaatatatttcccatgttaaaatagctagcactgtaaagcgcttgtagattctgatcttcaatttttgctagattgtaatatctttgcaagaaaaaaaaaagaaaaacttgatgggcactccgctcattggtgcttgcttaacattggcatgatgaaatgtaaaatgaaaggggcaatctgcacagaatagttagaacctttaagtaaaggctaaaaatagtgatactgtggcttcttcatagatcataaaaataaaccatccatagtttcagtgattatgttaaggattagctatataagcaatgcaattctggaacaaataagatggcattgaacttatggtcttgtatttacatctatgccaaatattacaaagtagttcgttaaattttagaagtgatttggcacgattcatataaagtgccgagttcatcaaaaagaaatacttcttccattttatattttaagtagttttgattttcttagtcaaacttcttgaaagtttgaccaagtgtatagaaaaatatagcaacacttatcgcactaaatccgttgaaaatatttctagatttttctataaattagaaaaaatgcccgtgcgttgtaacgtgtgaagtttattttaattttattattattatatggtttagttaagatgaaattcactgtgggagttcgcttggatatatatatttttagaaaatcatgagctgcaattaagagtccgatcgtctcaagttagcatgtgagtttttttaaacatatttcttacatggttccttcagtattatcaaaagtgaacgatcttaattaaaaccgactcaaatacagatttgtatttccaaaagtaaataaacttaaaaaccgaatcatatatggatggcgtaccaaaataccggcaaaaacatctttaatttttattatagtagagacttggtcaaactttcaaaaagtttgacttaaaaaatcaaaacgacttgtgatgaaatggaggtagtaatagcaagtctggtgtgtggccgtctcaagcagggaatacatgctgtagctgcaacaaatgacaaactccaccttaattaaatattggtctcgtttcacccaaatggccaatctagtaaacttttacaatgtagttttcaaatgggattgatgttttttggagcagggcagcatggtatttgctgaaaatgactgcacaatacatagcttgttcgttttaaactctatgatttattaaccagatcacgttttctcaatgctaaccaggtacttggtcattgttgatgatatttggagcacaaaagcatgggaagttgtcaagtgtgctctcccagagaacaatttatgcagtagagtaatttcaacgacaagaaatgcagatgttgcaacatcatgctgctcctgtttagcaggatatatccataacatgcagcccttaactgagcaggactctcagaagctattttttaagaggatttttggggacaagtcagcatgccctccttaccttgaacaagtctcccatggaatcattagcaagtgccatgggttgccattagctattatcagtatagctagcctgctagctggaaaatcacatatgaaggagcaatgggagcaagtgcacaattctattggttttgtgtttagtcaacaaggaattagagatatactgctgcttagctactatgatcttccgataaatctgaaaacttgcttgctatatcttagtgtgtttccagaggattacaagattgatagagaagagctaatatggagatggatagctgaagggttcatcagtgaagtgaagggtcaaacactggatcaaattgctgataattacttcaatgatcttgtaaacagaagcatgatccaaccatttgacatcaagtacgatggcagggcagatgcttgtaaactgcatgatatggtgctcgaccttataatttccctgtcaacacaggagaatttcacaaccataatggaagggcaacaatataaatgttcttctaataagattcgtaggctgtcagtacattcaaaatatctggaagatgaagtaatgcacgagattatgatgaattgctcgcaagttcgttccatcagcttctacgaattgcaagatcaggaaattagtcttctctcaactcttaattctttgagagtgctagcttttaataattcccaccatcttggtaacaaaagcattaaatatcttggaaggtttttccagctgacatatttgagcatcgcttctcgtggtatcactgatcttccagagcaaataggaggtctgcagaatctactgacactagacattcgtggcagtagtgttgaaaaattgccatcaacaataggttgtttgaaaaatctggtgcgtctacttgtaaatgaagctgtgaaattgcccaatgaggttggagatctacaagccttgcagcagctgtcatttgctggtaactataattccatagtatttgtggaacagctgaagcggttggcaaacctaagggcgatttccatacgactgcatgatagcgcacgacttggtcatcatgatatggcaaggtatatggaagctttgaagtcatctcttgctgtgatggataaacaagggatccaatcattggaaatatcctgctttgatagtgtgataggagaaaaactcatggatttattatgctactcaccatgcctccaaaggcttgtcatacatggttgttgtatcggtctgctatcaaagcagatgacgttgcttgttaacctcaggcatcttgaaatatgggttagaaacattaagcaggacgatctctgcgttctaggaagcatacccactctgctcttcttcaggttatttgtagtatgtggacctgatgaaaggcttgccatcagcagccatcaattccgatgcctcaagcagttcatcttcgtaagttacggaggtgggctggagatgttgtttatgcagggagcaatgcctgagctccgatggttctcttgaattccgcgcacatgaatcagactgcaagatgggttttgagttcagcttaaagcaccttgcaagcctggagcacctcaaagtcacaattttttgccatgttgccaccagaagccgggtggaggctgcagaagcttcggtcaggaatgcagccagtgcccacccagggtgtcccatatttgaaatcaatagatgtggggaacaaaacatggtagatgataaggtcgacaaggaggagatactcaaggatatagatgctcatgaagtggttcggcgtgacatgaataactgaaattgcagtttgcaacaccctatgtgagattctacttttactgctgcttataattgcctgagacagaggctaaactgctagccacatgatcactattgatgcatggaaactaagttatcagaccttccaattcagaaccatcatcatttggttttgtctaattactactggtaatactggcaagtagaccttctagcttgatttgtaaacacattgagctttaatatttcaaatgcgggtagccggactgccaatgagcatctcttgcttcagttgtactttactctatgtacgccgaaagtctgcaagctttgagtaatctcttctgcaattacttctccgaaaggaccaagataagaaaacaatatgtactacctccgtttctaaatgtttgacgctgttgacttttttaaacatgtttgaccattcgtcttattcaaaaaaaatataagtaattattaattcttttcctatcatttgatttattattaaatatacttttatatatgttgtcgaatggacaactgcgtcacgtcgaaagacgtggttttctcaacagtggatgggaaataaaaaaacaattgtattactttgttcaaattttttgggatccccctattacatggccataaagagctatttatagccccattacaggtttctactactagggtttagattatataggggaattttcatggttacccttatgatagggacattatggagggcacactgtgtcctttacacatacgggcccctactgggcctaaatggctcggcccatctatctggcgaaatcccccgagggcgtagcggcccaccaggcctctcgacaatgaggttcggtacttcggcgaaacccgtgcctgtgtgccgaggctttcaccgcatcatcttcgcccatgccgccttctggcaaggactccactcggcgaagctggtgtaacccaagccactgctttcgcccgtatggctttactctcaaccttcgccgcccgcctccggagcgagcctgttgcttgaatttttggtttcagcaggttcggccgaaggccctccgtggtaagcctccaacaagcccctaacgggcaagggtgagtagggagcttcggccgagaccgtgcaaatcgaatggtataccacgaggtgccccctttcggccgatgttcctgccgaaatccatgatgtacccctgcgaaataaataacttgtttccatgtttacaaaaaattcttgagaaaattcctttctcgcatttgttacaaagtatcgaaagggttgacttgtctttgtcattactatgaatagtaatgggccctgtgggcctctcctttattgcaatcggcctttcgctgttcggctcaggcccgatgggaatttaccgtttcgtctgcccttgggcacgtgtcaggatttgattggctggtaggcgaacggtctcgcgatggggttatatagccctgggccgacttgctattttctcttcccccccccccccgctcttcacttttttaccacttgacgcgctccacgctctcttcatttgtctgccccttagcttcttcgccaccgttgtgcttccgcctttcggctactttccccttttttcttggccgcgagcctgatggctcctcgcaagcccactaaagccgggtcaactggcgaagaccctagcggccttggcgaagggtggtcgtgtttccttggcaaatcgctcgtcaaggaggccgacttagccgagttggtatcctccgatgctcttgtggagggccaaggatcatgtgggggcgaagccgttgtcccttcgccctgtaatgggcgaacggttgtcttcgctgcctacttcgccgccgggcttcatctcccgtgtgacgatttcttgtcgtctgtgctcgcgacatacgaggttaggcttccccagcttagtccatcagcgttcctgaagctcgcggttttcgcttggatgtgtcgaacctgtgggtccgctcctaccgccgagctattcgccgttctatttatggcatgcgccacgaccaaggacgtgcagacgccgaccgggccgaggaaaactgtcttcggctgcgtgaacttcatgctgcgtctggagtgctcaaatgcttggccggtgcccgcgtcgatggccaagtgggataggaactagatgcaaaaatggttctacatcgccaacccttaccccgccgaggatgccaaggcaaattggctcctttttcagcgttccgccgtctccatcatcgcgaagctaaacgtggagatcaatgggaccctcgagagtcgagtcccggcttatactcctccttaaggtcacacgatggctaagcacccaagacctttgtgaggagttttgcctccttcggatctcccttctcgctcgtgtctgggatgtgttcgtgaacgagggcgaagaggttctcgggcttccccgccttgttctccccactggggtcgaaagtgagtttttgcttttgctccgagccgtatatttcctttatggaaatgccctttaggctaaacagttgtttttgttttgctttttcacagcccgaaccttggaggacgccgaaatagaggcgtcgaagatgataggtggtctgacaacggccgaattcgctcgcttgctccagcgccagaccgacgaccgaggtgaaccgagttcatgttggcgaattgccaagtcagtcgaacccctccagggccagggatgacgaagtcggcacttcgaagaaacgcaagcgtgcagtcgcgaaaggtggccaggttcgaactcgccgcggcgcgaagggtgcggttgaaagtgacggggaggaggaggaagaagaagatggggaggctggatctgaggatgatgggttccatggctacacccctagttcgactcctgtgaaatctggggcaggttctcatatttcacctacgcgcccgcaagatatcgttgtggcgaacaccctcctggcgatttctagtactgcggcgaaaccggggatgaccgccaggaggaagaaaaagaaagggaaggttgtgcaagtcgcccgcggcttttcgaacagcgaagggtccgacgggacgcctacttcgccgattctgcagcacggacctcctcgtggtaggcgcatgtccccgccacctgctagcgatgccgaagcggcgatgggtgggagtgcctcagcactagccgctaaggtgaatgtttctggggacgaacgggttgaggcaattccttcgccagcccgtcaacgggagggaaaagctccggcggtcgaagcgaccgtttcggacgtgacgctcactgcccacacttcgtccctgctgatttcgccatgcggccggagatcctccgttcgtggacggtgtgtgccatgttattgcaccgaccgacggccttgggctcttcaccgaactaaacgagttcggcaaaagctgcgcggctgcggagagcctgtttgtgcgggtatgagttttctgtgtgccgaactttgtcctttcgcttgtgtcctgccgtaacgtttttgtttctccttgtccagggcctcgccgcacacttaaacgcgaagaaatctgccttacagaggctagacgggtaccgccttcgccttcgaaaaaccaaagaagatcttcgccacaaggaagacgaaaggcgcgtcgtggcggagactttaaagaaggcgaatgctgaaaacaaggttcttttgggggacaacaagtctctccatgctgaccttgatgtggcgaacaagcgggatgccgaacgagaccgacaacttgcttcggccgaggagaaaatcaaatcccttgaagcgcgtcttgtctcggccgaagctgccgccacgaccttggttccggccacagtccgccaagcaggcctgttacactctccggctgccccttaatgaccttggggcgcgggcggaaggcgctctgggcgaaggcgggaccgtattcgacttctccgaatggacgcaggaagcagccggcttggtcgttgaagtggcgggtgcctacggggactgctgcgctcgtgtttcggcgggattcgtcctcagccttttgcacgcgcacggctgtgaccatatcgggaattttcccgacctcgtgaaagaagaatggctcagcaacacgcagtgttctggggcggcctttcgaaaagggttctgggaggatggcggtcgggactgtgcgaaaactcgactccgcgagaaccttgagaggatcgcgagagatgaggaagccgctgctggcaacaccgaagttgaccctgggccgtcggaacaggccgccgggtacgagggcaaaaacaacggaggccaagaccaccctgatgtgtgaggcccttcgccctctgtgcttttttctttatttttctttagtcctttcgggctttttggtagcctagccttgtatataagctctttgcatgttcggctttgagccgttttcaacttgtaaccaatatgaactttattctaccgatgaaatattatcctttcgctgatctaattgtttcgtttgaaagtgggattgatctcatctatatttccccttttttgcacttttttcttttgtgctttactagcaggcttgtggccgaaaggtatgcgttcgacctcctactgaaaaatggcgaaacaagaacgagaagtttgtggcgatgaaaggcctgccgaagattaagtgtccttttcggcctgtttaccatgagatgttgattaatggcaatagctataaggttgtaaacgttgctaaattgatgcgcgtgcatccaggccgaaccttagaggactacgatcgctatcgtgtgtcacgtcgtgaagatagttcgagcttttggtgaaactttaggagatggttcgccaagaggcgatcgctcgtcgccgttatagtttagtttgtgtttgtcctccatcccctttgagggttgtatatgatattagtagtgacgacgaacccgattcgccaaaccattccttagggggtgaggactgttgtgtgggcgaaggtgtaatttatctgtaagctcgtatcttagggggtgagcaccgttgctttcttcgcttgtatcatgttgtcagacttgtattcttcgattattttttcgaagctaataaagatatgctttatttccttttcgctatttctcgcattgtcactcttcgtgcttttgttaggtcggaacgtgtcggcccctttgcgtatcgtagcgaaataggtctgctgacttttcagcttttggcttccgttttcgatctgtagttttctgcgctgggaggcgcgcttgtgttttcatattgatcgagtgtaacggtgttcggttagttgtttcccgaaacaagctgttgcggtttcaacgttcggcgtgcgatacttcggccgatacgttttgccccccctggcatttttgctgatcaggcgtttgccttggggtttttccacaaattatcattcacacaaaaaggtgaaagacacaaatattttatgctggttcaggcctctagagtggataatagccctacatccagttttatttttcattttcctctcttttttttgcattttcgtgctgaagggcttacataatgccgaaaggcttacataacagtatgtacatttttacaagttggcgatttgagtgccacccattctacacatagaaacgcttaagggaagcagcgttccaggaatggtcgaactctttgccttccagcgtcgctaggcgaaaggagcctgtcctggacctgtgcttgatgaggtacgggccttcccacttcgattcaagcttcccgaccgccactgggtttgccttcttccttaggacaagatggccaggaaatagctctgtcggtcgaacttttttgttgtaagttgccgaagtgcttgtggcgtatttgcgcatgtgttctaaagcttcaactctcaccccctcgaggagttcgagtgacacctcacgcccttcttcgcctccagagaacatcacccttggcgaattagcccctagctctgttggggtcattgcttcgtcgccatggagcatgaacgggctgaactttgttggccttgtgggggtcgtccgaaaggcccagagaacagatagcatttcttccggccatttacccttcgccgccccctcaagccttttctttagcgcctctaggatcttaccatttgcgcgtttggccgccccatttgactgtgggtgtgcgaccgaagcgaacctgatttccaggtttagcccctcgcacatctctttgaacttatcagagtcgaattgcttgccgttgtcagtgatgaactcttttggtactccgaaacagcaaataatgtttttccatacaaacttctgtactgctgccgaagtgatcgcgccgagtggttcggcctcgatccatcgggagaagtattcgattgctacaattgcgaacttgtacccgttttgcgccacaaggaacgggccaatgatgtctagcccccatctagcgaaaggccagattggtgcgataggctgcagctcatattggggtgtagtttggcttcggctatgccgctgacagctttcgcacttttgggcttgctcgacacagactttcagcatggtgggccaatacacaccctgtcgaaacactttggaggcaactgttcttgcggcctggtgtgcgccgcagagcccttggtgtatctccttcgccatttcttcaccttcggcaaaggagatgcagcgaagcaagggttggagcaccccggagcgatatagctggcccgagactagcttgtattttttgcggctctgagctgtaggcgcttcgcttctgcttcatccttcgggagccagccgttcttgagatacttcacgaacggggttcgccaatcaccaatcctctgggtcttcacccagctctgcctggtcgattgccatgatgtttgggctctctatgggcacacttggtgcgtacaggacctcaaaaaagatgcctggcgaatgcgggcctccacaagcagcagattttgccagggcgtctgcttcctcgttctggcctctaggtaagtgttcgaccgttatgccgacgaagcacttttccatagatcgaacagcctccaaatatctcctcatcccttcttcttttgcctcaaaggatttgtcaacatgacttgccaccaatttgaagttagttcggatgagtaagcgccgaacccccaaagctttcgccttttttaggcccaacagtatagcttcgtattctgccgcgttgttggttgtgtcgaactgtaaccttgtggcgtaccgaatcggcacgccccctggcaaagtgaggactgccacagcgcccacccccttgtgcgaccacgagccgtcggagtacatcacccaaggttgttcgacaggcttgggttcaagggcgaatgctggtgtccatttggccacgaaatcagctaggacttgggacttgatggcagtacgggcgacaaaatgcaagtcaaagggagataactccgccgcccacttgctgagccggccagtaatttccttgccccggggcacttcgcccaaaggatactgcgatggcaccgtgactttgtggacctgaaagtagtgtttaagcttgcgcgaagccatcactagggcgtaagcgagcttctccatttcaatgtatcgtatctacgccccttgcaaacttcggagacgaaatacactggtttctggcctgactctgtttcttgaacgagggctgcactgactgctatcggcgaagctgctaggtagagtagcagttcgcttcccggtgctgggctgaccaaagcaggtgggctctgcagatattgcttcagctcgtcgaacgctgcttggcattcgggtgtccaagtaaactttcccgtgccccggagggtcttgaagaagggcaagcctctttcggctccctttgagaggaatcgactgagtgccgcaattcggcatgcgagcttttgtacttcacgtacgcttgacgggggcttcatttgctgaatggcatcaattttctcggggttcgcctcgatacctctttcagaaacaagaaaacccaacaacttgcccgcgcgaacaccaaaaacacacttctcaggatttaatttcatacccgccgcgtataagttgtcgaaggtctcctgtaagtcggacgcacggtcgaaagccttgcggctttttacgacgatatcgtcgacataagcctccacatttcgccccagctgcttgtaaaggaccttgtacaccagcctggcgaaggttgccccggcattccttaggccgaaaggcatcctgaggtggcaaaaggtgccgaatggtgtgatgaaggccgtcttggggatgtcggctggattcatgtggatttggtggtagccggagtacgcatccaaaaaactcatgagttcgcaaccagctgtcgaatccatgagctggtcgatccgcggcaaggggaaatcatcctttgagcatgccttgttgaggtctgtgaaatcgacacacatgcgccatttgccattcgatttctacaccagtaccgggttcgccagccactcgggtggtcgatctcctgaatcaccccggctagcagctttttcccttcggctttcgctgcttcttggcgatcagcgaacatcttgcgcagcttctatttccttggcttggcatccggcttgaccgccaggtgatgcatgatgaggtctgtcgaaacacctcccacctcgtcggggccccagacgaagatatcaatgtttttcttgagcacctacaggatgttctcaacttctctttcacccatgtcaccccccagcgatacaaatcttgtgggatcggcatcgtcgacttgcaccttgatcaccctgccgtggggggcgggcttcggcgtgtgcttcgcccggtcatgcggttcggcctcaacattgtgcaccgctctgttgattgcggccaaatcgccctttgatgtagccaaaagttgaagccccttgaccacgatcacccctgcaggtccagacatcttgagtttgagataattgttttgggaggtggcttcgaacttgttcaaggttgcgcggctgaagattgcattgtagttgtatggaatgtcgacaacgtcgaacagtatttgctcttcgcgtatgttttcacctgtgccgaaggctaccaccaactgtgcttggcctaggacttgaactgcttcttcgccaaaaccatgaagcgaggccagtgtttgggtaagggctagggtaggcaaccctatcttggcgtatgcttcggcgaagatgacatcggccgaactccctccgtcgactaagatttgccggacttcgaagccagctacctcggccgagatcaccagggagtcttgatgtgggaacatcactccttcggcatcttctggcccgaaaaagatctgttggttcaaatattgcgaggccccttcgcccgccgaagtgatgttgtgcaccattcgcagctgcatcttcttttgcctttttgacagttgattcggcgggtcggcccttataatcacttgcattactccgcgctgcacatcttggcgttgttcggccgggggtgcttgttcttgaacggcttcgcggggtgcttcagcagctgctccttgttgcggtcttggatcttgcgcgttgccacgctgccgaatgtttcggcattgctcggtggtgtgcgaagagcgttcgtggaaggcgcagtaaaagtcttttctgaccttcttgcgaacaggttgctcatggctgcttgcttgctgggcgtcgaactccttgtggagggcttgaacttcttcgacagctatcatagccttgcccgcacggtcggttttgaatttcctccaagtcatgggagcttggccttgccttggcggttgtccttggtgcaccggctgaggctggctaacagcgagaggggctggttcggcgacctgggcttgtatttgggcttgagcagcggtgacagaggctttatcatattcggcctggattgcttgccgttgcttggaatccttttcgccccttgcgtacccgtcaatgatgcgaagcaagtgctcaagtgtctgtggctccttgttggcgatttttcttgtgagttcgccctcgagcagcccggccgaagcggcgttgatgacggacgcctcagttatgtcctgaacttggcatcgggcttgcgagaagtgacgcatgtactcccttatcgactcccccggcctctagcgaatgtcgagtagatgttgctgcgtcttcggctcctcgtaggtgcctcgaaagttaagaacaaagacatcgcgcaattgctcccatgagttaatgctgttagctggtaaattgaagtaccaagaacgggcgatgccgtctagagcaagatgtattaccttcgccttggtattttcgtcgccatgagtggcttcgatcgcggactcgtagatggacaggaactcttttgggtccgttttgcccgaatagcacggaacgggagggaacttgaacttgggtaggattggatggatcttgattcccccgctcagtggtagccccttttcgcccctcgctttgttcgcagcaccttgctgcgaatatggcgttgcgaagggcaaagtcatggcttgcgcgtgaggttgagccacagtgttcggctgctcggctccgaacggcgatgcttggtgtgccgccatggatgggtcgaacgacggctgggtccatgccatggcggcctggtttggcgcctggttagctccgaagcctggtgtcggtgcctgtggtcgaatggttggtgcttgagcagcgttggtgaagtcgaactgcggtccttgactccaaggcgaagcccccagatcgggctggctcgatggcaaccaactgggcgcaccttgacttgtgttcccctccggtcaggccgaaggggctatacctgaaatgctgtggggttggttgagttgctgaaggaaagcttaaagctgtgcttgcaaagctgaagccccttccgccaatgcttgtgacatttggcccggtggtaaggggtgtacttgggcagcgatcggctgagcctgcagctgcacatgaggggtcgggtgtattgctgcggccgaaggctgcccggcgaagtacactggcgcttgcatggcttgtggcggaaggggttggattgatgcttgtgggtggacttggggtggaatgtaacctgtcgaatattggaggattggggccgaggcgaccttggcttgccgcgctgcctcatacacctgctgctgttcttgcatttgacgaagcatgtcttggagtcatgtcatgtttttgcgcatggcctccatgtcagcttcggcctgtgcttcgaggttggggttgacttatgcagcggcgagcgcggtcaaagctacagcctgttgcggtgaagcagcttggggcgccgctagttgacttgtcgaaaggatttctgccctagtctggagcgcccttgctgccgctgccgccttcgccgcatcgaccatattcggcgcctgccccgctgaagcggcaggagccgaaggtagtggttgcggcgtaggggccgacgtcgatggtaccacaccagcttcgacgccgagtgccgaaggctctgctccctctttggctgccatctccactcttgtttcactctccttatgtcttgcaaccttctcatttgcgaccttcttcggtggcattttctctcagtggtttcgctcggaggtccccacggtcggcgccagctgttgtcgaatggacaactgcgtcacgttgaaagacgtggttctctcaacagtggatgggaaataaaagaacaattgtattactttgttcaaattttttgggatccccctattacatagccctagggggctatttatagccccattacaggttttcactactagggtttagattatacaggggaatttacatggttacccttatgatagggacattatggagggcacactgtgtcctttacacatacgggcccctactgggcctaaatggctcggcccatctatctagcgaaatcccccgagggcgtagcggcccaccaggcctcccgacaacaaggttcggtactttcacgaaacccgtgcctgtgtgccgaggctttcggcgcatcatcttcgcccgtgccgccttctggcaaggactccactcggcgaagctggtgtaacccaagccacggctttcgcccgtatggctttactctcaaccttcgccgcttgcctccggagtgagcctgttgcttgaatttttggtttcggcaggtttggccgaaggccctttgtggtaagcctccaacaatatatacatatagttttacatattttataaaagtttttgaataagacgaatggtcaaacatatttaaaaaagtcaatggcgtcaaacatttagaagcggaagcggaggaagtatgatttattgctgcagcaatgatagctgcaaaacaagaggatatcttggtgacattgccttctgatactgtagatatataaaccctagtttactaaatgtgagagtattccctagatttggccaccagtcttatctcgtcctagtagaatctcaagcattttcccagcaatatttccagtcaatggagaagtgggtagctggtgcctggtggttgtttagggtaagcaccacagctggctcgaaagagtcagagagatttgtcaagtgattcttttcttatttatcgatcacatttttaaaactattatatatatcaacactcaacaactttatgaaaatctcataaagttggggctggggctggggctggggctctgggacattgagacatggggacagatttgaaaatctcatggtaaatttatgaacaaatttgagattgatcaaatgtatctatgtgcaaattgtggataaaaaattgtcagatgttctattttggagaagaaatgaaacaaatcatgttataatattggtgcatataccttttgtgcaaatatttaattaatttaccttttgtgtatatataagatgtgattaattgtccgtataaatttactactctctttgataaaaaattaaaacctatatgatttttgaattattttgtcttggggtgcgtgaccacgattttatgtttcaacaagtttataaaacacgatgggagttattgttttaatgctagatattgtagatcatttagcactcgaataaagacatgcatataggcttggatattcatacttttagacatatgtttttttgtttggttattatgatttgtattatcaaatatcaccctaaagatagtaaaaacagattactactacatgggtttataatacggggcctcctaccccgcgcgtgcgctccttgagattaactcgcgcgcgtgatcaacaatagggtagtgtttctcgcttttcttttctgttttttttctcactttttttttgaaaaaaataaccgcctgcacattttattccttttatttaggataggtatgaaaatttaagtcaatatttgaaaacttttaactcaaattttaaaactttcatctcaaaattcaaaatattcaatttaaatttgaaaactttcatctgaatttaaaattcagaacactcaacttaaatttttttaaaaactttcaactcaaactcaaaactctcacgtgaaaattggaggtgaaagattcaatttataaaatatagaaaaagaatcacgcatgtggagaaaaaatgaaagatttccaaaaaaaagaaaagaaagaagaaacagcgagaaaaagcgaaaaagaaaagaaaagaaagcgatagggtaatgggccgcgtgcgatatggtccagaaacacgcgttgatagcgcgtacgcgctgattaccaaattccttataatatcagtaataatatctacccgtgcaacacatgggtttacagcaataacaaattatagaacagaccggacgtcaacaccaaccgattccaaattcccaaatcttcttccttgtagctgccaagatcccaagaaggcaagaagtcaataacgtgccagaaacgccccttgttccctcgtgtccactcctgcccccagctttctccattccaccccatcctcgactcgcaagtacccagctaagatcagggagctcatctccaggagacggcaattaacaggtaacttctctagttctcctcgtctcttctgctccatctccggcgaccagtgattcttggtgtgccactacactactagtggtactccaacaagtctgacggccaatgccaactcaatcgctgcttttccccaaaggcgaatctatctgcatctggattaccaaggtatttttgggcttttcgcacatatgcacacatcttttactctgttgttctacaccggcgacctgtcgttaacttgttaatctgttcttgtacaaggacggctagtgaatagaagggggagagagagatggacggagcagcagttagtgctgccactggggtgatgggttccctccttgccaagctatctgccttgctgggagaggaatacaggcttctgaaaggtgtcaactctgacattaggttcttgagagatgagctgactgccatcaacaactttcttatcaacatgtcaaatatggaggagaacctgggtgagcaggagaaggagtggagaaacagggtccgagaaatcgaggattgcatcgatttattcatgcgcaaattcaatcatggggatgtggatgccaactttgtccgcaggacagcaaaaaagataggaatgttatggtcacgtcatgaaattgctagccagatccatcaacttaaggattgtgttaacgaagagagtgcccgtcgtttgaggtatagatttggtgaaagcaatgcccgcatagttgaaattgatcctggactaccagcactctatgtggaagcagagaaacttgttggcatccatggccctatggagaagatcattgatctgttgacaaaacaggatggatcctcacaacagctgaaagtggtttccattgtgggctttgggggccttggcaagactactcttgctaaccaagtacttaaaaaaatcaagcatcagtttgattgcacagctttagtatctatttcacggagtcctgacattaagaagatcttatttgttttgcttaaagatatgatcaacaaaaacaattctaatgatgagaagcacaaaaaagttgttgggatcaaggcagaaaaatcagatgatgagaaacaactaatcaataagctcagagaatacctaacaagtagaaggtgggcacaaaaataattggttctctttcatttactttcctgttaaagtcttcatcttaaatttttcaagtcgtttccatttgttgaggtccctttttcctttgctgtacaatttgatacaagccaattcaaaacccatgtaaatagaatcattactcatatttgtaattaattgttaaacttgataatataagactttgatgcacttgaccaaaatttcttaagaactgtttttgccttgtacatatttcttactaccattagaaattcaaccctcacaatgaaaatgttcatgttgttttggcatcatttggataatatatagtacttttctttgagaggatttgacaggtagctacttatacttttgcacatttagtattgaatttgttctccagaagcagtatactatgtttgcactgtatctcttcagtaaatttcatgttatttttaccaatatctgccttgttaaacttgactaattcactataacatctacataggtacttagtcgctgttgatgatatttgtgtaagatcaaagtgtgttttgattcttattctgtgatgaacaattggcatatgtgattattggttttgatatttggagattatcgtcgaagtggttttggagataatcaattttcaggtgatgattggattcactgttattttatgtgaccggtccgatcgggcggaggttgccggtcagaccggcgctatgtgtgcagtcagaccggctggcccgcggtctgaccggccgacactgtgtcggtttcggtttcgggttgtttatttggatatccgagtttatttcgtgattatgacttctaggtggatactatacgtatgtaatactattgtttgctgctaatgagtcaagttggagatagcttggtctcggaatatggtttctttgtttgttccatgtgtaggtgacttgatgtctcgggagagtatttgcggtgatggaccgggagtcggcttggggataagatgacgtctgtggtggtcagagatcatgcgggatacttaggctagaattgatgcacgtggttgatggagattccatatggcatatgatggaggtattgtgtgcatatgggatgcggagtcgaatttggaaggagtccaaatttggtacgattggttatgtaaagtttgtttcttgtactagagggtttcctaaggtgtttaggactcttagtatgagtttggttcgtggctttaggctgcctaccttatgtataaatagagggggagcgtgaggcttctcggaatcgcttttaagagcgtggagttgatagtttagttagggtttcgagtttagtcgagatttttgtaaggagtgttgttgttgcactttgtaaacacagagagaagcaataaagttgtcatctactttgagagttcttcgatttgtgtttcaccgggtttcggcggtctaaccggcaacacaccggcgatcagaccggcggcaaggcggcggtcagaccggcagcactagggcagtcagaccggcagcgtaagcaggcagcagcaggcagtctccgcgattcgaccgatcgatctacatcggtcagaccgacgttcatcaggcggtcagaccggcgcatccacttcggtcagaccgcgatccgtcgaatttgagggtaacttttatttccgctaaaagttttggtttttgggtatatcaaccattcaccccccctgtggttggcttagttcttgtgattcgatcctacaagtggtatcagagccttatttgcttctttggattttaatcgatctagagtttttgccatgcctgcttctaataagttttcaactaagcctcatgttttcgatcgaacggatttttctcattggtgtagttggatgcaatcttacattatggctgagaattatgatatttggaggaaagtttctcatccttatgtgattcctgaaggtattaatactgatgctgcaaaaactgagtttgaacaaaattgcaaagctcgcaatattcttttgagtgggatttctcgttcggattatgatcgtgttgctcatcttcaaactgctcatgagatttggattgctttgagtaattttcatcaaggaacaaataatattaaagaacttcgtcgtgatcttttcaaaaaggagtatattaaatttcagatgaaacctggagaagctttggatgactatctttctcggtttaataaaattttgaataatcttagatctgttgattcttcttatgatgctaattatccacaatctgagatttctcgtcactttttgaatggtcttgacatgtctatttgggagatgaaagttacatctattcaggagtctgttaatatgtctactttgactttggattcgctttacacaaaacttaaaacacatgagatgaatattcttactcgtaaagttggttctaagtctagtgctttagtttcttctttgacttctttggatgttggtacttcttcatcgaagtcttctgttcttcctttatttaatgccatgtccgatgatcaactcgaacagttcgaggaggaggacttggttttgttatctaacaaattttctcgagctatgaaaaatgttacgaacaggaaaagaggagaaccgaatcgttgttttgagtgtggagcacttgatcatcttcgctcgcattgtcctaagcttgggagaggaaagaaggaagatggtggtagagtcaaagatgatgacgtgaacaagaagaagaacatgaaggagaaagagaagaagaagcattgcatgcagtggttgatccaagaaatcataaaagcttttgatgaatcggaagatgaagatgagagcaaaggtaagcaagttgttgatctagcttttattgctcgtaatgcaagttctgatgttgatgaatctgatgatgataatgaagaaaagcttagttatgatcaattagaatatgctgcttataaatttgctaagaaacttcaaacatgttctattgtgcttgatgagaaggatcatacgattgagattcttaatgctgaaattgctagattaaaatctttgattcctaatgatgataactgtcaatcttgtgaagttttattttctgaaattaatgctttgcgagatgttaattctattaattgcaacaaattggaatttgagattgaaaaatctaaaaagttggagtcttcttttgctcttggatttgctttacatgctcgtatggttgatgagttgattttgacaaagaacgttttgaaaaaaatacaaagttgctttttgtgcgagttctttggtcaatgcttcatgtgcaaataaggcaaaacaaaacaatggtgctttgatttctcaagattgttcaaagtgtgttttgaatgaggtgaagttgaaagatgctttagagcgtgttaaacacatggaagagattgttaaacaagatgaggtgtcttcttgctcaacttgtagaaaacaaaaaggtcttttggatgcttgcaaaaattgtgctattcttactcaggaggtttcttatttgaaaagttctttgcaaagattttttgatggtaaaaagaacctcaacatgatttttgatcaatctaaagttagcacacataatcgtggtttaggctttgatccttatgctcatcatgctagacatcctcctactgttttgggtgttgctaggagaggtgaaattttgattgaaactgagcctaagaacactatgtttaaatctgctggcatcatgtcttctttgaatgcatcttcttcgaaatcaaatgttgtgaatgcaaaaccttctgttgatgcaaaaccatcaatttcaaaaccatctacttcacaaacttgtcgtgagaagtacacttgttcttttttggaaaagatggatatttggttgtttttgttttagacttgcccataaacagaaaaaggaaagagaaattgcttttgcaaaatgacgttagcaaaaatcgggttttaattcgaggaccacggttagaccgacactgaccagtcggtcagaccggtcagtggtcagaccacagttgaaccggcggtcagaccggttggcaggcccggtcagaccgcaggtacagcggcggttagaccggcctcggggcaattttgcgccaaattcaactcagacttttgtgaagcaaaaaggtaattagtctgattctgattttgtcagtgcatttgtacctactggttctactggtcgtgtgactcagtgttggattccaaaatttcttatttctaaccccaacacggaggcctcgacatcttctcgtttgtaggtatttttggcggtatactccccatgagtgttcaattttgagatgacgattgcttctcaaggtaacatcaatttacttttggattgacatatttttggttctactttcttaattattaattcttcatgtgctagtgtttgaggtagtagtttttgttaatacaagtgtatacatgtcaattcatgagaatcttggtgatatcattggcaattggatgtctttttcaaaatctttggtttcttcttgatttttgttcggggaaaattggaggttatattgagggggagttagtgcttattcgtgaatccttttggcatgttttgagggggagtttatacctcatggttttatcaagcaataatatgacaatgaaaaattgcaaaaagagagctttgttttatacatatggtattttcttgtgcatgctaacaatactttaaaggtttatttgtctctagcatagcttgtatggattctagtctttttatgagctttagattttgcttttaagggagatgatgcatgacacttaaattctacttgattaaagtaaatatgcaatgttgatgctagcatatggtttgatttataaatgctttatatatatatatatgctttattgacttgttattcctcaaatagctttaattgctcattgtgaaaaagagaataaaaaatataaaaatgaataccgaatccttggaaacagtcttgacgataaggacgtattcgatgtgagcaaaataatgggtgcc

SEQ ID NO: 7775 - DNA, 4524 bp, Oryza sativa
gagaatgttttttggttcaactgggaatttctttcttttaaaaagggggagaagttttcttttggatttttgagcacgatgtgtacatttgtacaaagtgtgctttttaccacttttgtttttatttttccaaacaccgaaacattttttatgaggtttgccaatgtgttcatcgaggagattgtaagatcaaagtatgttttgattcttattctgtgatgaacaattggcatctgtgattattggttttgatatttggagattattgtcgaagtggttttggagataatcaattttcaggtgatgatcggattcactgttattttatgtgaccggtccgaccgggcagaggttgccggtcagaccggcgctatgtgtgcggtcagaccggctggcccgcggtctgaccggccgacactgtgtcggtttcggtttcgggttgtttatttggatatccaagtttatttcgtgattatgacttctaagtggatactatacgtatgtaatactattgtttgctgctaatgagtcaagttggagataacttagtctcggaatatggtttctttgtttgttccatgtgtaggtgacttgatgtctcgggagagtatttgcggtgatggaccgggagtcggcttggggataagatgacgtctgtggtggtcagagatcttgcgggatacttaggctagagttgatgcacgtggttgatggagattccatatggcatacgatggaggtattgtgtgcgtatgggatgcggagtcgaatttggaaggagtccaaatttggtacgattggttatgtaaagtttatttcttgtactagagggtttcctaaggtgtttaggactcttagtatgagtttggttcgtggttttaggctgcctaccttatgtataaatagagggggagcgtgaggcttcccgaaatcgctttttagagcgtggagttgatagtttagttagggttttgagtttagtcgagatttttgtaaggagtgttgttgttgcactttgtaaacacagagagaagtaataaagttgtcatctactttgaaagttcttcgatttgtgtttcaccgggtttcggcggtctaaccggcaactcaccggtggttagaccggcagcaaggtggcggtcagaccggcggcactagggcagtcagaccggcggcgtaagcaggcagcagcaggcagtctccacggttcgaccgatcgatctacattggtcagaccgacgttcatcaggcggtcagaccagcgcatccacttcggtcagaccgcgatccgtcgaatttgagggtaacttttatttccgctaaaagttttggtttttgggtatatcaaccattcatccccctctggttggcttagtttttgtgattcgatcctacaatttggagtgcatctgcatgggaacatgtgaagttagctttccctgacaacaatctttgcagcagaataattgcaaccacgcggaatgctaatgtcgcaaaatcatgctgctctggttttcaacactatatttacaatattcaacctctagatgagcaagattcctataagctatttctcaaaaggctttctcacacggagtccgattttccttctcacctgggggaattatctcatgcaatcacaaagaagtgtcatggtttgccattagctatcatttgtgttgctagtctgctagctaataaaccagagacaaaagaccaatgggagcatgttcacaattctatcagttcggcatttagttcacagataatgaaggatatactgctgcttagctattatgaccttccatatcatctgaagacttgcttgctgtatcttagtatatttccagaggattactggattagtaaagtagatctgttattgagatggatagctgaaggattcattcctgaagtgaaggatcaggcattgtatcaagttgcagagaattactttaatgagcttataaacagaagcatgattcagccagtcaacatcgactatgatggtagcgcaaatgcatgtcgaatgcatgatgtaatgcttgagctgatcgtatccctgtctgaagatgagaacttcaatacattagtagatgggaaggtgtataaatgttcttctagcaatattcgcagactctccctccaatccagctgtgtggaaaatgatgtgatgcaggatttaatgaacaagtgctcacatattcgctctcttagcttctttcgggaaaataaagaaacacctcatctcccaaagttccgttatctgagagtattgatatttgaggattgtgatagcttaggaaaccaacatattaaatatctcagattcttttgccaattaaagtttttgagaatcaattctgaaggtatcactgagcttccggataaaattggcgacctgaaaaatttacaaacactgaacatacatggaagtaaaattggaaaacttccagcagccataggccatttacaaaatttgttgtatctacatgttaattctgatgttgaattacctgatgaggttggagatctacaagctttgcaggtgctgtcagatgctttctcttataactctattaaattcgtggaagagcttaggcggcttactaagctaaggtcgcttcacattggactacattccagtttaaaactttgttatcatgacatgagaacgtatgaggaagctttgaaatcctctctaactgtgttaggtaaacacagtcttcgatcactagtaatttcacgtgctgattgcctgggtgattacctgatggatctattatgtgacactgtccctgtctccaagtacttgtaatgtatggcccctggaatggcatgctttctgagaggatagcatctcttgataatctgtcttttcttgccatttgtgccagaagcattaaacagaaagatctttgggtgcttgggggcttgccctcactgctgaagcttgagctacatttactctatggccctgatgaaaggctgattatcagcagtcaactattccagtgcttgaagaagttcaaattgaaatatgaattgggtggtggactaagcatggtgtgtgaaaaggaagcaatgccaaagctccaaatgctacaccttcggtttaaagcaatggaaacgaagtccaatacgggtttcgagttgaggctcgagcacctttcaagcctgcggcacctcagtgtcacagttgattgtgatgatgccactagaaggagagttgaggctgccgaagccaccattcggaacacagtgagaatccaccctcgatgccccactctagaaatcaaaaggaagtgggaaagcgatatggtaaaggatgaggatgaggatgagatggagagacgggagtgcactatagaagaggaggaggttcagcatcaggatccataacagtttgtcttgcaagcattcagaagttctgcaaggtattggtttgtcctctatgaacatcgtctttctttgactgaatgtctggtgatgtctactactcttcccgtttcatattataagtcattttaacatttttttagtcaaacttctttaggtttgatcaaatttataaaaaaaattagcaacatctataacatcaaatttgtttcaaaaccatctgtgatggtctacttttacatatactccatctatcccgcatatattattaatcttgcaccagtcagtctactgatggtgactttcacttaaccaccttctcttcatagttttaatcctaggtatcttaaaagtttgtagcaacttgatacttggatggggaaacaagaaaaatcttggttaattatgttgttgtgttaagcattgtatatgaataatagtctctcctgactttgcagaactgtctactactctatccctaaaaaaaggtaaactctagctttgaatctagacacgctggtgtccaggttcgtagctaggattgtactttttttttttgggacagatggggtagactctagagtatttcatgactgatggaattgacagactgactcctaaaaggtaagaatttaaaaaactgttagtctgaaactgagtgttgatctagcatgacttacaacaaaatggaaaaagaaaattccctgcctgatggaacaaaaataatctatgttaaaaaaactaaaaaaaatcaagtgaaccccttctagaaaagtagttaatgacatgtataatgtttattcttggaaaacaaatcttgtttttcttccgaaattggagctttaatagtggtgaaactgctgattgtggttaagtgggatcaggtattcttggcacctaagtacagctggagtatgttgaaattatattatatatcatgatcaaggatgcagactaccctgtagtttgtttagcaaggatataccctgcttttattaattgaaatccataataagagagttttacttggggggagaaggtagggagacccaactatatatcagaatttgaacagaaacgaggtacagaacacatataggcatgaatcattagaagaacagagca

SEQ ID NO: 7776 - DNA, 12079 bp, Oryza sativa
ttcaaaaagtttgacttgaaaaattaagacgacttgtaatatgaaatagaggtagtaatagcaagtctggtgtgtgggcatctcaggcagggaatacatgctgtagctgcaacaaatgacaaactccaccttaattaaatattggtttcctttcacctaaatggccaatctattaaacttttacaatctagttctcaaaaggaattgatggtttttggagcagggcagcatggcatttgccaaaaatgactgcacaatatatagcttgttcattttaaactctatgatttattaaccagatcacattttctcaatgctaaccaggtacttggtcattgttgatgatatttggagcgcaaaagcatgggaagttgtcaaatgtgctctcccagagaacaatttatgcagtagagtaatttcaacgacaagaaatgcagatgttgcaacatcatgctgctcctgtttagcaggatatatccataacatgcagcccttaactgagcaggactctcagaagctattttttaagaggatttttggggacaagtcagcatgccctccttaccttgaacaagtctcccatggaatcattagcaagtgccatggattgccattagctcttatcagtatagctagcctgctagctggaaaatcacgtctgaaggagcaatgggagcaagtgtacaattctattggttttgcatttagtcaacaaggaattagagatatactgctgcttagctactatgatcttccgattcatctgaaaacttgcttgcgatatcttagtgtatttccagaggattacgagattgatagagaagagctaatatggagatggatagctgaaggcttcatcagtgaagtgaaaggtcaaacactggatcaagttgctgagaattacttcaatgatcttgtaaacagaagcatgatccatccagttgacatcaagtacgatggcagggcagatgcttgtaaactgcatgatatggtactcgaccttataatttccctgtcaacacaggacaatttcaccaccatagtagaaggggaacaatataaatgtcctcctaataagattcgtaggctctcaatacattcaaaatgtctggaagatgaagtaatgcaggagattatgacaaattgctcacaagttcgttccatcagcttctacggattgcaagatcaggaaattagtcttctcccaactcttaattctttgagattactagcttttgaaaactattggcaccgacatggtaacaaaaacattaaatatcttggaaggtttttccagctgacatatttgaagatcaaatctatcactgagcttccagagcaaatcggagacctgcgaaatctactgacactagacatacgtagcagtagggttgaaaaattgccatcaacaataggttgtttgaaaaatctggtgcgtctacttgtagattataatgtggaattgcccaatgagattggagatctacaagccttgcagcagctgtcacgtgcttccgtagtatttgttgaacagctgaagcggttgacaaacctaagggcgattgacatagacctgcgtggtagcgaacaacttggtgatcatgatacggcaaggtatatggaagctttgaagtcatctcttgctgtgatgggtaagcttcaaatattgcaaatatcctatggtaatgatacggtgataggagaaaaactcatggatttattatgctactcaccatgcgtccgaaagcttgtcatagataattgcatattcagtcggctatcaaagcagctggggttgcttgttaacctcaggcatcttgaaataggggttcgcaacattaagcaggacgatctctgcgttcttggaagcatacccactctgctcttcgtcaggttatttgtaaaaaatgaacctgatgaaaggcttgccatcggcagccatcaattccgatgcctcaagcagttcatcttcaaaaaccacggaggtgggctggagatgttgtttatgcaggaagcaatgcctgagctccgatggttgtctcttgaattcagagcgcgactaacagactgcaagatgggttttgagttcgacttcaagcaccttgcaagcctggagcacctcgaagtctcaatcaattgccatttcgccacctggagtggggtggaggctgcagaagctgcggtcaggaatgcagccagtgcccacccaggatgtcccacagtagaaatcaatagagtctgggaaagttacatggtagataatgagcaaggaggaggcgtgacatatgatcaataactgaaattgcagtttgcaacaacaccttatgtgagattccacttctactgctgcttataatttgcctgagactgaggctaaactgctagccacatgatcactattgatgcatggtaactaagtaatcagagcttccaactcagaatcatcatcatttggttttgtctaattactactggtatgtcaatactggagtagatcttccagattttgatttgtaaacacattgagctttaagatttcaaatgtgggtagcctgactgtcaatgagcacatcttgcttgagttgcactttactcaacgagtcgacgtacactgaaagtctgcaagacattattaatcacttctacaattactaaacttgtctaaatggatcaagacaagaaaatatgcactaatgatttattgctgcaacaattgtaaccgacaaaaaagaaaagatatatcttagagcttacaatggaacactggagcagttggtaacactttatatgacaatatcgattatcagggcagaatgaatatcttgcctgcaaatggagcgtcatgggtgttatcacagtattcagttgtgatgattgttgctcaatgttctttgtttcttatgtatggtacaagtcaaggtaaactagaccaaggtttaatttagtgctttctacttttaattggtgcgccacctgttgcatgttcctattgttgtcattcaacaaagacaaaaatgataaaaatgataattatctccgtaggttcgtttgggtcctagggggctgtcgaagtcaatcttactgaaagctgttcaacgtgtgacaaagagtgtaaaattatgatctttaaaaattttcctccctccgttcctgtatacatcatatttaaaatttaaccacttctattttaaaaacaaatttggagctatttaaaaatataacatattatccaagtatgttcgtgttaatataactgtacaattttggtttaacgaactacaataatttaaaattaattgttggtaaaagttcaaacctaactggttaatagttaatggtgacaagtaatgagagccttccgctgtgttcagaaaaaggttaacattatttttcagaacttctaaaggaaaaacatgatgttacgtggaaaataggtgacaatgccatgtgtgactatgaggtaaagcaaagggaggtgaatagagaactaataaatgattgaattggatggataagtagtttcttgatccaacggttgctatctttataccaatgtgatctgatggtttaaaattgttgatgatatggattcttgcatatctttctttatatgagtaaatgcgttttagtgggaatcaactatgtagtaagataggattcattagagaaatatttgtttgaaaatacattttctaaaaagaatttcttctgtggtaatacttttaaaacttatttgttaaaatattgaatttattcttaaatagataattcacggtaataatcctttcaataatatgaatcaaacggcccaaaactgaatagtccggattcttttgtgtcgttcaaccagaagaaaggttggtttgcgtttcttttttttagttattatatttggactttcttgctctagtcaatctaaaaagaaaataatctctactatttaaaaaatcgggattggtgatggtgaagccaacgtagaggtgtgatccaacctggaaaggtacatcgacacgaaaaaaaaaacggcggacgctcctccgcaacgcgagaaaaaaaaagaaaaaaccccgcacgcctccacaccattgccaccccccaatccatcacccaccgctgccgccgccgactcctccctcctctctcatcgcgccttcccctactcgtaccactgccgaaaccctagacccgcaccgccctcgaccgccacccctccaccgtcatcgcatcccgcctcctccccgagtccggcgacaactattcccaaggttggtgtactccccatcctcttggtcctaggtctctaaatctgcatattcacatgttagtctcatccgtatggtagtttttttttttttttggtttcattgccgtcattggatgaaatacttcacatcttgttgacatttatagtcaatctttcactgtaaaattgtgggtaagaaatggtgtgcctctgataattctttggtgtcaatttttctatgtgattgcttatatctaccaaactgacttaaccttttatttcaaaagatttaatctgtaggacaaaagttcagggtgtccaagcaaagctgacaggacaccatgcataatcgagatcaaattattatttgcatgtgtgacaaaatacttgctctttaattttctttccacccactatagcatacatcagtgatataattgaaatcaaatttttatgtgcatgtgtgtgatattatgggtaccccatacccatacggcatggttatccgactagtcataggggataacttatatctatggaatatgtaatagatcatgactcgggtattacgtttccttatatattacagaacagggtttgataatattgtaaagtagatttaggaaaccgataccgtattggttaaggtttctatcttgtaatcctgcccccgcaccctatataaggtgggcaggaggccctctagggggcatgacacaacctgatcgtcagatctatactacacccggcggattcaaatccccaaacaggagtagggtattacctctcattgagagggcctgaacctgtctaaatcctttgtctctgcatccatccactttaggtctcgtacgctacccccttttattattgccgaattcatgtttcgacagttggcgcgccaggtaggggttgcgtcgagtttcctatcaacgagcgcgatggaattaacttcatgagtcgccgacttcgttttcgcttcgggagttttcacttcctttccgtcgaccacttcttcaagctcctcttctctgacttgatccaaatcagtcagggggaaactcaatcgagggattacaacaatctaccgcggcaagtttcagattcaatctcctatggctgccgtcagcaccgccttcatcttcggaccggttcttttcttctggagttcggcttgcatcgccgccgccggaatttccgacgggacgtcagtcgtcaacttgatcgtttgacatgctgagtccatcatctgatgatgtcaaatctcctggcgatattcaattactaatctaaattggagtcgacatggaatctgagccaatcaataggagcaattttcacgcagggaagtgcagcactcatgcatgtattgcatgtctgtcacaagctaccgatatgatctcctgtccacccattaacacatatatacggaggacactgagaaaaaagctaagtgcctttatttttcctctttatgtgatattttccattgagcaatttttttatatccactcatgctaactactcgtccagcgccggacgcctagttttatcattatttatcatattgatttttaatctcagattaatctcttgttattttttgttgttgttcgcatataattacgcggcactattgaggcgattaatgctggtcatggagtcgaggcgtctcagctttccggtcgatcggccgcgagtccactttgccggcttgtcttcgccaccgccattgctgataacaacaacgacttcaccgccggcctgcctccgtcgccgccgattggtgcttccgcctacacggctggcctattatgccgccactgttgggcgtctatgacttcaccgccggcccgcctccgtcgccgccgagtggtgcctccgcctacacggctggcctattatgccgccgctgttaggcgtctacgacttcaccgccggcctgcctccgttgccgccgagtggtgcctccgcctacacggctggcctattatgccgccgctgttgggcgtctacgacttcaccgccggcctgcctccgttgccgccgagtggtgcctccgcctacacggctggcctattatgccgctgctgttgggcgtctacgacttcaccgccggcctgcctccgtcgccgccgagtggtgcctccgcctacacggctggcctattatgccgccgctgttgggcgtctacgacttcaccgccggcttgcctccgttgccgccgagtggtgcctccgcctacacggctggcctattatgccgccgcttttgggcgtctacgacttcaccgccggcctgcctccgtcgccgccgattggtgcttccgcttacacggctggcctattatgccgccgctgttgggcgtctacgacctcaccgccggcctgcctccgtcgccgccgagtggtgtcctcgccgatacggttggttggtcataccaccgttcatgggcgtccacgtcttcgccgaccggctggccttcgccgccgccgactggtgtttttgcctatacggttggcggacttcgccgctgttaatgggcttcatcatctacaccactggcttggttccactggcgccgactggtgtttttgtcaccattgatggactgcttcgttcccacatcggctacttttgctgtcaccgagggaatattacaaagctaagtcatcatttattttattctttatatgatattttgtcttttccttcgcctcactacatcaactggttcgccgttgactagtgagtcgggggctatagatgttatatcgtattttttaaacaattttcataatatttatcttgattgcttgcgacataatctgagtacaaaagtacctatcgagttatggagttctatcttcctatgctttccgtttggtttgccaatggatggttgcctttgggccgattcctagcacccgggggctcgttggatggaccgagtaacgcaaggtgctaagtattattcggaataaatcaaaagcatagagatgagataaatttattttctgctcttaataattgcaaaagtacctaagtagtaaattctgatccgtgaaactttgttccattaatgacgaactcatgtcactcatatgcatgtttgggaaatgcctaggccgactcccaatgcttgggggctatgactagtcggacagagtgtttaaacgtacagagtcatctgctcggggaaatcaaaattgacaagaggagaaatacatatttatcaatattttaaaatacttgattttttctcgagtattatatttatatcagatactactcatcctatatgtttgttctgcaggatccagatccagatatgcatcaaagggattcatggctttaagcttatctcttacgctccaggaatggatcagtcagaacatcaccaaccggccgcctcgtctgccgccgactggtgcttccgcctgcacggctgacttattatgccgccgttgttgggcgtctacgtcttcaccgaccggcttgccttcgccgctgccgactggtgtttccgcctgcacggctggcctttaatgccgccgttgttgggcgtctacgtcttcaccgaccggcttgccttcgccgccgccgactggtgtttccgcctgcacggctggcctttaatgccgccgttgttgggcgtctacgtcttcaccgactggcttgccttcgctgccgccgactggtgtttccgcctgcacggctggcctattatgccgccgttgttgggcgtctacgtcttcaccgaccggccgcctcgtcagccgccgactggtgtttccgcctgcacggctggcctattatgccgccgttgttgggcgtctacgtctttatcgaccggcttgccttcgctgccgccgactggtgtttccgcctgcacggctggcctattatgccgccgttgttgggcgtctacgtcttcaccgaccggccgcctcgtccaccgccgactggtgtttccgcctgcatagctggcctgttatgacgccgactgatgctatcttcttcacggttggctacgtcgccgtcaccgctaatatgcgtcatcatcttcaacgcaagctgtctacgtctgccgccgactggcgcttttatcgtcacaattgcgcgtcttcactaccagtttgctttttcacctcatcacggcaatgcaactttgtcatcatggatttctacttggacatcttcaacacttatcttcaatcaagcaatgactactcgatgataagaagctataattctcgactctatgttcagttgtttcccaactaaacaaagagtcgggggctacacaaatacatggctcaaaattcgacaagctttatgtcaaagatggagcaatcaattaatcagccaacgagtcaactccaggagtcattatcttcatctttacttcggagcagacaatctacttcaacaacatcaaatatttcggtttagacgagttggacaacagcatcaactctcctccaagtgaagcatctacaacagttataacattaatttgatggattattgtcactgacatcatcaccagcacctctgcttcatcgaccctgacatctctgctgttgctaatggatgattatgttttcgccgacttattatttcaccttcacggttgacctactatgcaaatgctgatgagcgtctttgtcattatcattggttgctacactgctattggctggatcaccgacatcgtcatcttcatcatgtcggttgcgtttgtcgtcgtcaactacacaactttatcgctgagcgccttcatattcattgctggctgacctgactgccgccgactggtttcttcgcctccatggctatgcgacttcagtacttttgattggtatcactatcttcactaccaccaatatttttgccacctctggtgggcaatattctctctatattggttgtcttgtctctatgccaactgcgtcagctaccatcaatgaacaattgtgactacgtgctcaggggcttactagctcaaatacaagtattatatcttcaatttggacttgctccggatacatgcaacatgaattcatgatcatgggtctattttatatgctcaaagactggactatttattattccccgtaagggttatcaactgaatacttgcgccaatcgggattcaattgttacatctattttggagtatcccataagggataaccactcagatcagaagctattcatatgagctacgcttggtctatattacccggaagatttattactcgggagcatgttatatgcgtcatcctttaaagggtgtcgaaggcatatgttttggcctaggcctaatatgtctgcagcccatattttcaggtgtggcctgtcacgttcttttagggacttaggcactttttgcttaggccaaagtgcgcgtgatcaagtgcccaataccttaaaatccttttataccgcagttacttaactttttaggagttggtacaatgcatcttaaaaggtgtcaaacagtaaagctttatatagctgtcccgctgacttttttatatataagtcaaggtgctgtttgggtttttaagcaattgattggatacaatatcattgcttttcgccacgtaagtgtgcatttttattgaccaatattatggcttaggctgattatatattgtggtcattttctaggcggttggtaaatcctttatgagtttatttactcggattttacaccacatatgccatatatttctaggtgtggtgaaaccatgtgtcttctagggacttaagcacatctgttaaagcagtgtgcgcatggcgtatgcccaatactttggaaatttctttattcacaatatacaagcttctttatagctattttgctatatcactcatcatattttacaaagcagttggtatatcactcggatcatgttatttggaggattcacaccgcatatgctatatattgatatcaagtcacttggttgattacgattatcaaaaccactcggttggttggattatttattccttgactatatgcttggtttgttcaattaaccacattgtcgggggctacacctattaggtgcatctagtcggtgcacctgactttattttccagccctccacagtcttcagatttgataaaagtactcgggagaccatgacaaagatgattgaagcactcggctttggagtaatctggttcgagagaagattatcttttcgactgcgaaggtctcaggggctactgtggatattatgggtaccccatacccatacggcatggttatccgactagtcataggggataacttatatctatggaatatgtaatagatcatgactcgggtattacgtttccttatatattacggaacagcctaaagtcctggtttgataatattgtaaagtagatttaggaaaccgataccgtattggttaaggtttctatcttgtaatcctgccccccaccctatataaggtgggcaggaggccctctagggggcatgacacaacctgatcgtcagatctatactacacccggcggattcaaatccccaaacaggagtagggtattacctctcattgagagggcctgacctgtctaaatcctttgtctctgcatccatccactttaggtctcgtacgctacccccttttattattgccgaattcatgtttcgacaatgtgtgacaaaaagaagttattatctgcacgcgtttctcaattttagatagcaggcctaatcttttatcgagctaggagaagccttgagtgccctggttaggaacaacctggagctatggttgatgaatcatgaataaagagttttcggttctgttgtagctgccagaatggaaaatgcctgaccatagctctgaagatgagtacatcttttgcaagtcttgatctgtgcacctcttcaactgatgaccagcatgaaaaaaatatgattatgattaggctttttgcaagtcttggatttgtgcactttttaattagggatggatggcaatatgccaatatgattgccgtagcttgaggctttgaggttgatgaagggtacagtgcttcttcctgacttttttttttttttcaaaatagctttctcagtgcctttttgtttgcttatgaatttatagcatctgtgtagagttaatgattttatatgtcataaaccagttctttcatgaccgaaataaaaatctaactctgaagctacaattttatcatcgttttttgtgaacctaaagagacaattacctacagatttgtatcaggaaaaacaatctcagtatccttaaaattagctaggtattcagtatgaaatttatatgtgaacaggatcatatgttcagattaatttcgtttaagtatacatactgatattaatttgatgatctactaataagttcgaatgccttagaagaaaataattatgccttttatttattcttctgacacagtccaagtctgtttggagaaggaaacatgctaggaaacaaagtgtggtcatggtccgccgcaagaaaagaggtgcatttcgtactatatatacttcttttctctattggatcatttagtgtgaaaatccaacattttttttggctctaagtgaacagatgtttttttgaagggctcgggtcatgaaaattgaactgtgattatccaatggttattgttattactgttgcaaccggacgccatttgatgttatgcttggacggatgaacacattcagatttattattacttggagacaagatgtcaaatatatgttctggtcatccatgggaactgtttgggagggttgtgtttgcacacgcttttgcttg

SEQ ID NO: 7777 - DNA, 3196 bp, Oryza sativa
cccacgctggcttgtggttggcatggttaatgtttcacaacagtagctcgcgaaccggtctttaattgtcatgagcgcgactctcaaaaccatgtgctcacaacccaccattatcaagttttagttggcaagtaattaattaaccaatcacgattgaccatcgtgaactatcattaagccatcattaaataataatgagtcataagtaatcccaatagtgtgctaatgtttctaagcatggctaagcaatcatatctaatatctagctgaaccaatatatatagctcaactagtcaagttataataacccaaggtatcaaggaataaagtaatcaatgcaaacaggccataacaaaggaatagattcacaccacccagtgacattcgaaaataaatgcacagttgaaataaatagaaaatttaaatataggatcaacatgctcaaaggattgtgtttaggatctgtgtgacttgccttgcaataatcggtcttcaattaatcttcttgaatacttccggcgcactcacgaaccttcgcaacgacggaaacgacaagctaacacgcaaaatgaagaaaaagactaataaaaaccaaataaacaatacataaaaagtaaacaaacatgtagatcataattttagatgaattatgagacttgaacggcctcattgtgacttcatatgaatttattatgaattttacaagattaaatcggattaaaacacttatatggattttaattgaattatgacgcaataatgaattatttttgaaaaggaaaagggaattattgcgtcatcaaaggcggtccgggagcacgggacggtctaaggaaacgaacggccgagatcgattctatccaaaacgggcggccgagatcaacttgatctaccgcggttcacgggacaaggcgacgatgacgtcagcggtgacgtcatcaccggcgacggttcggcctcgcgcgctcgccggcgaatgacggcgcaacgacgcaaacagaggacaccaacgggtagaggacaacacagcgaactcaccggtgaccaaaaccacggcggaagagcaacggacggcgccggtgacgaggaagaagaggcgacggtcttcgggtcgacggtgacggcggtgctccggcggtcttctgcggcggcgaagaggtggacggggacggcgacgacctcgcgatcccgatggtggcgacggcgaccgacgacggtggctgcaacggcggcgcggcgcggctgaaccgacggcaacgacagcgacggctagggctacgcggaggcggcgctagacgggacggcgggctaaggcaaaggtggcggcggataaaggagagctcgggggtgcttataaaggggctagcgagcggcgacggaggcccacagcgaccggcggcgagaaggaaagctagggttggagggagaaaagtcgatccgaatcgagctcaaatccgtcgatttccaaacgaaattgaccgaagtttctataagagaaaaggaagaggagatcgaggagattatttcccctcaaacgatttcaccggaaacagaaaggatcgaccggattggaaagcggcggcggctagggtttcggccggcagcggcgcgaggaggaagacgggcccgacaggtggggcccacctgtcagcgggagagagagaggagagcggcggctcggttgcggactgggccgacttgggccggggagagagagagaaagagagaggttttgggccggctttcggcccaaagccaaaaggaggatttaaaaacattttctatttaaattattcatgaaatgatattccattgattaaaaatacttccttggctcaaataaatcccagaaaaatctaggaactatagaatcaagtaaagtatttaataaaattttatctaacccaattttatattgagatttagcaaattaaaattagatcttctcttttaagatcatttctaattattccttttaaacaacaatttataatttaaggatttttaaacaagaaaagctcttaacaattataattagatcattattgatcaaataattactgaactgttctttgtatcatttatgaattgagctctgaaaaatccgagaaaatttcagagagttgactttatcatggagaatttaataaaaattaaatccatccatgctttatatttaggaaattttatttcccacatttaacttcacttgtaaattgatgaacatttaatataaattctaataataatttattaaataatttataaatcctgaaacaaaaaatcaggatatgacaactacccactgtactcagcaagtcataccggaagaggaggtatgatgcaggatataaccaaaggaagctaggggttcttttgcataaagcagtcatttcaaagcagtagttgaaagcagtaaaacagctgtagtaattaatcaatattaaccaatcactgtccaacgctacaccacgttgcaacaggcccaaccaaccacctgaactacaccagttcattaagctaaactaggggtgagactaatcacagtgaatctggttgatcgcccataaccgcgggcacggctattcgaatagttttactctggccagaggtgtacaactgtacccacaagacacgattccacacatgtcgccatgccccaaagtatcaccatgatactgcaaagggggaaatcgtgacaagaccctccacataaccctcccctaaccatccacaccacgctaaggtttcacccccacccctcaaaaggcagtgggcggtcccctcttgcgccgcggtgaatccggcagctggacaactgaacacctcggccgacccaactccattacgcccacccttgccaccggtgcctaggaaagggtcgagctatacttcagatcaagcagttacccactcccgcttgtggtaagcacggtaagtctcccagggtttcccgtgaaccggtccttaactgctatgggtgcgaccagcaaaaccatgcactcacagcccgccattcagaatattttaattaactgacacccttcgggtggcaccaatctaaagctatgccagtagtcagagtctatgaaataatgtgatcccccatttgtgtactagttgaactaagcagggctaagcatttcctaagccaacatctagtcattttgatacccaagttatcaatggcataagg

SEQ ID NO: 7778 - DNA, 8387 bp, Oryza sativa
tgggcgtgcccttgtccccagatttgttgctgtcatcgccctcatcgtcattaagcaccagctttctcttgcgaggacctgtctgcccagccggtttggaggtttgaggttgtgggtctgacctgattgtcggccctccacttccctgaacggtgtgctggcgaggagatcggcgctgagcaattgggggatcagatttcatcaatacgtattcctgaacgagatgcttccacagttagctaactcaacatgaagatgaaattatgttttgaccttgggttgaagatttcagatacatacctgcggaggcggattgaatgcgttgtatggtacaactggcagttgatgtgaatagctgacgacaatagcgttcgagaatatcctgtacatcctctccttcaggatcttaaaatccagagaatctgggtcttcacagtttggatcatgcttgccgtcaaactcaaatgctgtgcgagatctttctttgattggagctaatcggcacttaatgaaatgccgagtgatttgctctccttgcaagccttgttctttgagttttaacatgcgttccatcaactccaaggcttggactgcttcatctccgattggaagagagttccaggtatcttggtacaccggaggaagacaagagtacccgggaagagcaggttcaggattctgaacatagaaccagtttgcatgccaccctttgtttgaagtcttgaagggcatagagaaatacttttggctcagagttcccctcagctggaatcctgcccccccgactacgcacggtttgctcttgtgcggttggggtttgaggaagaagatccggcgaaacagggcaaagtgaggcttgattcccaaaaaggcttcacaaacatggacgaaattggcgatatgcactatggaatttgggtttaggtgatgcaagctgattccatagaagttcaagatcccgcggaaaaatttgaggtcggaagagcgaagccgccgtagaagaaatgcgagaagaccacaatctcatgtgtatcgggggtcggaaaagcctcaccgcacgctggccgccacccgatgatctccttggcagggagaacgccgtgcgccaccatctccttcaggttctcctccgttacgtcggacggcgcccattggccttcgaagttttctttctcttccgccatcgattttccccgaatgcgctgatttgattcgagggatggcttgggagaggtgaggaattgaggcggtggatcacgggaaggattttgatcactttttgaaggtggatttgagtggaatggtgaaccctagtttgccggcgcagctctgtactgtagcaaggagtggggaaaatggcgagagttccggcggggaagacgaagcgtcgtttggatctcgggttttcttgttaagggtatcggaggtgagaatgggcctaggcctgaacagtacctcagcccaatacttttaacagcgtggcccattgtgttccttagggacttaggcattctttgctttggcaatttatgtacacaatagtgttgcccaatgctgataaaatcctttttacgcggtcatataattctttggaattattgcgatgcaaattaaaaggtgcccgacagaaaggcgttatgctgtttttgtaccttttttaggctacaaaagctgtctgggttaacttggaatgacttgtttttatcatagtcatttcctcggtatgttatatgcctgttttcattatggtaaatagtcatagcctaggctattagacttattcattaccatgatttttatgatatttggtgggtaatctttagagtcttatattcggatgcctgtcaagtgtgttcattcgtgaactttttagagtgttaaccactcggattccttttattgtgactaaaaagcagtcggctagaatgcctctttgggtgccgcgtatgcttttgtcatatgatgcatgattgtgctattattttgttctcaactatatgtttagtttgttgactaatcacatagttgggggctatacctaattaggtgcatctattcgatgcaccatattctttatcttttcgccctttacagtcttcgtcttcactactcggcaggccttggcatgaaaagtttgaagcactcggattattgtctttgagcaggctatgatggttgactgcaaaggtctcgggggctactgtggagattatggatatcccatatctacacggcgatgatatttgggctgaatataggataccgaatatagatagaatattttatgtgtatctcgggtttgtttctcaacttgtgcatcaaggaaataccctgagacttagtcggtcacgactgtatttgatctgtatctgtgtattccgttaaggatatagattatcttttgtaacctggactccttcccatatataaggggggtccgggcgcctctaggggcatatgttgattttcccaaatcatacaatcaataatacactcggcggattcatccccggacaggagtagggtgttacttcttttataagaaggcctgaacctgtataaatcctttgtctccaaacccatacacttttccagcttgatagccacccccttttattattgccgaaatctagtttcgacagttaccgagttggcgctcggtcacttgggggagggggaaaaatcaggcgctccccccctcccgacgcgcacgtacccctgctagcgtgtacatctcagagctcgcctagccgctcagtttcttgaagagcctgacgaccttgtgcttgctagtggccccatcgaaggcaagcccagcgctggaccactcgaatgggaaccacaacatcatgatgttgtggaactgcgcgccgctgaggatcggtagcggtgattccacctccgccgctagcccaatgagagagatgactccgtgtaataatgccgcaacgatgcactgacatgtggggcctgtcgtatgccacgtcagcgaacctagggttaaatttggtctatactgctttaggaccttttttacacggtttgtaatagttgaggggtagggatttctggtattgggaattgggaacctcagacagactaagtgtaaagttcagggatgtcaagtgaacttacatgaaaagggatgacgaattgcattgccacgaagcggacgacacggtgcgtgcgattcatcatcctcgctgctccagtgctttgggagtcgcgctccatcctacaacatcggagtgctaatccgtgcgtgttacccgtgcatgcggtgaaagacgcgatacgaacgattcttcaatttttataatatactccctaataatatttacaacacaccaaattagtttcattaaatctataattgaatgtatttttataatatatttatattgggttaaaaattttattacatttttctacaaacttatcaaacttggagcagtttgacattgaccaaagtcaaaagtatataaacatgtaaagataaagattacccgtatatcgacatcgtatcgaaataagatggcataccaaattttggctagaaatatcttcaatttttctactagcagagattggattgccacgttggcgctaagtgtataccatgccatgtaggacccaaacgttccggattgagtccgggggtaattgtctagtatcaataatttgaggtttaaaatgtccggctttatggtttagggggtaattcatactttttccttaaacaaactatgataatatatgcaacctgtttatttaaaaagaacttactttttttaagtagtactagtcaaaatggcatctgaccgtatcaaacataaaaatgcatttttagacgtattaaaataccaattcacgaaaaacaaatacactactctctccggttgataatacttgtcgttttggacaaggacacggtcttcaaaaaataactttgaccattattttctattataatatgtataaaagtgttgacaaatatatgattttattaaagtactttttaagactactctatacatgtagtcatcatatttgaaagccatatattttaaaaatgattcataatcaaagattctaaaacgacaagtattatcagtccggagggagtactattatctccgtttcatattataagccgttttgatttttttagttaaacttatttagctttgactaagtttataaaaaaatatagtaatatttttaaacacaaaataaatatattatcattaaatattgattttagtgaaactaatttgatgttgtagatattgctaaatttttctataaatttaattaaatttaaagaaaagtttaactataaaaaagtgaaagtgacataatatgaaatatgagagagagagagagagtaggtacttttcgtgtatttttatttccacacgggatgttccgtgtgcgagttaattcaactcttcggaagaccaccctccctcccctcacaaatagacacacacatccacgactcccccgtgcgcacgggcccacctgtcaggagacaacacgtgggcccaccccacgccattgaacccttctattggatgcccggaaaatacgtgcgccccaccaactgactcacatctttccccctccccctcgccccccgcaacgcacgttcctttccgaccgatccaccgatcggaaaccacgccctaaccccagcaaaccccaacgcccccctccgccctgccaccctccgccgccgccgccttcgccggcgaccaccccgccgccctccccggggggacccatctcctccgccgtcccctcgccgcctgcaccccggcggtgcctcggcgtcctgctctgccgcctcctcgccggtgagcgccatcctcctccttcctcatccctctcgcgcgttgcgttaagcctcgtcttctctgggtagatctggaagcttttctcttagtttggcttagccttctctggtaataatggcgatttgtttgttttttcccccaaaaataaggggttccatgcccccacacccgcgttaggtgcgccgctcgattaaatgctgtaatttctgcatcctttcttggttggaatgggtgccctaggaagggtaaattttggtcatgccaaatttgatgattctacaccgagagatgcggaatgcgcatgtggattgcacctgtatggctgtatgcgattgaaatgagaggaattgtgcagctctcaaaatgctataggctagaaaaatcataccataccatgcatacatttgttttaagactacgtgattagcgtggaattgagggtggcggatgtacttgcttactctgggtgaaattggtgttgctcaatcgaaattccacatgttggcattatgatatgcatgctacattgttatttacaatgtaagatggagacatggtcgttattgatacatcgggtttgttttgagatcctgggcaccataaaagcttttgctagccaatccatttagcaccagatgacccatgctctttacttacaaaattactatcactgtgggagtcaccgggtaagcatgacctatggccatgggtttggggaagggaaaaaaattgttttgaaatatatttgatgatgggccttacctgtattttgtcaatctcaaactagaaactaacatcttattagcctgtagcattatcttaaagtaatcccctgtagaattctataaaatataacctagtgtgacgctagacatagggcctgttcactttgatgccactttcaaccttaccaaattttggtaaagttgccaaaaaagtggctacatttagtttgctgtcaaattttggtaactatataagaaatcctaccaaaattttggcatagttgccaaaattttggcaatgcccaaatttggtaaggttttttttggcatcaaagtgaacaggcccataatcaatatacgttttcttagaatgctcgtaaactatatgggagaaacagactggtttcaaggcctattagcacatgttatgcagtttctttcgtaaaactggccatatttataattcatttactgaacatattactacaatcattttctgtaataattgttttgtaactccattaaatcttctgtggcagtgtgcataatacatattcggaaaggcaaatatggctacaaaactccgtcaaccgtcaactgatgcagaaaaaacagaggttggagaaatagacacaagggctccttttgaatccgtcaaagctgcagtaagcttatttggggaagttcgattttcatctgacaaatcagctgcaaggaagccaaagcctcctcaggcagaggtaggtacttatattaaacatttttttcatattagattaataatagtacttcaatgtgtgcatgcatatatctttatgaaggttgaacataccgatttgtgtggaatgttatgcgtgcctactattacatggaatacttataagtacagcaatgttgcagaccttgatgttcttaagccttgttgattccagaactgctaacttcaaatcttacgcaacaaaatgctgtgaccttcaagtgtgttatactgatgccaatatgccataatgttgataaccattttcaaatgtctaagtagtttcatgtagcacttatttgaagctaagtaacacagatcttggaacgatgctgtgttcctcgtccagtgaactttgtcccgaaacaaggaacgggaacaacacaagatgacgtaccgaacgtggatggatcacatcctaacataaggaggtatgaggaaggcaaatctgagaggggttgggtttagggatggggaatgcaccagggtcacagccgcaacgggcgagcactgttattgctccctcgctgcttgctgccatcgcacctgagtgcatggaggaacgccaccgctgttgcgctgaggaggacgggggagtgctgctgctgttgtgccgaagggggttgggggagcgttgtcgccactgacctgagggaggacaggaagcaccgctgtagtcgtgctgcggggcttggggaagtgcggttgccgctgtcgcgccgaggggcatgggggagtgccatctccatcgtcgctatcacgctgagtggctgagaacgatgggatggattctttccatcgatgggataagactgtgagtggataagggattcatcttatttcatttttgctcttggactctgaatattatgaacagttctttattgaattgatttctttcatataagccataaaatttcatatatattcatttaagcttattgtatgcataacaatggaatgctcatatttataagcccttggcttctaatttctgatattgttccggactatcatcccggaaactaatggaacgcattccatactttgaacaaacgttttgaagaggtatttcccccttcataccatatttttcaaaatccctgttccgggatctttttatgacttaggtttgaagccacgcctttgttttttttaatgaaatttgtcatatcagcaaactatttcctgcatgttccagtgaataccacaagatacttgttttttatatgctctaactcttttcatttgcatttactttcctgttcattcctatttcttttttgcaagaaataggtgtgttcccactgttagaaatttcaggctgttccccagcctatttgctgtctttaattaaacagattattattaaattaatgcacattctccatttatgagtcttttcacagcagaaatttgatttgcatttctgaaagaatagtagttttgccttctacttttactttgattatttgtcttggtagttgttgtacctggtccacatctgatgaactacactttagaagagagcataattgagtgacttgttggcagaaacagagaaagaattagcgatgattcaccatatgatactactagaagtctaagtttttgtttgtattttttttttggggggggggggggtgtggggactgacatgcattcataccattaaaaaagttcagtcctgtaagctcaagttttgctggatttaattttcaccttcgttttcgactccaaatagtgccactcctggagattggttgtcccatgcttccttccatgtgcctatttgaatattgcatcatagttgccatggccataatcacataaacgcaatgcagaaacattagttccagcttaagacaggagtatcaaatttgttatatggtataagctttgaacgtaaacccagatacaaatctttcactcactgaaaagttaaaacatcaggtactgggttttttctggattggaattgtatcaagataggactaatttgatcaaagtatcaccccagtctcactcctacaagtagtgatgtcc

SEQ ID NO: 7779 - DNA, 1432 bp, Oryza sativa
acgtgaacggagtgtgttaagaaggtcattcttttcattttggattagaacaaagtcaaaacgcatgtggcaattagtatatacctaccaaggtaatcttacaccatataaaccatgcccaacctatagcggttataatccactattcaaaatgtaaggatcgatggacaatttgtcatatcattgttaattcaatctaaccttgtcacgaaaacaatacgctctgcgtaacatgaagttaaaattttcatatttgaaggccgggtcagggaaatatcaattattaagttaaaaacattaagcattcctgcctcaatgaaattcatatatgcttaatagtccacgttaaatcccagcatatcggtttcatttgttttcacctaaagtcacaaaatatagttgttggccctaaacttgccgttaatatgcagtatctacccaagctacaacactgctccctgtagcattcccacggtcggtggtatctggtactgaattgtagcagtatagtagtacaggagagaaaaataaagtcatacatcatcgtgtgtgacaagttgaaacatcggggcgatacaaatctgaatgaaaatgtcatgcaagtttaaacataatgcctctgtaaggataaatcctagtacattgttgaaattaattatcatcaccgtctactatggttgcatttacaactttacgatgtgtgcctacattcagttctaagctactatggctactcgacgtgaacggagtgtgttaagcaggtcaatcttttcatttcgatcagaacaaagtcaaaacgcatttggcaaatagtatataccctataacgtaatcctacaccatataaaacacgcccaacctatagcggttataaatccactattcaaaatgtaagtatcgatgggaccatttgccatatcattgttaattcaatcttaccttgtcaccggagcaagacgctccgcgtaacatgaagttaaaattttcatatttgaaggcctggtcgcggaaatatcaatttagaagttaaaaacattaagcattgctgcctcaataaaattcatatatgcgtaatagtccacgttaattcccatgcatatcggtttcatttgttttcacccaaagtcacaaaatatagctgctgctctatcctgagagtgagtaggtaggcattttgttctttactgttatcgttgatcaccgccgtgatacaatcggtcaatggtttgatgctagcaaggggctattttcatttatgttctgcctcctaaatgttctttcattcttacacctagtaccgtgagaaaaatctagctagttctataggcaaatcgttgtcaatacgtgctagctgaactgttatgagaaccaaggtttcttaagtcacgatttggttccctttcgtgattttttctttctaacgtgtttttta

SEQ ID NO: 7780 - DNA, 12823 bp, Oryza sativa
atctcaggagctccagttttcatgtggaagttgtcatcaatatcgtgaatttcttcaataaaaaaagtgacttcacaaacaatttcataggaaaaccatttgtggaaatagacctatttcataagcacattatctctttgaatttgtatttcgcaggcagcctcagccatcttcataaaagcgtctagaaatttaatcgtatgctcccataaaaaaatcattttcaaggatgaacttggacaagcatatgttcaaaagtttatccctagaagcatatataaaaactatatattttgtatgtataaatggtgtctatatctatatttatatatacactaaaataaaaaacgggaggttcactttttattagagtaaattgcataggcgctaaatttgtacacctatgttgtctacataccaaaactctcgaaatgcatatttatattcagaaatttatcccggacgtcatcatagatctcctctgaacttatcccagacttgtatgtcccaatgagggtcgggcccatatgtcagctgtggagattatggataccccatatctatatgacagttataatttagtcggatatacggtaccaaatatagatagaatatctttacgaggactcgggttagtttctaacttgtatgtcaaagaaatacccgagatcttagtcggttacgattgtattttacctgtaatcgcatattccgttagggatatggactgtattttgtaatatggatcccttcccctatataaggaggggtccgggttcctctcgggacgatttttttccctagatcatacaatcaataatctactcggcggaatcatccccggacaggagtagggtattacttcttgaataagaaggcctgaacctgtataaaattccttgtctccaaacctatccacttttctagcttgatagctaccccttttagtattgccgaaatcttgtttcgacagttggcgcaccaggtgtcacgcccggaatttctatccaaaattccaaacgcttacatgtgtgtgaaccctcgtccaggaatcagccgaggcacacaataacaaattgataatagagtacaattattactcaaactattaagcatataaaatatcattacagaggtagatagttcctctcaatcaataaagatctaagcagcggaaaaaaataagataaacggcgcagacggctccactccacaggcagcttgaccaaggctacacctaatcctccacaccatcagcttcactgtagaactcttcctctgatgaatgattgcaaggtgagtatatgacatactcagcaagccacgcagcaaatatgcaagtgcacaggataacaaaggatggcatagtggggtttcatttgcaaaagcagcatttagcaaacatttgagaatttaataaaacagttaagtaattaaacaatattaatccaacgctatacaacataccctgttgcataggcccaaccattctgaacaaccatcccggctgcacagttctatctccaaaccaggaatataccattccaaaccaggagctaatcaaattattaccaattatagcatcatttaccatggtgagaagggtgagactaatcacgaaagacattgttagacccgcccataaccgcgggcacggctattcgaatagttttactctgatcagaggtgtaccactgtacccacaagacacaaccccacatcatgtcaccatgtgcctcaataccaccacggtacctcggaaaggagttgtgacaataccccttatacaacacaatccactgcagcgcaccttcctggatcataatcacccccttataaacaaggcatggactccccagcgacccccgtgggcttatctccgccacttctcagtctggtgccccgcaatgaaccatgctatacaaaagataaagccgttgcccatgctggcttgtggctggcacggttaatgtttcacaaccgaaactcgtgaaccggtcttaattgtcatgagcacgaccatcaaaaccatgtgctcacaacccaccattatcaggttttagttggcacattaattaattaactaatcacgattgaccatcgtgaactatcattaagccatcattaaataatagtgagtcataagttatcccaaaagtgagctaatgtttctaagcagggctaagcaattatatctaatatctagttgaaccaatatataaagctcaactagtcaagttataattacccaaggtatcaagaaataaagtaaacaagaacaaaaggggctataacaaagaataggttaattccacccaatgacattcgaaaataaatgcaatagttgaaaagaaacaatagctttaaataggatcaacatgctcaaagggttgtttgggatctgtgtgacttgccttgctggccttggaactcttcaaactcttctccggcgaaaacggactctccggaaacgacggaatctaagcagaaaagagcaaaatcaccaaaacagcacataaacaagcatgaacagtacatgtggatatttttaatatgtagatctcaattttagaaaaatttagagacttgaaccaactaaatcggagctaagatgaattagttatgaatttttaaagattaaatcggattaaaacacttatatcgatttaaattgaattatgacgcaataatgaattatttttgaaaaggaaaagaaggtttattgcgtcagcgggctagggtttcggtggaccgggcgcacgggcggcggttcacgcgaacggacggccgagatcgaaccaatccaagatggacggccgagatcgatcgggtccacggcggctcacggcggacgaccccgatgacgtcagcggtgacgtcaccgacagccgcggcggctcggcggagcggacggctcgggcggcgcacgctcgccggcgaacggcggcactccggcacaaacggaggacaccagcacgtagaggacgacgcggcgaacacaccggtgaccaaaacggcggcggaagaacaacggacgacgacggcgacgaggaggaaacggcggaaaccttcgggttgacgacggcgacgaagctccggcgatctccggcgacggcgaaggggcggacgaggacggcgacgcgacggcgaacacgacggcggccttcccgagcgacggcgacggctgaagcgacggcggcgcacggctggagcgacggcgacgacggcggcgctagggcacacggtgctagagcttttccggcgacgagaggcgaaggcgaaggtggcggcgggtagaggagaccacggggagccttttaaagggactcggaggtggcggcgaaggcccacggcgacggcaacggcgaaggaaagctcggcttggagagagagagagcccgatctgattcgaactcgaatcccttgatttccaaaccgatttagccgatgattccaaaggagaaaaggtagaggagatcccgaggatcatttcccctctattgattcggccggagaaggaaagggacggccgaatttggaaaggaacggcggcggcggctcggcggcggcgcgctagggtttcggcccgaggaagacgacgggcctgacaggtgggacccacctgtcagcgaccgaacgcacgcgcgcggcgcgggcggctgcggactaggccggactgggccgaggagagagagaaggcggattttgggccgactttcggcccaaagccaaaagaggactttttaaaacctttttcaatttaaattatttcttaaatgcaattccatttattaaaaatacttccttagctcaaataaatcccagaaaaatctaggaattatagaattaagcaaagtatttaatgaaattttatctggccccattttatattggaatttattaattaaaattagatcttctcttcaagacttttaaaattattttctagaaattccatttaaacaacaatttatataatttgaatttttagggtgtgacaccaggtaggggcagcgtcaagtttttgccgacaaagtgcgatgggttccgtctccggcgtcgacgacctcgccttccctcctgggcaggcgttccggttcagcagcctcaacttcatcacgaacgaattcggcaagatctctctccttgactcggattcgaaccagtcggggagagatcaagtccccacgccgttcggtattctgaactcggccgagaactacttcaagatcatctctcccaagtcggctttaaaccactcggacgagatccaatctactcctcagcgaccagatcaagatgacgggtcctatccctcaatcctgatgagacttcctaatgatttggccgctgtcttcacagccaagacatctcccactcaaagatctaggcgagctccggcttcggccccgatccaatctagatccagagaggttggcgttatactccaacctcttgggacagtcttgacggaagagttggacggctaccttagctcccctggcgtaagttctcgaccaaccgaaatcctcgactacgacgacttcggctaccaccacgaccacgacgacttcgacgatagctataaggatagctacacgcctctctttttcggcgtattcatggctgacaacgaaacggaggaacagcaccgagctcgagaagtggaggaagagcgcgcacgacaagaaactgaacgtcgccgacaggaggaagaacgacaacgacaagagcgagaacgactacagcgtgagcaacaagatcgcgagcgagttgcaaaggaggctgaagatcgacggtagcgcgccttggaatccgggcgacgagcgagagagctcatcgggcaacaagacgtcgatggaacaacggtttttcgcaccccccagcagaacgcggttgcagcaatcactctcctcgacaccctccccaaggaagacgcactcaatcaagttgatcatgttgtcaacatcttgaaccagacgaagaccatgatcgctgcttcggttctagccaactccgcaagcactcgcacgccgactggtagccgggttccccatctccgatctcatgattatcatcagccaagcctcagcatcatcggtacaggatccgtcgcaggagcagggaccacgacgaatgatattttcactcgcctcccgaacgtcacggggaacgccgagtcgaacggcttcgctctccacctcgccaacgccccgtcgatctttgcgacacgatcaactagcgccatgcagcacgaggtcaccgtcattcaccagatcgctacgacgacgacgtggatggagtagctgccttcactaatgacctgcgtcgagtggattggccagccggcttcaagccgactggaatcgagaagtatgacggcaccactaatccggagtcttggctcactgtctacggactcacaatccgcgcagcaggaggagacagcaaggccatggcaaactatctacctgtggccctagcggattccgcccgatcctggctccatggactaccccgtggcacgatcggatcatgggcggaacttcgtgatcacttcatcgccaacttccaaggcacctttgaacgccccggcacacagtttgatctctacaacgtcattcagaagtctggagaatcccttcgagattacatccgacgcttctccgagcaacgcaacaagatctccgacatcaccgacgacgtcatcatcgccgcctttactaaaagcattcgccacgaggacctagtcggcaagttcggacgcaaacctcccaagacggttaagcagatgtttgaaaaagccaacgagtatgccaaagccgaagatgctattaccgcgtccaaacagtcgggcaccacttggaaaccgaagaaagacacgccggctgcaggagggagtggaagtaacaaccacaaggatcgcaagcgtaagcccggagaacttgtggcaacagcctctccatcttcccgacaacgttcccgcgtcaacaccttcgacaagataataaactcccaatgtccgcatcatcccaactccaaccatgcggccaaagattgcttcgtctacaagcaatttgcggaacaatatgccaagaacgcgcgtaagccttcagacagagatcaaggcacatcaaagaagaaagatgacgaagacgatgccccgactggttttcaggactctcgcaaagaactcaatcacatcttcggcggacccctggcttatgaatctaagagaaagcagaagctaacagaacgggagatcaatgcggtttagcctaacacaccccaataccttcggtggtcagagatagcaatcaagttcgactgctcggatcatcccgaccgagtggtccacccggggcggtaccccctggtactagacccagtggttcgcaatgtcaagctccgaagaactctcatcgatggtggtagcgcactcaacatccttttcgctaagaccctggacgatatgcagattcctcacatggaattaaagccgagtaatgcacccttccacggtgttatcccaggattgtcagctacaccactcggccagatcactcttccggttacctttggcacttgggagaattttcgcaccgaaaatgtttgtttcgaagtcgcttatttcgagacagcgtaccatgctatactcggatgaccggctctagccaaattcatggccgtcccacactacacctacatgatgattgtcacgaccggaaataacccaacgggcgttccttacgtgcgtgcattattccttgtcccaggaggcaaggtacaccaaaagttgatacaattcagagtttaacaagcggaagcgtaattaattaatttattacatgggcggcgaagacccagcacacaagaagacaaacgaaaaatagcggaagactagggcgacgaccacaggcgcttgacgacaggcacgagctagacaccaaagccttcatcttccaggggctcctcttctgggtttgggcaaaattgagcaagactgagtacaaccaccgtactcaacaagacacacccacaagtgcagaataaatgcaagggagtacaagggggttaaaatataaagggttagggtttgcagtaaacagcattaaaagacagttagttgctcaaagctattttgtaaacacgatcctagagctatacaatattattaatcaaggccgtgaacccacacgaacctgccttaacccaaggcctacgatgattcagaccgaactggcaacccgaccctaggtcccagctcgtcccaagccaacccaggccaaccattctacattttggttgttaagcaggttttaagaattaaaaatactaacttgggtacattgctcggcttgcccataaccgagggcgcggctattcgaatagattatactctgatcagaggtgtacatctttacccacaagacacatcttcctcatatgtaaccacatgccacataccaccacggtatacggacggaagacgtgacatagtttccaacccatcctagccatagataagagtaccgacccaaccccacctacggccggaacctccgggacaggtaggcaggactgagcccctagcagcaggacaccggccctgtgccatgacatctcgactactgagccgcagctcgtgtagccttcatttgttctagagatgtccatcgacccccgacttcgtccatctccatccgtgtacttttgtttataaccagactgagccacaaactaagccttacccactagacatgtggaagtacggtagtgctttgcaacagaggcctgaagaccggtccttatatggccgaggtgctactatcaaaaccatgcaccccgagcccagcctaaaaccattttgagggttttgaatagagggggaggtgtgaatccaattccacaataatccatccattccatagtgtccaggtgatgagaatattcccaaagtctagagttgtaaaaccacctaatgttgcctaattaactagcgaagcatctacctaaaatcatactagtggtaccatgagtagataacaataataatatcaataacaataataataaggtcataacaaaggtaaataggtatggctaaataaaacagtgataacgcgggaatttaagtaaagcgataatgcaatattttaaatcaaaataattttataaactgggattcaatatgctcaaggatgatgtgacttgccttgctcgctttcccaaacgtcggcttcaacctccacgaagagcggatcttccgaagctgcagcgtctacacgaccaacggaaaagaaatggcttttactctaataaactccatataaccagcaggaacaaagcacaaaaatgggttattgacttcataaggaaaaattagagacttgaacggtccaattccgagttcaaatggccaagttatggccatttgaagtttatatgctctttaaatgaatatttgcgaatttcttcatttaaattttaatttaaaaagggtttattgcgtcagcccagggggaggggcgcgcggactgggtccacgggagtggggcccacgcggcagcctcacggtccacggtggaccgggcgcacccggctcgcaccggccggcgccgtgggccccacacgtcagccgcacacgagggcgcgggcggctgacggctgggccccacgcggcagccactcggcgcgcacgagggcggccacgccggcgcggtcggcgggaggtggcacgcccgcgccccgatggtcgccgccggcgaccaccggcgcggcggagcggcggccgagagaggggagggaagggggaaaggaggcgacggtccacggctcaccccggggcgacggcggcgacggagggggcagtcggagtggagggaggcggcggcgcggctcgggtcgacggggtcgacggcgttccggcggtcggcgaccgaaacggagagctggacgaggtcggcgaggatgcggcgaagccgaaggaggcggcgccgaggtgggaggcggtccggggcgacgacggcggcggaccggagctcggcggcgacggcggagagacaaagcgatgtcgcgggctcgaatccggcgaggaggaagggcggcgagaggcggaaacggacggaggaggtgcggggagggtttaaattgggttggaagggggagagagcggccggaggggaaggaacccggtgcgggaggtccggccgccatcaatggcgctggcgagatttgaacgcgagagagagagggaaaaatatggggaaagggagaggggatcacggggagtaattccccccactttattgcacgtggggacggcgggaggcggcgggattcgcggctgcggcggcactagggcgcgggggaggcggcgggagcggcgggaggaaggggatgacgggtgggccccacccgtcagcgagggtggcgggcgggcccgcccgtcagcggcgcgctcgcggggagagggcggatgggccgcggggagaggagagagagagagagagcgggggggagagatgggccgggccggcccaagggagggaagggggactttttagggtttttctttttataaaacctttttaactttgtttatttcttaacaattattatttgtgctctgaaaattccactaaaatttagttacgtattttaggcttctaggaaatatacaaaaatcctctaagcattatttgacttttaactttgcacattttatttgttggagactttcacatggattttaattattctaggcataatttagaggatatattttagggtcgttttaggacgtgacaatgatgaagatgcctgctcctcgaggagtcatatcactatggagcgacatcaagcaagccgtcacatgtgacaaagaaagttgcgagatggcccaaacccgcgagatcacccttgctcgtgaagagatccgactgactacgactatggcaagtgaaggagaagtgcctgcgaccaagctgtcaaagaccaaagaaggcaacgacaaaactaagaagattccactagatccctccgatcctaccaaaactgttgtaataggagctgagttagattgtaaataggaaagcgcgctcattacctttcttcagaataataaagatatttttgcgtggaaatcatccgatatgcctggtattcctagagaggtgattgagcactccttatatgtcaaggaagatgccaaacctatcaaacaacgactccgccattttgcacaagataggaaagatgcgatcaaagaggaattaaccaagctgttagcagcaggcttcatcaaagaggtcctccatcccgactggctggctaatccagtcctagttcggaagaagatcgggcagtggcgcatgtgtgtcgattacaccaacctcaacaagtcttgccctaaagatcctttcgggttacctcgcattgaccaggtggttgactcaacggccggctgtgagttactcagtttcttggactgctactcggggtatcatcagatctgactgaaagaatccgactgcttgaaaacctcgtttattacgccctttggggcctactgctacatcaccatgccctttggattgaagaacgcaggagcaacctatcaacgcatgattcaaatatatttttcaactcagatcggccgcaatgttgaagcttacgttgatgatgtagttgtcaagaccaagcagaaggatgacttgattgcagatttagaagaaacttttgcaagcatccatgttttcaggatgaaactaaaccctgaaaagtgcatcttcggagtaacgtcagggaagttgctcggatttatggtatctcaaagaggcatacaggccaacccggagaaaatcaacgccatcctcaacatgaaaccgccgagctcccagaaagatgtccaaaatctgactggttgcatggcggcgctcagccggttcgtctcacgactcggcgagcgggggatgccctttttcaagctgctgaagaaaaccgacaatttctagtggggacccgaagcacaaaaagccttagaagacttcaagaaacttctcactactccacaagttttggcctcgccacatccacaagagccgctactgttatatgtgtcggcgacctcccaggttgtgagcacggtcctagttgtcgagcgtgaagaggaaggccatattcaacaagttcaacgaccaatttatttcgttagcgaggttttggcctactccaagacaagatatcctcaggttcaaaagttattgtatggtgtcttaattaccgtcaggaaattatctcactactttcaaagtcactcggtcatggtggtcacatcgtttccactcggggatatacttcataaccacgaagcaaacggacggattgcgaagtgggccttagaattgatgtctttggacatatctttcaagccacgaacttcgatcaagtcacaagctttagctgattttctcgccgagtggaccgagtgccaagaagacatgccagaggaaaagatggaatattggactatgcattttgatgggtcgaagaggcttacaggcactggagctggggttgttctaatttccccgaccggagaaagattgagctacgtattgtggatacatttttctgcgtcccataacatggcggaatatgaggcgctgctccatcgattaaggattgcaatctctctaggcattcgccgactaatcatccgtggagattctcagttggttattaatcaagtcatgaaagagtggtcttgtctaaatgataatatgaccgcttatcgacaagaggtacgtaagttggaagataaattcgatggacttgagctcacccatgtcctcggacataataatgaagcagcaaacagactgtccaattttggttcaaaacgggaagcagccccttcagatgtgttcgtcgaacatctttacgaaccgaccgtgcccagaaaagaaacaattgaagccatggatactcaaggcgtaagcatgattgaagccgactggagagaacctctcataagatttttgactaaacaagaactccctcaagacaaaaatgaagccgagcagatttccaggcgcagcagactctacgtcatgcacgagaccgagttgtacaagaaatgtccttcaggaattttgcagcgctgtgtatctttggaagagggaagacaattgctgaaagatattcattcaggcatctgtggtaatcatgctgctgcatgaaccattgttggcaaagcctatcggcagggtttcttctggcccacagctgtttccgacgccgacaaaattgtgcgaacatgtgagggttgtcaattctttgcccgacaagctcatttaccagctcaggagttgcaaaccatcctgctgtcttagctgttcgcagtttgggggcttgatatggtcggtccatttaaaaagcagtcggtggttacactcatctctttgaaatattgaacaccttcgtcaattttgtgcttaggcatttcgtttgtatctttcctctttgactgctaacttcaagtttttccttgaagttttcagtcggggggctactataataataatggaacatgatttttatcaattcaatttgcttacttgatttatcattgccatgcttgattttttggcttacacaatgaggactgaaagttttttaagaacttttgcgagttttagactcaataaggtttgacaaaagcttttaagaaatcagaggctaactttgaaatatctagcacagcataaattcatcagtattgtacaaattgatcttccatcatcatcagagggctgcagga

SEQ ID NO: 7781 - DNA, 5186 bp, Oryza sativa
cactccccacatcggcggccaaataggggccattcccggccgtttccgcccctccttcgaccataaaaacctgcccccgagtcccctctctcgtttcacccatttgccgtcccctcccgtgccttctaccgagcccgggccgctcgccgctagcgccgccgcttgccgctgtctccggccgcacgctgtcgtagctagagccgtcgcctcgccgctcaatcacctccgccagcttcgccgacgcgagagctacctcggacgccgcttctttgccgcgaatcaccaccggagctccgatttccccgcgtcgccggtgtgctcgccattggttccatttccggccggccattttggtcgcgcggtcggcctctccatccctaactcctctcctcaccttctttaggtgttgccaccgcccatccgccgcccgtgtcgccggtcgtcggcgccgcctttgtttccccgcgccggccgccaccgcctcctcggtgaggaccggtctccctcccttcctctctctctctttgtcgcgacgcccgccgtttagcgccgccgctgtccgccgctcgccgtcgtgcgccgccgctcgccgccggtggccgcgccgagccgccgcgcgccatggccgggccggacatgccgtgcccgagcgccatgcccgggctggcctcggtgccggccgtccccagccgcctgatcggccctcggccgatcgtggccgtccatcccgtggcccgcgtggccagccacgtggtgccacgtggtacaccaccaccccggccccgtggacccggtccacggcagaccacccctttgagccgctgacccgtgggccccgcctgtcggcgccgccccctggatgacgtcagccctgggacttattgcgcaataaatacattaaggcttttcttttatagtaataaacacagtttatcttctaaaattcataagtaattcatccgagctccgtttaagtccattcaagtctcagtaaatcaagaaaaatgcaaagaatccattaaaaatacttttgtttcctgtttcagtagtcttatagcatgttttgcttgtgtgctttgtttgtcgcgtagatttcggccgtttcgtcgatccgcggtttctcgaagacgttgctgaggtctcatcagtgcaagagcaaggcaagtcatgcaatacgtttgatcatattgtacccaatttacaaatatcccgcatttctattaaatgttgcatccttttacaatgtaatgtgggatgggtcctattactcagccatttattgtttaccatatgccattgataacttgggtatttaaaatgactagatgttggcttaggaaatgcttagccatgcttagttcaactagtacacaaatggggatcactttattacatagactctgtctattggcataactttagattggtgccaccgcaatggtgttagttaattaaaatacactgtatggtgggctgtgggtgcatggttttgctggtcgcacccatggcagttaaagaccggttcacgggaaaccctgggagacctaccgtgcttaccacaagcgggagtgggtaactgcttgatctgaagtatagctcgaccctttcctaggcaccggtggcgagggtgggcgtgatggagttgggtcagccggggtgtccggttgtccagctgccggattcaccgcggcgcaagaggggaccgcccactgccttttgaggggtgggggtgaaaccttagcgtggtgtggatggttaggggagggttatgcggagggtcttgtcacgatttccccctttgcagtatcatggtgatactttggagcatggcgacatgtgtgggatcgtgtcttgtgggtacagttgtacacctctggccagagtaaaactattcgaatagccgtgcccgcggttatgggcgatcaaccagattcaccgtgattagtctcacccctagtctagcttaatgaactggtgtagttcaggtggttggttgggcctgttgcaacgtggtgtagcgttggacagtgattggttaatattgattaattactacagctattttactgctttcaactactgctttgaaatgtctgctttatgcaaaagaacccctagcttcctttggttatatcctgcatcatacctcctcttccggtatgacttgctgagtacagtgggtagtactcagtcttgctctcttttcccccacaccagagttgaagtttttctcagttggagatgtcttgaagaggtgggtttcgtcgctgccgtcaagggttgcctatggaatggaatcgcccgctgcaggagtcaagtcttcaggcttagctcgcttttaccttttccgctgcatttgtaatcctttatgtttttgtaagacgtggatctgtatgtcaacaattgtcgtttgtgtaccctggctggtcctggacaggggtttaatacacattcagcttagaaattctggttcgtgaatttctgggcgtgacaaacgtgaatgaacgaacgtgaacgaacgaacgaacgtaaacgagaacgtgaacgtgaacgaacaaacaaacgtgaacgagaatgtgaacgtgaacgaacgaacgaacgtgaacgagaacgtgaacgaacgtgaacgagaacgtgaacgaacgaacgaacgtgaacgaacatgaacatgaacgaacgtgaacttaacgttgtatttgaacgtacataaacgaacgaacgtgcgtgaacgaaaagtgaacttaacaagaacgcgaacattatttaacatacgttaacgtgaacgcacgtgaacgaacgaacgtaggtgaatgaaacgtgaacttaacgagaacgcgaacgtgaacgatcatgaacgaaacatgaacttaacgagaacgcgaacgtgaaatacaatatatgttactttgcgtttatcctaatacatctttttgtatgttgcagaaaagacgttgtcgtcgtcgtccctcaagtcggagtggtagctagccctcgaaggaattcgcgcaggcaagtgatgtaaatatatgattgttagatttttaatgcaattaagactattagatttaatatacgacacttagacttagcatagttgataattacagttttaatacaatattatttgagttttagtataagattattatagttttaatataagattattagatttgtaattagacttagcatatacgacagttagacttagcatatatgacttagcatatatgattgttagcatataagattgttaaagcaaaaatgacctatagacttagcaactatttcttgtatgaacagatggctgatcgcgatgaggaacagatattgtacgatacaatcgcggagggaagcagccagtactggaacgaagaagaggggaacgaggatccaaaccagtacttgaacgaggaagggaacgtggagagggatgcggaggggaaccaggaggggcacgtggagagggatgtggaggggaacctggaggaggaggctagtggaagtcaaccctccgcaggacagaagagggcacgcgggcaacgaggtgccgtgaagaagcttgagggtcggcacatcataacggaagtggacgaagacggccgacctagtgccccggcggaagcagccaagaactacgtacgacacagcggttgggttgtgcgggataacatgcctgttagtacggtgtactagcgcagaacaagggcactcggagatcatgagaactttgtcccagattcggagaaagagatgctgtggacaataatgctcgagacattcacccttcccacgggtacataggacaaagtgaaaaggtggactctaaagaaaatggcagaacagtttcaaagcttcaagggagatctgtaccaaaaatatatcctgaagggacagacaccgaacttcgacacattcccaaagctaagggatcactgggacgagttcgttgcatataagacaagtcaacaagggcaggcgatgttggaaagaaacaaagaaaatgccgctaagaagaagtaccatcaccacttggggtcaggcggctatagcgtcgcgatgccgaagtgggaggagatggaggcaagcttgcttgagaggggtatcaaaccggccactgctaaatggccagatcgatcgaagttctggtactatgctcacggtggaacgctcaacccagttgatggctccctggtcttcagcgatcagatacgcgaggctgcgcgtcgactaacggacgcagtggaagcctcttctcagggcacgttccgacctgacagcgagaaggacgagctgtcactcgccctgcagactccagagcatccaggacgaacacgagggaaaggggtgattccttggaagattgggttcagggaggacatccacacgtacaggattcggatgaggagcaagagagataccgaggcgaagattgtagatcttgagtacagggtatcgagctacgagctcagcatgcaagaggaggtggcaaggaaggttgatgaacgcatggccgcacatcggtcccatgatccccagccgaccattcctcctgcaatggtgagcccttcaggaaatcgtagcagctgcgcctcaacggggcaggtaggatcacagagcatggacgccatgcaaacccaggacgaaaccacctgccccgttgatgacatcactcagcggataccatgtgagctgcatattcccttaaagaacttatcaataaaggtaagctcgtagtttatagattttagatttgtccattctgcaagttgctgcttatatatgttgattactaataaacaacctctcaccacgtgaaggtggcgtcgggcatggccatcccaatggacccttcaggtacttaccactgcaggccgattccagcaggatactccaaggtcgaagttcagttggtcgaaggcgcgtacgaggacctcgagttggattaccctagaggagacggtgagacgcatctacgagacacaagccacgccattatactatggcgcaagtggtacatcatccttcctgggcgacaagcggcgtctcgtgcaccatctcctccggcactgccatctcctcctcatgctcctacaccgtctcctcctcatgctccagcaccgtctccacctcaggctcctgcaccgactcctcctcaggctcctgcaccgactcctccgcaagct

SEQ ID NO: 7782 - DNA, 3431 bp, Oryza sativa
ttcgtggacctaaataaaacctcccgacaagtttaaggaccgctggtgtattttactctaaaaaaaagagagagaaaaacttcaacctagcttttgagttaacagtgtaagagtggcttatgaatattaagaaaagcaatggaaaaagacacatgtttgagactttttagcttataagtccaaaacgtacttaagtatgttagtacttattaatttaaattttcttaattaattaaggtaattaaaaaattgagatacataagtatggatcatggtgcttattaattgctaattttgaactttttaaattaatgaaatagaaaatatcagttcaagacattaataaaataaaactacagcaaccgaagacaattaggacaggacatgtattttttattttttttcaattaggagtaaaaaaatattattacttccttagacttacaaagaaaaatttatgttttactttcaacaaattttaacaaacatgtattttacatataactaatattttttaatattaataattgtagcacatgcaatgcacaggttgacgcttctaaggcatgtgatgctataaatactcccaggtcaccagtaacactctataataaattatagaaaattttaattagataatatatatttaaaaggtaatctgttcctcccaatctacggggtatacaatggaaaatttgtaaatgttcaccaaaaaagccaaaagtacacaagtaaactattgggaaaaaatatacagcttattactgttcaccaaaaaaaggaaaaaaacatattgatgataaaaagataaatcccaaaaaacttacgcatgtaagtactacaatgaaaaaatcaacgatctgaaaataggattttctataattttgagataaatatatattactccaaaacacacaattcaactagaggaccttgtccatctttttttaattcatctaattgccgtattccttcaattaaatgaattattaacgactaataataattatattgtaatgctaaatacatgacaacatatggaaccaacatataataattaatgatatgataatttttcaaataattgtataacatattttgtgatgtcaaatatcacctgacaaatatacaatactactttaaatctacttgtctaaaaaataaaacaatagaatttagttgtgtttttccaagtaaatttgatttaattttagtttgtgtgggattaagattctctacattttcaaaactatttggtatttccagctaatgatcctgctataatattaccccttaatctatcacgagtatattggtcaataggtatgttttttctataccaaatagttttggcaacaaattaactactcatgatatacttttcttagagttgaagatgttaggcataattgttgatgtatgtcatgtacctcactaatgtgattataagtgtacttgaacaaattagttattgcacatattttctaaagaaaataaatctaccttcttttcaaatgatgaagaagattataaataattgcttatagatattacttagatatgatataatataaagctaataggttaatgattataaaagcaagtaatgccaaaaaaacaatttctgaagaaatcgaggtatatattctccggttaatatttcgcttttagtgtctcaaatttagcatacgacgcatgctcgcgcattcgcgcgggctaccttcctagttattatatacttaaaagtccactgaacttcctacaaacgctcttaagccgacatgtgtcctcctacgaacgctcctatgccgccacatggcattctaataaataaaaaaattcattaaatccggtggacccattatttaaaactattagatctatctttgagaaaaatccaccgctaaaactgggccccactaagtacctgtacgtggatggatgtatatatgtaatgtacgtgttatgaaacaacagggtgatctcatccatataaaaggatggatcgcaaccgaaggcaaccgtgcctcttccctaggcgcttcttggcaacagatgcaatggttcccaaccatcgtgtctccggttgccaccccttctccatctataaattgtaccgcattgatcaataaagaaatctgctcattcattccctctacattcttgtgttcaattctctctctcgctcaatcaattctattcacaatacgttatcagcactttcgctctcgcgaaggagttcgcgaagtttaagaaggaagaacatcactttttgatctacaggaaaagcgaatagaaaaacaacggaaggtacgatgcctacctttcattggatcatggatgcccgttctcggcctccctcgccatcagcgcgcacgccagcttcgctatcttcttcgtcgatcgatgaggaggacgcgttggggatcccgcggaggcagggctagggttgtggccgccgccactaccctcgccgccgtgtgactgcaactccagttgtggttcccccgcctgtccttgtcgcacctcctcctccgcctccggttgccgaagcacctcgccggatccttgtgcagggggtacagtactgtgcccaccatggatggacggcggtggtgacactgcctggcaagccgtgtgatctctcactggagatggagtcgctgccggccccgttcgtcgccgctccatcaccaccaaccgctccttcctcacctctatcaacgtcgcagccgacgccaagctttcgacgctcccccactcccgtgccaccaggatttggtcgtaccggaaccatggcggcgcgcacgggggagccgcctctctttacaccgtctccaactcgtggccacgtcggagccgccgctgcacgccgtcccggcctccgccatacattcattgccgttccccatggctccccgagccgcatggtacccaatggcatggggggggaacggtgttagggtctggccggtctccaactccgatgaggagtcgggaccgtcggcctaaagccggccggcatgccgccggccgacgagagggacgcggcggcggcggatagtggacggtggcggtgggaggtggcggtggaagcaaggcggcagcggaaatggagggggtagcggcggcgctatcactgaaggtggagacggcggtggaatcggcggcggtggcgtcggcagcgcccccgcggcggcgtcggcggcgccccccagcggtggaataggcggcgcacctcaacggcgtcaacggcgcacctcggcggcgtcggtggtgcctcacggcggcgtcgatagcggcgaactggcggcggtcagcgacgaaatgacggcggtgggcggcggcgtgtgcagcgaaaaggcggcggcggcggcggtgaaattgtgggggcagttagggttaaccctaacacccccctccccgacgcc

SEQ ID NO: 7783 - DNA, 10448 bp, Oryza sativa
tgattaataacactgtgtaactctaggatcgtctttatataatggctttgggcaactaagtgacttttaaatgctgttttctacaaaacttaacccctatattattaccccttgtaccctcttgcattaatcatgcatctgccggtgtgacttgctgagtactgtggttgtactcattcttgctcaatcttcccccccccttcagtaagagaagctttggagaagaagtcttaggtggagtcctggcttataccccagttgagcgcctgtgaagatggagccgtaggcccactagtccgctgctggttattttttaattgtcaggccttaagtgcctttgtaataatgtaaatattatcgatataataaagatgtgtcttttatatcatgtttgtgtggtgtaccccggcttttcctgggacggggattaatacactagcgttcgggaaaatgtatttttctcggtcgcgacagtcacactgagatataaagtgagtgacgagtcataacattatctatcttgctaaccatcaagtatctgtgatgggcaataaacttactttgacgatggtatgcagggacatctgtggaggcacatcacgtaacatccaaacgacatgactcactctgatcctaatagaatatccaaccaaaacaaacactctaaagcaaccgataaggaattcaaagaaaacccatccatcgcatctataaatagacaagcacaatgtaaacccccttcatccttctcacaactcaaacattacagcgaaagcataacaactagaatcccaccacaacgaagatcattttcttctttgctctccttgctattgctgcatgcagcgcctctgcgcagtttgatgctgttactcaagtttacaggcaatatcagctgcagccgcgtctcatgtgtcacgaccggaaataacccaacgggcgttccttacgtgagtgcattattccttgtcccaggaggcaaggtacaccaaaagttgatacagttcagagttcaacaagcggaagcgtaaatagttaatttattacatgggcagcgaaggcccagcacacacaaagacaaacgagaaacagcggaagactagggcgacgaccacaggcgcttgacggtaggcacgagctagacaccaaaaccttcatcttccagagactcctcttctgggtttgggaaaaaaattgagcaagactgagtacaaccaccgtactcaacaagacacacccacaagtgcataataaatgcaagggagtacaagggagttataatataaagggttagggttgcagtaaacagcatttaaagatacttagttgctcaaagctattttgtaaacacgattctagaactatacaatattatttatcaaggccgtgaacccacacgaacctgccttaacccaaggcctacgatgattcagaccgaaccggcaacccgaccctgggtccaagctcgtcccaagccaacccaggccaaccattccacattttagttgttaagcaggttttaagaattaaaacactaacttgggtacattgctcggcttgcccataaccgagggcgcggctattcgaatagattatactctgatcaaaggtgtacatctttacccacaagacacatcttcctcacgtgcaaccacgtggcacataccaccacggtatacagacggaagacgtgacatagtttccaacccatcctagccatagacaagagtaccgacccaatcccacctacggccggaacccccgggacaggtaggcaggactgagcccctagcagcaggacaccggccctgtgccatgacatctcgactaccgggccgcagctcgtgtagccttcatttgccctggagatgtccatcgacccccgacttcgtccatctccatccgtgtacttttgtttataaccagactgagccacaaactaagccttacccactagacatgtggaagtacgctagtactttgcaacagaggcccgaagaccggtccttatatggccgaggtgctactatcaaaaccatgcaccccgagcccagcctaaaaccattgttggggattttgaatagagggggcggtgtgaatccaattccacaatactccaacaattccaaagtgtccaggtgatatgaatatcccaaagtctagagttgtaaaaccgcctaatgttacctaattaaatagcgaagcatctacctaaaatcatactagtggtaccatgagtagagtgtccactagttggggttttgtttattctagggtgaacaaggaaataataacaataacaataataaggtcataacaaaggtaaataggcatggctagataaaacagtgataacgcgggaatttaaataaagcgataatgcaataattttaaagcaacataattttataaactgggattcaatatgttcaaggatgatgtgacttgccttgctcgctttcccaaacgccggcttcaacttccgaagctgcagcgtctacacgaccaacggaaaagaaaaggcttttactctaataaactccatataacaagcagaaacaaagcacaaaaatgggttcttgacttcttaaggaaaaattagagacttgaacggtccaattccgagttcaaatggccaagttatggccatttgaagtttatatgctctttaaatgaatatttgcgaatttcttcatttaaattttaatttaaaatggatttattgcgtcagccgaggggaggggcgcgcggaccgggtccacgggggtggggcccacgcggcagccccacggtccacggtggaccgggcgcacccgggctcacaccggccggcgccgtgggtcccacgcgtcagccgcacccgaggacgcgggcggctgacagccgggccccacgcggcagccgcacggtgcgcccgaaggcggccacgccggcgcagcggcgggaggcggcgcgccctcacccctatggtcgccggcggcggccataggcacggcggagcggcggccgagagaggggaagggaagggggaaaagaagcggcggtccacggctcaccccgggtcgacggcgacgacggaaacggcgaccggagcggaggaaggcggcggcgcggctcgggtggacggggtcgacggtgctccggcggtcggcgagcgaaacggaggggtggacgaggtcgccggggatgcggtggagccgaaggtggcgacgccgaggcgggaggtggtccggggcgacgacggcggcggaccggagctcggcggtgacggcggagagagagaacgacggcgcgagctcgattccgacggggagagagggcggcgagtggcggaaacggtggagggaggcacggggaaggtttatataggattgggagggggagggagctgccggacgagggggaaacgggcgcggaagatccggtcgccattgatggcgccggcgaggttaggggagaggtttccaaacgaatccgagggagagagggagggaaaaatggggggaaagagggagggaatcacggggaatatttccccccactttattgcgcgcgtggatggcgggaggcggcgggattcgcggcggcggcggcgctagggcacgggcgaggcggcgggagcggcgggaggaaggggatgacgggtgggccccacccgtcagcgagggtggcgggcgggcccgcccgtcagcggcacgcgcgcggggaggaggccgaatgggccgcggaggagaggagagagagggagagagatgggccgagccggcccaagagggggaggagggggaaaaggactttttttagggtttttctttttataaaacctttttaactttgtttatttcttcttaattattatttgtgctctgaaaattccactaaaatttatttacgcattttaggcttttaggaaatatacaaaaatcctccaagccttatttgacttttaactttgcacattttaattgttggaggctttcacacggattttaattattctaggcataatttcggggatgtattttagagtcgttttgggacgcgacatcatgctgcagcaacagatgcttagcccaagcggtgagttcgtaaggcagcagtgcagcacagtggcaacccccttcttccaatcacccgtgtttcaactgagaaactgccaagtcatgcagcagcagtgctgccaacagctcaggatgatcgcgcaacagtctcactgccaggccattagcagtgttcaggcgattgtgcagcagctacagctacaacagtttgctggcgtctacttcgatcagactcaagctcaagcccaagctatgttggccctaaacttgccgtcaatatgcggtatctacccaagctacaacactgctccctatagcattcccaccgtcggtagtatctggtactgaattgtagcagtatagtagtacaggagagaaaaataaagtcatgcatcatcgtgtgtgacaagttgaaacatcggggcgatacaaatcttaataaaaatgtcatgcaaatttaaacataatgcctctgtaaggataaatcctagtacattgttgaaattaattatcatcaccgcctactatggttgcatttacaactttacgatgtgttcctacatttggttctaagctactatggctactcgacgtgaacggagtgtgttaagcaggtcaatcttttcatttcgatcagaacaaagtcaaaacgcatgtggcaaatagtatataccctacaacgtaatcctacaccataggcaaatcattgccaatacgtgctagccgaactgttgtgagaagcaatgcctcctaagtcacgattccgttccctttcgtgattttttctttctaacgtgttttttaactcctcggcaaaataaacgcaagctaatctttcagatttttctccaaagtggtcataaaatcaatgacggcaaaataaacattgttgaaattaattatcatcaccatctactatggttgcatttacaactttacgatgtgtgcctgcattcggttctaagctactatggctacttgtcgcgcccggaaaaataccttttccagaacgctagtgtgttaatccccgtcccaggaaaagccggggtacaccacacaaacatgatataaaagacacatctttatatatcgataatatttacattatcacaaaggcgcttcaggcctgacaatcaaaaataaacagcagcggactagcgggcctacggttccatcttcacaggcgctcaactggggtataagccaggactccaccaaggacatcttctccaaagcttatcttactgaaggagggaaagatagagtaagaatgagtacaaccacagtactcagcaagccacactgggagatgcatgattaatgcaagggggtacaaggggataataataatatggttggattttgcactaaagagcatttaaaagacacttagtcgctcaaagctattttgtaaacacgatcctagagctacacaatattattaatcaagactgtgaaccctcacgaacctgccttaacccaaagcctacgatgattcggaccgaactggcaacccgacctcggtcccagctcgtcccaagccaacccaggccaaccattccatattttagttgttaagaaaattttaagaatgaaaccactaacttgggtacattgccaggcttgcccatatccgagggcacggctgttcgaatagattatactctgatcagaggtgtacatctttacccacaagacacgcctttactctgcattccattgcaattggaacccataaaaaaaacgtgacataaccctttacccatcctagccgtgaacaaaagcaccgacccaaccctgcctacggccgatatcccgggacaggcaggccaggattgagcccctagcaacaggatctagaccgggtgcgccacacgcataggggtgagaccacccgtgtactagtccagtgccatggcatttcgactaacagacaccagcccatgtagccttcatttgcctaaacatctcgattaccgatccgcagctcgcgtagccttcatttgcctcagagatatccatcgtcgcaacgacttcatccatctctatccgtgtccttttgttcaggactagactgagcaccgagttaagccttacccattagacatgtggttagtacagtagtgctttgcaacagaggcccgaccttaatccttatattggccggggtgctacttcccacaactggcatgcacccaaaccccaccggaaaacaggttttaggggttttgaaagaggaagagaggggtatgtcatattccaccataagccaaccgttccatagtatccaagtgatataagaattcccaaagtctaaagttataataccacctattgttgcctaattaatcagcgaagcatctacctaaattcatactagtggaaccataaatatagtacccactagttgaggttttatttgcctagggtaagcaaggtgataataacaattgcaataataaggctataacaaggattaataggtaatgctaaataaaacagtggtaacgcgggaatttaaataaagcagtaatgcaataattcaaatcaaaataattttataaattgggattcaatatgctgaaggatgatgcgacttgccttgctcagagagaacggccttccgaaccttcggcgacgaccgcgaaccacgcttcgggaacctccggaacgacaggagctacgcgaagcacacaagcagagctaaaccctataaagaagcaacaacaatacataaaaagaaagcacagggttctttaggttataacaaacattaggagatttgaatggttccattcaaagttcgtatgaccaagatatgatcatccgaagtttaatgttgttgcatggagatttacggattattgtaattaggttttgcaactaaaatatgtgtaagctctagcctggaaaagacaggaaggctgcgctgttgacatccggaccccacatgtcaacctaagagaccacagtggaccgggtacacaaagacggtccacgggtcgacggaagcggaccccatgtgtcaaccgaggcgagtggccatcaaacggactccaccagacaccacgcgggctgcacacgtggaaaccatgcggctaccgagcgggcacacaaacacggtcaccacacgcaccacgaacgactaccgacactggtacacgggtaccggggttgacaaccgcacaacgggcacggggcgacaccgaaaggacgaggacgaggcagcgagaggaggcacccttaccaccacgcgatgaggcgtgggaacaacgatggcgaatgggcacggcggagacggctcggggacgatggaggcgaaaggggagggaacgacttcagcggcaatccttggacgaaggcgagacgcggccggcgcaacgcttgacgacgcggagccgaggacgaagacgacgacggggctgcagcaaccttgacgaaacgcgggcggtgaacacgatcggctcgacggagggacgaacgccacgacgaccgggaacgacgagaggacgacgatgggaaccggcgaggaggcgacgacgaatgccggcgggttcggccgaaggggaggcgatgccgaggacgacgtggaacacgccactgcgataccggaggaggagacggcgacgtcggccggcgcacgggcgacgaatagcagtcggccagagacggggaggtactggacgccgatgaggaggccactccggcgagcttcgggcgaggaggaggtgatgccggagatgaggacggcgtcgcagaggcgagggaggtggtggcgacgtcggccggtgcaaaggcgaggcggcacaggcggttggaggcggagcagtggcggcaacaccaccgttgccggcggggacgcacctctaggggtttccgcgtgaaacggaggcgacgccggtggaggggaggcagctgcgacgccgagggaggagacggcgcggccgaccagcacgcgggcgaggcggtaggggcggctggagatggccggcggcacgggagagtgaggaggacggcggggagaggtggtgaagccacgggagagcgcgggagggggtaaaaattagagaacggatctagggggttccattttataggataggggagggagccgggcacgagagaggtgggaacggcggcggaatttgtggccggcggccggggaagacgcgtccgttcccgacgattgagggcgccattcaagggggaaaatgggggaaaccaaagaggattgattagggaataaaagcccccaatcaatttggagttaaagcccttgattcgagcggatttggaggaggatgagggatagatttgaacgggagagatgagaggagaccgacggctggaggtgggagacgggtccgacaggtgggacccacctgcaaggcgcggtcaacgcacgtgggcgcgcgcgtgacaggcgcgtgcggcgcggcctggggaggctcggctgggctgggacacggcccaggtaggagggggcagggcggcctgcgccgggcagaccgggaggggagggaggattggaaggagtgggtcgggaggaggaggagaggcccgggagaggagggaaagagagggaggagagggagactttgggctaggctcggcccaaaggaggaaggagggattatttttagtttttctttttagtaaactttgataatggctgttgttgtttaataattatttccagtattctgaaaattcaagtaaaatttgagggctccttttagaccaaggagaatttaacgaaaattcttcgggctacattcgaaattttcttgtacgcattttaatgtttgccaattttttttcaaattttaattaattctattattccttttagagaatgatttttatttcgggatgaatttatcaggacgtgacactactcaacgtgaacggagtgtgttaagaaggtcaatcttttcatttcgattagaacaaagtcaaaacgcatgtggcaaatagtatataccctacaacgtaatcctacaccatataaaacatgcccaacctatagcggttataaatccactattcaaaatgtaagtatcgatgggacaatttgtcatatcattgttaattcaatcttaccttgtcaccgaaacaatacgctctgcgtaacatgaagttaaaattttcatatttgaaggcctggtcacggaaatatcaatttataagttaaaaacattaagcattactgcctcaatgaaattcatatatgcttaatagtccacgttaaatcccatgcatatcggtttcatttgttttcacctaaagtcacaaaatatagttgttgttcttaaaggtcataatatctacccaagctacaacactgctccctatagcattcccaccgtcggtggtatctggtactgaattgtagcagtatagtagtataggagagaaaaataaagtcatgcatcatcgtgtgtgacaagttgaaacatcggggtgatacaaatctgaataaaaatgtcatgcaagtttaaacataatgcctctgtaaggataaatcctagtacattgttgaaattaattatcatcaccgtctactatggttgcatttacaactttacgatgtgtgcctacattcggttctaagctactatggctactcgacgtgaacggagtgtgttaagcaggtcaatcttttcatttcgatcagaacaaagtcaaaacgcatgtggcaaatagtatataccctacaatgtaatcctacaccatataaaacatgcccaacctatagcggttataaatccactattcaaaatgtaagtatcgatgggaccatttgccatatcattgttaattcaatcttaccttgtcaccgaaacaagacgctccgcgtaacatgaagttagaattttcaaatttggaggctgggtcgcggaaatatcaatttataatttaaaaacattaagcattactgcctcaataaaattcatatatgcttaatagtccacgttaaatcccatgcatatcggtttcatttgttttaacctaaagtcagaaaatatagctgctggtctatcctgagagtgaataggtaggcatttcgttctttactggtatcgttgatgaccgccgtgatacaatcggaccatggtttgatgctagcaaggggctattttcatttatgttctgcctcctaaatgtcctttcattcttacatctagtaccatgacaaaaatctagctagttctataggcaaatcgttgccaatacgtgctagccgaactgttgtgagaagcaatgcctcctaagtcacgatttcattcccttcgtgattttttctttctaacgtgtttttttaactcctcgacaaaataaatgcaagctaatctttcagatttttctccaaagtggtcataaaat

SEQ ID NO: 7784 - DNA, 14133 bp, Oryza sativa
gggggatacccctaatcggcgcggcgaccagagccactcccacctagtatagtcctagtactactagtactatttgtctagtagtactactgctgctgccctacacagtggcgcgctttagtactacggtactactggtacagtactactttactctactactactaatattatacaaacttgtatacaatatgtacaaactttgtatgtgacatgtacaaactttatattacgatatgtacaaactttgtatacgtacgtattaaaaaatcgaaaaaacaaaaaaaatcacgtatataaagtttgtatacgtatgaatataaaatttgtatacacgtatataaagtttgtatacatgaatacaaagtttgtatacgtacgtatacagagtttatatatatattaaaaacccaaataaccggaagaaccggggaaaaccgaagaaaaaccaaaaactagaggaaaaccgaagaaaaaccaaaaaaaaccggacacgcgtaagttctccgtcgccctcctgccgcccggcccggcccgcccccctctgtgtgcgccatgtggccgtgccgcgcgggggagcgggcgcgcggctagtcgccaattaggcgtttcgcggcgggggtggcattggggaatcaggatcctgactttggtaagtaaaggcagagatgcacagtaacgtgactttgaaagattcgtagccatctagattgcaaaggacagtccagattaaaaccgagaatgctaattgacgcgcgccgctgccaaaagcccaaaaaaaacccatactctatttatttcctgttttttttcttttttttttgagcagccacgttttttttcttttttcatctcaacttttaaaaactttcaactcagatttgaaatctttcaaactcagatttaaaaactttcaactcaaaattttaaaactttcaactcgaaatttgaaatgtttgaagttaaattttgaaaactttcaacttttcatctcaatttttaaaaactttcaattgaaatttgaaactttcaattcagatttgaaaactttcaactcagatttgaaatctttcaacttagatttgaaatctttcaaactcagatttaaaaaatttcaactcaaaacttgaaaactttcaactcgaaatttgaaatttttgaagtcaaattttgaaaacattcaacttttcatctcaatttttaaaaactttcaactgaaatttgaaactttcaattcagatttaaaatctttcaactcagatttaaaaaatttcaactcaaaacttgaaaactatcaactcgaaattataaatttttgaagttaaattttgaaaactttcaacttttcatctcaatttttaaaaactttcaactgaaatttgaaactttcaattcagatttggaaactttcaattcaaattttaaaaacttttaaatcaaaataaaaaaaacttctaactcggatttgaaaactttcagatcgatattttgaaaaactttaaaatcgtattttgaaaattttcaaaatcaattgttttcattttttttattgggaaattactgtagcattttcactaaacaccatgattaacgctaattgtcaggattagtgacgtagtcacgcacgtcgttatctgttgaggaggcggaggcccgcgtgcgcgcgagttagcatcctcgcgcgtgcacgctagccatgcccgattaaaacagcacagtaccaataaacagtaaaccgtacttgtgctacagtattttctcctgttcagtactttgcgggggagagggataagttcttccttaactcgtcgaatccgattttcgctgatacgtaatatgcgactagttggttattaatttttgttgaaagttatatgttttgctaatatgtaatatgcgactagttggttattaatttttgttgaaagttatatgttttgctaatatgtaatatgcgactagttggttattaatttttgttgaaagttatatgttttcaggatggagactcaacgttgtatcttttatttccgagattttgatttaaaaactgactaattatactccctctatcacataatataatataagatacaaccaaactcaacacggtcttcaaaactattatttgatttataatttctcatattgagtatgagtaatagagttcctctactcctacaaacacttgtaagatgccatgtgatgctctaataaataggagaaaatttaagaaaaaatatatgggaaaaacaaaacatctagccatcgatttgcacttaaaccgttgaatccattattttcaatcatcaaactagatttatttaggtaagccctcgctcctaaaaactaggtaatctctccctatgcacgtacatacacaagagatgtaaaaacaaaaaagaagagtgcatatatggtccatcccatcaggtagttttttttttgttttttttctttgtagccctaaggtttctctcaaattatgtatatatgtagcgaccactttttgtgagtttaacgaagaagccacgctgacatggtgctgcttcatgccaccctcaccaattttcttgaatgtactttttgaaatagcaatgtaaaaggtaatcataggcagtcatataaatgtgtgcacaccaccctatgaatgcacatacacacaccctacctcctatgagagaaaaatatttgtccaaaaaattatgaaaagtatgtacatctgagagactaccattcaccaaaaaaaaaacttacatacatacattcagtaaaaaatgtcgtatggaaccatattttatcttttttacttatgtcgttctcatataaattgtgttaattaattgtgttaacaattagtacaaataattttgataatatagagtatttctttgtatattaccatgaacatgttaaggtgaattagatgtataataaaagaaaaataatcaaaacacatattctattttcaaaggatgatgataggtaagtttacatataaccgaaacaaagtgatttttatttgaatatgatagacattatcatttagtgtatcaaaatccatagtctatttcatggtataaatatttccttcttttacggtaaggttatgaggtaatctatggtcctttatgatgatatatgactttttagtagatttttttaaaaaataaattacccgcgcatatgcgcaggttccttcctagtttcctcctaaaagaaacaacggtagtgcaaatgcagcccaccaacccgcgtaaaccaaaacccgatgctcaagtccgtgttcccaatgctgccccaatatggcaaaattctaaaagtagcaatattatgagatggagaaaataataaatatgaatatgatgagtcattttagagttatattgtatcaactaatgttagtgtttacacccaacaccgctggagaaaggcttcgtagtcccggtttgtaactccctatagtcccgggttgcaaactggtattacgaatctgggactaaagatcgctatctttaatcccggttagtaacaccaatcgggactaaaaatggcagtgtcacgtgactggtactgccatctttagtcctggctgggaccaacaaccgggactaaaggtccttttcttcctttttttttaatttgcttgcaagttatcagataatcacaattcattcacagcacaagcaaattatattatcagatcatcgtaaatttattcacagaaacattcacatatcaaaaacatccaaaactctagaacaaatcataaaaaaaaaatcaagaaacattctagaacaaatgaacatcgccgatgtcgcccggccgttggtcgccctcccatctcgccgccggctcatctcccatcccgctgcttcccttctagccggatctagcagaggggagggcgaggccactgtcccgcgcctgtccgccgccagccttccatctcgccgcgtcccttccggttagatttggcggaggggagggccactgccgcagccaccgtcggaccactaccgccgctgcttccaccatcgggccgcgaccaccgccgctttcgccacccagccacggtcgccgccgcttccgtcgagggaactagagagaatgagagagagatagagagagcgagaaagaatgagagaaagatagagagagccagagagatagagagagcagaggccacgtggaagatagacgaggaaatcgagagagaggcgtgggagataaaataaggaggtggaagagagatatttagtcctggttggtgataccaaccaggacaaaaagtcgttgggggcctgacacgacctaacaactattgaacccggagtgaaattatctttagtcccggtaaaattggttgggctttttaaccaggacaaaacaaagatgtttagtcccgattcctatttgaaccgggactaatgtgctttttggccaaccgacgaaagaccatttttccagtagtgcaaattcaacacctagattcgaattaggaaaatatttccaaaatttggagagtaccggtttccttcacgaagccagtctaaccgccatgtgtgggcttgtttgaccggcgatttgtggctggtcagaccgacagagtccaatcccaagtttgtttttatcggatctcgggatttcttatttgggaggatatgtttcgggtttctattagtttctactcgagttggacgtgaaggaggacctggcagcaagacccgttcaattgaaaagaatctacacacaatccaacctagccaattgaattgcttttttaatattgcatctagttttcacctagtcctagcctaattcgtctatctttatcaatttgcgatgtaaatcgtctgctttcgctacgagagtgtgaaatccctttgtaagtttatcccgtaaaccttatgttcgtccacgagacgggtgtttatcgcttgtttcttctaaatcgggcctgctagcccggttaatctaccaaaacccgtcttgatttagtttttgctagattgaggtggttggcgactccataccactgtaagatgtttaggtgtcccaattattgtcttcatgccaaaaaaaatgctaacaattagtattgctcgagttttggcataacctccctatcaaaatatagcagcctaataccgtatggagcacattttataccacgaatatggacattacgttgtatcctgttctaattagttgctatatattgagatagagggagtggttgggatggtgaagttgctatagagatagttttggtttgccaaattacgctaccaagagacgatagtgttcgccttgcgtgagaatttatccggtttcaaaagttaataacaagaaattattcatttaaatttagggcaaaaattagtagtagtagtagtagtctaagtagtagagtgctacaaattccagttccctcccgaaaacaaaagaaggcccaagctgcagcacaggcgcattcccctacagaaacccaataatgctaaggtcaaccttcccgctcgtctcccacctcccatcccgcaaaccacccccaatccgcccacgcccaccacctgttcggccctatgcctcttccgccgcctcgcctcctcctcctcctccgccgccggcgtccgcttacgtccacctccccttctgccgcaagcgctgccactactgcgacttccccatcgtcgccctcggcacctcctcgcccccgacatccccacacggcggggacggcgacgacccgaggatcgccgactacgtccgcctcctcctccgcgaggtcgccgccacgcgccccgtgtccgacgacggggtgcccctcgagaccgtcttcttcggtggcggcacgccgtcgctggtcccgccgaggctcgtcgccgcggtgctcgacgcgctgcggaccaggttcgggctgtcggcgtccccggaggtgtccatcgagatggaccccgggacgttcgacgccgccaagctgagggagctggtggggctgggcgtcaaccgggtgtccctcggcgtgcaggcgttccaggaggacctgctccgtgcgtgcggccgcgcgcacggcctgcgggaggtgcacgacgcggtcggcatcgtgacggcgtgcgaggggctgcagaactggagcatggacctcatctcgtcgctgcccaaccagacagaggagatgtgggaggagagcttgaggtgcacggtggatgcccgtcccacgcatgtgtctgtctatgacttgcagatcgagcagggaactaagtttgggcaactgtaagtgtttattgccaattcatgaatctaatcccatgtttttgagtaaccgattggaaatttcggatatattctggccacatttctgttaatcacttcatgttctgattctgttatggggtttggttggtatggcaatatgggctatgaactaggaatggaaattaaataatttagaatcattataattctattgggaagaagtttgtattactattttgcacttgtttgtgttgtttttaagttcaatgctctgctcagaactcactatgatgataaacaattattgtaactggaatacgctaaaaggtaaaggtttaagcatgaaattgttattgttgtctctggccttgtctcatccaattatgggaaaaatatgtctcattaatttgtgatatgttaatttgcactgacctttttatgggaaggtactgattctcttatgtcagatttgaaacgccagatcagcttttgcctttacatgactacagattgagtcaaaccctcttttatgattttttaaattaaacaaaaactatgatagttaaaatctctgttgttttaagttcggtgctctgctcagaactcactagtatgataaacaattattgtagtcaatacaccaaaaggtaaagagtttaagcatgaaattgttatggtcgtctctggtatgtctcatctgattatgggtaatatcccaatacagattctcttatgttagatttgaaaccccaagtcagccttctcctttacatgaatacagattaaggaaaaccctcatttatgatttttatttaaacaacaactgtgaaagttaaaatccttcacatcactaaaacaatattcctcaagtacattttcaccatgctatagcattggcaggacaattcattgaacttaaataatgcagcatgatattattaaaagactgtaacttattttgaagtttaaagctgtaacttcatcctgtatatgtgcctgacaggtgggtcgaacctatcagacttaccctaaaccctgttcttgacaaagtagcaactgtaagtgtttattgccaaatcatgaatcacatcctatgtttttcagtaaccgattggagatttgggatatattatggccacatgccacatttgtgttaatcacttcattttctgattcagttattatggggtttggttggtatggccatatgggctatgaactagagaatgaagaataaataactagaatcattatcattctattgggcagaagttcgtattactattttgcacttgtttgtgttgtttttaagttcaatgctctgctcagaactcactatgatggtaaacaattattgtagttagatataactgcaatatgctaaaaggtaaaagagttcaagcatgaaattgttatggtcgtctcaggcatgtctcatctaattatgggaaaaaaatgactcactaatttgtgatatgttaatttgcactgatcattttatgggaaggtactgattctcttatgttagatttgaaaccctgggtcagcctttgcctttacatgactacagattgaggcaaaatctcatttatgatttttaagtatacaaaaactaggatatttaaaatcttgcacatcactaaaacaatattcctcaagtaaaagtaaattttcaccttgctacaacattagcaggacaattcattgaacttcaacaatacaacatgattttatataaaaaaaactgtaaacttccttttgacattgaaagttgtaacttgatcccatatgtgtgtgtgacaggtgtgtccaacctatcaaacataccctaaaccctgttcttgacaaagtagcaacttttgataacatcatcaactgtttttgtagttttctgaattgtccagctaatgctataacaagccgataattgacaatatagttgtgttcttttgcgaaattttactcatattcctctaattctagctgtcattccaaccagtaggaattcagctccatgtacatggatgagttgattgaatgatcaatttacagcaatcctttttcataattaatgcttgcagatatacacctggtgtttatccgcttccaaatgagaaagattctgcaaacttctataagatagcttcgaaacgtctttctgaagcaggatataaccattatgaaatcagtagctattgcaagactgggtatgagtgcaagcacaatgtaacatattggcaaaaccggtcattctatgcatttggtcttggatccgctagctacatcaatggtatcaggttctccaggcccagaagaatgaaggaatatgcagagtgggttcagaaattggaaaatggagtgtggagccatgagtctggcaattctgggataaaggacatggcaatggacgtggtgatgctatcactgagaacagcatggggcctagatgtgcaaagtttcagtaaaaccttcggaaggagtctgacagagtcattgtgcaacacatttaggccttttgtggagagtgggcttgtaattgccatggatatggaacggcgagctttgcaaccaagtgaatttgagttggacttgcaacatgatggtgagaatggaagcagagttgccttcatccgtctgagtgacccagatggttttttgttgtccaatgagttgatttcacttgcatttggaattatttcaccataacaaggctacactttctttacatcggtatcgatctttttcattttattactttcatctgaccatactggtaactatctagtctgatcttagttttccaggtagatattagctaatcgctaaaatgcttagcatttctgttcaagtcagtgcaaactgaaactcatattggttgagagagaactgttacaccatttgcataaatgcaaatagatggttatctagtatgttcttattttgtttaactatatccatgactccatatcactcctcccttcgtgtatatatttctctgcattctcttattatcagttcatttcatacatatgagttaaatctagtagattgttgctatttgtttatttatttttgttcatacaagcatacaacaagtttactgtttgctttttgtatggcagttttgggtgcattggataaactattgacgatgaattaatttttgttttcttagggatgattgtttcagtacttggttatagtttttaggatttattttcctggtgtagatggaaaaatatttggggcaacaattttttgaactgaactgaattgagagcttcagttgtatctcttgatttcgtagtatttttccaggcctactatgtacgttaaatctaagcatttattgaaattggcagtgcatgctcctaaacatttttgtgcttttgatgtgtctgtcactattcaatagtttcgactactgcctcatgaatctcagttcatagacctaattctgtgtgctacttgtgctaagtatttttttttaaaatgatcacctttgaatgaaatgttgtgtctgtgctgatagtttgtgctagatttaaatggcaaatttcaaatactgttttaaattgtcatttggcaagctagttttcactcattgtgcctcatcacgaggagaagtcctcatgttcctctaagttatcgctcaatcctttctttacccctaagtatatcatgattttatacttaacaaaatatcatgattttgtacttacccgttttattagtcgactattagaatttttttagaatttaccatactgcccctctccataacaagaaatgctagcttcaacaaaaccataatccttcaaataaaaatattatcagttatgcaaaaaatcaaggggcataattttagtatttgttttgcctcatatgaaaccgatatctgattttttttaatcaacattatggaaaattgaagaaattactgacggaggtgatgttacacaaatcaccagatgttcagatattttcacctagaatatgaaaaacaaaatcagttttttatttctcagtgaattcgaaccaaatttgtttcccttaaaatttggttgatatcgataataaagttctaatcttgattttaaagtttgtttgaattttggaatctggtgatttgggtaatttcacttaaaaacacatcaactgaatcattttgttgtgaaggttttagttttcgaggaaatcttatcaattattattacaacatagggcaatataggcatttttataaagtctactggtctatgaacaggatggataggtgaagggtaaaaagagagactcatgatatatagagaatgagccaaactcagaagaataaatgaaaggaagcgagtaaaagatcgaagggtagtgtagatgccacatattgacggcaagttcaactcctcatgagctagagttcaagcttgggtctgatcaagatagccaccattaaactcaagctgcagcaggtgctgctgctgcagatggcttggtaagtggcaacgctactgtgctatctgcctgagctgctggcagcattgctggggcatgagtcatagggcgggttggtgtttgagtgactttaaggttaatcatttgaagaacgtcaaggtggcagtgcaagtgcactattcataaacgctaatatcttgcacggcaaatctgatgttttgcaaagcttgataactgttatgagctataattcaccctgagctttgcatgtcaaatattgataaagctagttaattggattatatccttttttggaactaaatttttaatgttgagtaagttgttgccttcactatgctttggatgcgaagtattgttttgacataagctttctaagttttaacactgaagttgccattcactttacacgtcaatgattgttttggagctcaattattagttgataatcttgtccgagtttctgctgatgggagccggggaggaatagccacattttgggatgatgaagccctccaacaaagcgatcttgatatcagaaccttctccctctcaatctgtctcactcagaagtcctcaaatacgaccttcctcctcaccaatgtttacggcccgatggaagatgcaactctgatgcagacatgctcttctcaaaccacaacctccaagcactctcttcatcatgctccagacatgctcttctcgaaccactgccccctgttgctctcaccaacaaagcagctcctgcgcaagccaactttcaggtttgagaatttctggccaagactattgggcttcctcgaagttgtccaaacggcctggtcccagccggttagcgcttcacacccggtcaagcgcctgagcacaaagctaaaaatgatggccaaggcactaagatcctggagtaaccgcattctaagtgacagtcgtgtccaatttcaccttgtcatcgagcttattctcaaattggacatcgcctaggaaaacataccgctctcacccttggagctctccctcaagaaagatctaaaactgcggatcctcggccttgccgtagttgaaaaggctaggaaaagacaatgttcaaagctaacatggctgaaagagggcaatgcaaataccaagtttttccacctaagagtcaaccaacaacatgggaagaatttcatccacagactccatcacggtaatgccattctggagactcatgaagctaaagagtgagccttgtatgaacatttctccaccatgatggggcattggttacaacgctcttgtaccctgaattggtaagaactccacctcccccaagtgacatcggaagatttagactctcctttctccgaagatgaagtttgggctgctatcaaacaaaagcctattgaaaaagcgcttgggccagatggtttcacaggcacctttttcagaagctactgggagatcatcaatttagacatcatggagctccttgataatttacactcattatcaggggggagttttggaagcataaatagggcaacactgattctcattcccaaaaagaatgacgcatgtacagtgggtgattacagaccaattagcttaattcactcctggcgaagatgctgacaaaaatctggcaatctgcttgtccagacaaatcaacatactgatctcgcaagcctagagtgcattcatcaaaatgagttgcatccaggacaacttcctctacgtctccaacttggcaaagaagatgcacagatccaagaagcccaccctctttttcaagcttgatatcgccaaggccttcaatttggtctcatgggaatacctattaacgctacttgacaagatgaggttcagcgccaaatggcacgactgggtggccctgattctgtcaacctcctcctccagtgtctcactaaacggaattgagggagaaaggatagaccatcctaggggtctaaggtaaggggacgccctatctccgtaccttttcatccttgcaatggaccccctacacagatttctcaagattataaccgtcgagggccacctaagcgagttcgcggaccgcagcgtgcgcttcagatgctccctgtatgctgacgacgcggcaatcttcatcaagccatcatgccaagacgtggacagcctaatctcgatcctgaacagtttcgggggtgccaccggactccaggtcaaccttcaaaaaggctcaatgattccaataagttgtggtgcaattgacctcgatgaagtcctacacaatttcactggtccatgtggaaccttccccatgcaatagctagggatgccactcaaagtaagcagacttcgaaaggtccacctctaatacttaattgaccaaatcaagacatggttaattagttggaagaagaagctcctctcgatcgaacaatcgcctgaacggtttagacattccgtgacaaaaaaatcttacgatagcctttaagaacgtcattcatttatgaccacgtttgagaataatttgaaagattagcttgcgtttattttgcctaggagttaaaaaacacgttagaaaaaaatcacgaaaggaaacgaaatcgtgactaaggagatattgtttctcataacagttcggctagcacgtattgacaaagatttgtctatagaactagctagatttttctcaaggtcctagatgtaagcacaaaaggaaatgtaggaggcagaacataaatgaaaatctcccattgctagctcatagtgcatctaggcccctaatgattttgtggattaataacaatgcgattagagaggactaacaatttaatttaagtcaatgtgaaagattgttagtccgtgacgatttgtagtgcaatgcatatctcgacgaatgtgactaaatcatgagttgcggcaatgagcaaaggttatattgtatattttcatttctttgcgtcattaggaaagccgtactattaagggggatgatgcattcacatatgatgagtgatgtgtgtgctccaaatctatttttgaaagtgtttctcctcagtttctgtattctagaaattttcggacttgtctggaacagatttttggaattttcgaaaatagacataactgaatttcgcttctggaaattttcggagtcgtccaaaattgatttacggaatttccgaaaatgaccgagaagccaaaatcagttctgtaaattttcggacttgtccgatactggtttttggaatttccgaatattgcagtgaaggcaaaagtgtttctgtaaatttttggagttgtctacaatcatattttggaatttccgaaaatgtgtatgcagccaaaaacgcttctagaaattttcggacatgtccgaaagtaatttttggaatttttgaaaatgtctagggggagattttggttctggatattttc

SEQ ID NO: 7785 - DNA, 5398 bp, Oryza sativa
ccacccaatttaccatttaatttttagtttttcatttactttcagcagtaattacattttagtccctatgttttatgtaatttagtggaaacagttcatcagttcttcacattattatgtaatggccctatagaccacttatgttatgtgttaattaacataggtgtttattcaaataccctgtttcactaaatttttttgttgtcttaataacatgccttttgcatattatttcaagacacgctctactttctcgctttattaatttacaaaattctataaattttgtattttgatttagcaaattctcttaattatgtacaacataattaatggaggatttaatgcatgttccacttcacactttgactcggaaattaatcacatgtcaatggagccctatactttggtcatatcgaccataacttaggcagcgagtatcttgcccatcatcaagtggtctacattttgagatgtttacccgatggagtcctacaaattggccgcactagtcataacctaggcagcgagcacctcgcccatctcacagaggtctacatctcacgatgattacccacatgtgttattttccgagaatatgttttgaaaaatgagattatttgaattttggttgagcacaaggtagtggagtcctattcaccagaatatatttgcctggagaccgtgttttaggtagcaagtataacttgcccactattaagagatctactccactgtttaattacttggagattatccacattgtgccacctaatttcgaattctaacttgaattgtcaagtttattaccggcatcttttcgaaacattacaaaatatgaagtcttacatttcgcattgagattacaaccttaatatcatgtttttattaatttacctctgtaaattgataatgttaaccatgattgtagggacatggcaacaaaagagttcaacgaactcgtcctcgatgggactaactattccatctgggcttccgatatcaaaatcaattttgcctctcgagggattttaagtacaattgaggaacctaatgatggggacctgccaattgagcacaggaagctcaatacagccctttttgttttgaggctctacattcacaaggatctcaaacatgaatacatgttagagacgagccctcacaccctttggaaagctctaaaagagcgttatgatcagcaaaaggaactcatttggcctgaggctaattatgagtggattcatttacgcctacaggactttaaaactgtggcagaatacaaccatgctgttcataacatttgctccaggttgaagttttgcgaacaagagccaacagaggcagagaagatagagaaaactctatcaactatgcttccagaggacaagatactgactcaacagtatcgcgctaacaatttccaaaaacattctctgcttatacatacattgactcaggcagaaagacaccatgagctttctttaaagaatgcccaacagcaccccccgggctctgctccactgcctgaagtgcacttcaatgtacagaataatgctgagaataagaaaggattcaagggaaattcttccaataatcctaagaatctgactggaaagcgcaaacgcaacaacaacaggcgcaaattcaagggtcgaaagaaaggaaaagggaaggataaggcaccacaacctcgtagcaatgttaacaagcattgcaacaggtgtggatctgacactcatgtcgctaaagactgccgcatcccgaaatatcttgttctattgtaccaaaaatcccttaaggacaaaaaaatcttctgagaacccaagatttgaagcccacttcaatcttacacatgaagagtgccctgaggttgcaagttctcactaggctcctgttgaaccggagagcaacctcaatgttctcccagaagatgtcgctccactctctgcgatggacgatatgttcatcgaatactgctcaacagacccacttagagatttactgtaatctcagtgcgtcccacttagagataaagctgctttaatctcagtgtgtttgagacattatattgatatcctatagtttgtcaaaacaatattggttgtaataagtagataagtactaacttccttatattataaggttataagacttgctagtcattagagtatgtactattaacctatgtaaacgtcatactatgtatttgatgttttcattattatatgtatgtatatattgtggataaagaattcttcactaagcaattcttctttcactatagatgtctaaggatatcactccgattggagaggaattatgtcttgtggacagtggtaccacaaactctatacttagggagatcaaatagtttcaaactctcaaaaagagagaaagcaaagttttgactatcgctgggtgcgatactgtaatagttggctcgggacaagcaactattacactcccaatgggtacacaaattacaatcgaggatgctttattgtatcctgattcaacccgtaccctactaagttatagagatatccgtcaaaatgggtttaacatagaaacccatatggataatcgagaagaattacttctcttaaccaatcaaaacggatatggcaaacgcatttgcgagaaaattccatctctcacatcgggattgtactatacatacattaagcccattgcacatgttgcgtacaaagtaatttttcaaaatgttgatgcattccacatttggcatgatcgacttgggaacctcgatatcgggatgatgagaaaaattattggcaactttattggtcatcatttgatcactgataaatttctcaaatcctctgatttcgtatgcactgcatgtgctactgggaaactgattttgagaccatcttatctcaaaattagagccgaaccacttaaattccttgaacgcattcaaggagatatctgtggccctattgtgccaagatctggaccgttcaggtactttatggttttgattgacgcatctactagatggtctcatatgtgtcttctatcgacacgaaaccatgcctttgccaaactaatgtctcaaattataaggctgaaagcaaattaccttgaacataggattcaatcaatccgtatggacaacgctgccgaatttacatctcatgctttcaatgattattgtatggcattgggaattcaggttcagcactctgttccatatgtccacacacaaaatggttttgctgaatcattgatcaaaagaattaagcttattgcccgaccattattgatgaattgcaaattaccttcgtcgtgttggggttatgcggttctgcacgctgctgaccatgtccaactacgactaactgcatatcatgaaacttccccaatgcagttagtacgtggaaatcctccaagtacttcccatttgcgtaagttcggatgtgctgtatacataccgatctcaccaccacagcgtactgctatgggcccacacaggaaagtggggatctatgtgggattcaaatctccgtcgatcataaagtatttagaacccttaacaggtgatctatttactgcccggttcgttgactctatctttgatgaggaacatttcccggcattagggggagacttcaagtaccagaaagaatgtcaggaaattgattgggatgcccagggtattctagccccagacccacgtactactgaaattgaacttcaagttcagaaaattatacatttgcaaaggcatgcaaataacctgccaaatgcatttaccaattataaaggtgtgactaaatctttcattcccgctcaaataaaaccactcaacttccactcactaaaaagagaggaagaagtatggccactcagcgagaaacaattgctaataagcaaagaaagacggtaaatgcaaaccaacctttagttggtacacaccaaattgatactgtatatcaagcagatcgtgatagtctgcaacctagctcggtggttgttgacggtcgttatcgatcaatttcaaccgtcaaaattaccaaaatagaggagaactagtgatgcttgcaatgcgtatgtttgttagaataataatattctactagtattaggtctactaaccttttgctgagaatgacaataaagtggaggaaaatcgacatcaacacaaacgataaatcaatcggacgatgtcgagaaccagacttatgtatgaatgggccaagaactcagaattgacacgatgaattgggccaaaattcacaagtctgtggagtgaagcaatagaggaagtcgccagccgaagatgggctggtttgggctagcccatggttcggccgaacccccatctccaccgttgaggccagggtttggcatggacgtccaagattacaccccaatgacggttggagggtacttcggacaattccccttccacaaccgtcatacctacctctatataaggagctcactctcttcactttaacacacacctcaagcaagagctctctcattcctctcaagtttagtttagtagtatctagctagtggaatagaattagaataggaatcaggagtccggaagccttcggaagagtttgggtatggctctagtagcttttctttcctcttttgtaagctttatacttttattagaatacttttctaaatacatttctggtattgaaatactttccgagtatatgagtaccaactttacattatgttcatgttatactgaatatactgctagcttatctgggagatgctttggttcgggtatagtgtttgcttatgcaattactctatgtcatgacgatgatattagagtagtatctggtagtttagacgtggtgtctagattacaggatatcattatttggggttatatattgcggatgagaggtgggtcgctgatggtgacagctcaatacgggtattcctccgcgcctatatataattctaagttaatttcctggggagggtattcctccgtatttagccccggttggatggtcatgacgggctatcataaggaactcggcagtcaggggtggcttctcgaagtaccaggagggcatcggatagagggtattagctagtatatcagttaactagaatgtatgtatatatgtatattagaagttaggaatagattttctttctcttttctttccacctagcttagattatttattatgaggatgagtagtaatgcttgtgtgtcactctactcttggattatcttaacccctgcttagaatatgattatcacaagtaatatataaattactagttgagttctctctacatgatcttcccacgggataaaataaatacgatacccttggaatactctcaggtgaaatgctacaatggtatatccgtgcgcttg

SEQ ID NO: 7786 - DNA, 11550 bp, Oryza sativa
tcctgcagcccggggaagcgagccgagcacaggaggagtggggaacggcggcggaaatggcggccggcagccatggaaagcggccggagttggcgcgtccattcccggcgattggggacgccattcaagggggaattaagggggaaagagagaggagggaaaggggattaattccccctaatcaattttggaattcccggtttgaatcgcgcggatttgagggaggaaatggctagggttcacggaggagagaggaggaggccgggcgggaggaggaagacgacctggcacgtgggccccacgcgggcgcgcggtcagcgcgcgcacgtgcgcggcacgggcgggagggcgcccctcggcttgggcccggaggcggcccaggaggagaggagggagaggcagcccgggagggagagggaggaggagggagtgggccgggagggggagggaaaaagaaagggaggagggaaggacttccgccgcgggccgggggagagagagggaggctttgggctagacttggcccaaaggaaaggaggattatttttaggttttctttttattaaactttgataattttttttgttgcttaataaatatttccggtgctctgaaaattcaagtaaaatttgagggctcattttagaccaaggagaatttaacaaaaattctccgggccatattcgaatttttcttgtacgtattttagtgtttgccaatttcttttcgaattttaatttattctattattccttttagggaatgatttttatttcgggatgaatttatcaggacatgacaaatccaccccccttacaagaatctcgtccccgagattcgaggtggctagcaagaagataggttgcgcggtcttctcttcttgtctgacttcttccgtcgcgtcttctataacaaacttgcctagcaaaacttctccactctggactgcttggctcgatctcctgttatagatggaatcttctcttcacctgacttttccctggttgcacctctagctgacttcgactgggctgcggcattggaagatggggcttcagttccagaacttcttataactcatatctttggagtcaacctcatacaagttaccacttcatgtcatgcgtcaacactagcttgtcattactaggataccatgtttgccatcataagaatatcatacttgtcatttacttctaacttgccaccaactacctcatattagctttcctggtctccaggtgctagctacttctgctatttgatgcaagggtcaataactttgcctttgaattatgtttctcaacagaaccaacttatcccactattatcttcatgttgtcattatttagcattcaacgtattcctttacaccttcgaccttgatgagttccttcccattggatcatctcccaagacatggcattgcctggtaaccggtgcttgcacttttcactccgtgtagcatctgataccgagttaaagatttcattccttgccttcaaagaaacacttttacctaggtcgtattgcttactcacgatttttttttctacctcaatgacaaggtgactgttgcagggtgattgctatcaggagtcttccttgagtgatgcagagcatgtttctgtttatcctttatcaatcatctttcggcctacttccttcctgctagagaacatatttgccaatatcttttatcaatcatctttcggcctatctctaacaggtggtactctttaatgtgggttgcggacacttctggtggcaatgaggtcctttggcctactgcctttcagtgaaaccttgaagtagttcatcaaaagctgtactgactgtcgttgcctttgatccgaaaaagacaaatctgaaactcttagtccaaacaaatgtctctctggttactcgcttgattttcttttccatcagcaggttggttattaactcgaggttagaacatggttcctctgaaatgagaccctaggtctcctttgacagtaaacacataatcccatatcagcatcttccgaaagagtcctcatagaacttgtttttgttacacatttctcccttattacatgaatacaaggccctaccttaaacaaaaagggaaggtgcttaacatcggtacattgcatcctcaacatgaatcatccataaacatagcaaactcactgtttataaacatgaatatatttatttattacatgattgctgcaaactcccgattacagtgataagtagcgaactgaaaatcacaaacatggatactcattctgattctggagagatatagctggcattgttctagtgactgcatccttgattggttctgtgatgatgtgataggactgcatattgctatcattcacaggagaagcttccttctgattgctgtttgaagcggatgacggtcttctgcttggtatcgccctccggaggttgattgccctttgctcggcctggagtaggtcggggagagacacaacttcttccatcgacgacaattctttgctgaggctgtcggtgcagagaatggttggtgctgaaggtattattgctatgatttattgcagagttaggtggagcaggaggaacattggtgctatggatgatatcgtcgatgttgctgttggagctgactagctgatgagacaatcgtagggttgttcgttggatttctacggtcttggtcaacaacacactgagttggcaatccttgggcacatggtttgtaccttcgcacagaaaacatgtcatcttgcgggtgggacactcccctggtggatggtcttcttcacaatgagggcagagtgtgagacacatgctagcaacgtgtccaatttctccacaacaggtgcatgcctttgattccatctcttcctcgccgagatgtcggggagactcatcttcatcatccgaggagacttgatctgacccttcactatcagatactctgccaccatggcttaggaggtgctgggtcaactgtcgtgcacctcgaaaggtatttcctctttgacgtctaggaatagttatccctactggaggccattcggtgttggtaatagtcatcttacgtacttcttcttcagttcgcatcggtgcttttctcttctgattcttactcttcttgcctttggcttgcttagtatgtgaccccacgtggtacgaaaggctaggaggaaagcatttcccgggattcaatggattctctccattgggctctctactttgcacactaggctgcaagcttgacttggtgcgaggaggctggtttagcgatgtctgccctgctaaaccaaaggaagaggcttgtttggcatatacccatggacaattcagggcatagtgtccttgttctctacaatcatgacaaaaggggacatgctcttctggcattggaagctcattgacctgggtggcaaatgctcgatcaaacacatactgattttggtcttgacttccaaccaatggtagctgtgaactcagcagcatgcttggaatggaccaagggtgtgcccttgttaactctcttgaggacagtggtggattgagttgaaaacttgagttagttgaggcatacccgctgacattctttcctttttctctgttaaacatctgttacagggattgaggtgagagaggaaacaagccaggaaagaatagaccagaactagagacaggaccttaaaggaactaactcttcttgttgatgtgttgtttgtttcacttattctgcaagttgattaagcaaacaacctagcatggttacatcacaacccaccgatgcaaaccacgcgctacacacacaagcaaggaaacacacgacaaacgagtctgccctagagggtggcttgggttctgcgacgggttctctaagatcttcactgcttcttcacagctagcttcactgcttcctccacttcgctagcggatcctgcagtcttccggagcttcggcagacaattgacgatatcttcttctccgcaaagctgaccatctagtactagttgaaatttgaagaaggaagaaagagtaaacattttgcaaatagcacaggggaaaggaggaaaaaggaactttcgcaaatagtttcatttataaaatatgtccttaggtattatccacttggcttatcctacagacgagatggctctgataccagcttgtcgcgaccgagaaaaatacattttcccgaacgctagtgtattaatccccgtcccagaaaaagccggggtacaccacacaaacatgatataaaagacacatctttattatatcgataatatttacattattacaaaggcacttaaggcctgacaataaaaaaataaccagcagcggactagcgggcctacggctgcatcttcacaggcgctcaactggggtataagccaggactccacctaagacttcttctccaaagcttctcttactgaagggggggggggaagattgagcaagaatgagtacaaccacagtactcagcaagccacaccggcagatgcatgattaatgcaagagggtacaaggggtaataatataggggttaagttttgtagaaaacagcatttaaaagtcacttagttacccaaagccattttataaagacgatcctagagttacacagtgttattaatcaaggccgtgaaccctcacgaacctgccttaacccaaggcctacgatgattcagaccgaactggcaacccgaccctgggtcccagctcgtcccaagccaacccaggccaaccattccacattttagttgttaagcacattttaagaattaaaacactaacttgggtacattgctaggcttgcccataaccgagggcgcggctattcgaataggttatactctgatcagaggtgtacatctttacccacaagatacatcttcctcacgtgtaaccacgtgccacataccaccacggtatacggacggaagacgtgacatagttcccaacccatcctagccataaacaagagtaccgacccaaccccacctacggccggaacctctgggacaggcaggcaggattgagcccctagcagcaggacaccagccctgtgccatgacatctcgactaccgggccacagctcgtgtagccttcatttgtcctagagatgtccatcgacccccgacttcgtccatctccatccgtgtacttttgtttataaccagactgagccacaaactaagccttacccgctagacatgtggaagtacggtagtgctttgcaacagaggcctgagcttaatccttatagtacccgaggaacgactaacaaaacccaaccacgcacctcgagcccagcctaaaaccattttgggggttttgaatagagggggaggtgtgtgtccaattccaacataagccaaccattccatagtgtccaaatgatatgagaattcccaaagtctaaagttataaaaccacctaaagttgcctaattaatcagcgaagcatctacctaaattcatactagtggaaccatgaatagagtacccactagttggggttttgtttatcctagggtgaacaagctaataataacaatagcaataataataaggtcataacaaaggtaaataggcatggctaaataaaacagtgataacgcgggaatttaaataaagcgataatgcaataatttaaatcaaaataattttataaactgggattcaatatgttcaaggatgatgtgacttgccttgctcagagataacggccttccgaaccttcggcgacgaccgcaaaccacgcttcgggaacctccggaacgacgaagactacgcgaagcacacaagcaaagctacaagcctataaagaagcaataacaatacataaaaagaaagcacagggttctttaggttataagaaacattaggagacttgaacggatcgattcggagctcgtatgaccaagatatgatcatccgaagtttaatgctgttacatggagatttgcggattattataattaggttttgcaactataaaacatgtgtaagcgctagcctggaaaagacaggaaggctgtgccgttgacatgcggaccccacatgtcaacctaaaggaccacggtagaccgagtacacagagacggtccacgggtcgacagaagcagatcccgtgtgtcaactgaggcgagtggccgacaaacggactccactagacaccacacgggctgcacacgtggaaaccacgcggctaccgagcgggcacactaacacggtcaccacacgcacaagcgaacgactaccgacaccggtacacgggtaccggggtcgacaaccgcacaacgggcacgggcaacaccgaaaggacgaggacggggcagcgaaggagagatccttaccaccacgcgacgaggcgagggaacgacaacgacgaacgggcgcggcggagacggccaggaatgacggagatgaaaggcgaggggacgacttcggcggcgatccttggacgaaggcgagacgcggccggcgcaacgcttggcgacgcggaggcaaggacgaagacgacgacggggctgcagaggcacacttgacggacgcggacgacagacgagaatggcttgacggagggacgaacgccacgacaaccaggaatgacgagaggacgacgacaggaaccggcgaggaggtgatgagggcagacggcagcagctgcacagagacgaggacggcgcggaacacgccggtacgatgacgacgagggtggcggcgcagcgagacgacgagccggcgaggactaacgaccgaccggaggagtcgtcaacgaggatgaacggagacgacgacgatggagcgcggaggggttcggtcgaaggggaggcgaggccgagggcgaccttgccgctgcgatgccggaggtggagacggcgacgtcggccggtgcactggcacggcgaaaggggctgccggagtgggtgccgacgagaccgagggagaggcggcgcgcgcaacggcgttccgacgaaatacgggcgacgccgtggcttggccggggaagaggatggcgttccggtgccgggagaggtggtggcgacgtcggccggcgcacaggggacgcggcagaggcggctggaggcggaacagtggtggcaacgccactgttgccggcggggatgcacttccggaggtcttcgcgggaaacagagggcaggccggcgaagaggaggcggctgcgacgctggaggaggcgacggcacggccggccggcgtgctaacgcggcggcaggggcggctgaagacggccggtggcacgggagagaggggacgacggcggggaggtggctagggaccacgggagatcgcgggagggggctaaaacgatagaacggagcgaggggattccgttttatagcggagggaagcgagctgagcacgggaggagcggggaacggcggcggaaatggcggccggcgaccatggaaagcggccggagttggcgcgtccgttcccggcgattgggggcgccattcaagggggaattgagggggaaagagagacgagggaaaggggattaattccccctaatcaattttggaattcccggtttgaatcgcgcggatttgagggaggaaatggctagggttcacggaggagagaggaggaggctgggcgggaggaggacaacgacctggcgcgtgggccccacgcgggcgcgcggtcagcgctcgcacgtgcgcggcacgggcgggagggcgcctctcggcttgggcccggaggcggcccaggaggagaggagggagaggcagcccgggagggagagggaggaggagggagtgggccaggagggggagggaaaaagaaagggaggagggaaggacttcggccgcgggccgggggagagagagggaggctttgggctagacttggcccaaaggaaaaggaggattatttttaggttttctttttattaaactttgataattgtttttgttgcttaataaatatttccggtgctctgaaaattcaagtaaaatttgagggctcattttagagcaaggagaatttaacaaaaattctccgggccacattcgaatttttcttgtacgtattttagtgtttgccaatttcttttcgaattttaatttattctattattccttttagggaatgatttttatttcgggatgaatttatcaggacgtgacagtgacatggattgctgtccttttcaaactaattttgttatgtattgtaagctattgttttacaaatgcactttacatgtcaagggcgcgtggaactttaatgatatatctagacatatatttgtatgtgtaaagtgagttatgacaaatatattagttatcaataactgcatacgttcaaatgagatatgtagtaaagtgcctttacgacaatatgtctaatactacaacagtttagacattccgtgacaaaaatcttatgatagcctttaagaacgtcatcaattttatgaccactttggtgaaaaatctgaaagattagcttgcgtttattttgcagaggagttaaaaaaacacgttagaaacaaaaaatcacgaaagggaacgaaatcgtgacttaggaggcattgcttctcacaacagttcggctagcacgtattggcaacgatttgcctatagaactagctagatttttctcacggtactagatgtaagaacgaaaggacatttaggaggcagaacataagtgaaaatagccccttgctagcatcaaaccatggtccgattgtatcacagcggtcatcaacgataccagtaaagaacaaaatgcctacctattcactctcaggatagagcaacagctatattttgtgactttaggttaaaacaaatgaaactgatatgcatgggaattaacgtggactattaagcatatatgaattttattgaggcaataatgcttaatgtttttaacttataaattgatatttccgcgaccaggccttcaaatatgaaaattttaacttcaagttacgcggagcgtcttgtttcggtgacaagataagattgaattaacattgatatggcaaatggttcaatcgatacttacattttgaaaagtggatttataaccgcttgtcgaaacaagatttcggtaatactaaaagggggtggctatcaagctgcaaaagtggatgggtttaaagacaaggaattttatacaggttcaggccttcttaatcaagaagtaataccctactcctgtccgaggattgatccgccgagtatattattgatcgtgtgatctgggaaaaaaatcgtgcccctagaggcacccggacccctccttatataggggaaggggtccgtattacaaactacagtccatatccctaacggaatatgtagttacagataaaatacaatcgtaaccgactaggatctctgatatttccttgacatacaagtttagaatttaacccgagtccttctaaagatattctatctacacgtggcaccccattcccagtcggactatacatgccgtgtaggtagggggtatccataatctccacagtagcccctgagacctttacagtcgacgaaatagccttctgtcggagcgcaaaatgataatccaagtgcttcactttcttctgcattgatctccagagtaccaaaatcaaagactgtgaagggctaaaaataaataattaggtgcatcgaatagataaacctaattaggtgtagcccccgactaggtgagtagctaaaggctaaacacatagtcaaagtgcaaataacatccatccgagtggttttacaaccgaatcatccaaaatattatacaactaagcatatgcgacgtttaataaaacatccagccgactactttagctttaatataccaaaaatggaaatataaagaggcccgagtaaaaaatactctaaaggtccataaatcagcacatatgacaagaatctgagtaaaaactctcaaagatccatcaaatgtggtataaatatggcagcacggcaattaatgagtcgaaatagcctaggctatgactcatgccataatcaaaataagcatataacatgctgagagaatgactgttcaaaaaccaatcatctcaacgaaacccaaacagcctttgcagcctaaaaagacttacaagaagaagtataacacctttctgtcgggtacctttttatttgcatcgtagtaattccaaggaattatctaactgcatcaaaaaggattttaacagcattgggccatactattgtgagcgaaaattgccgaagcaaaaatgcctaagtccttacggatcacaacttagccacgccgataacaaaagggggttgaagtactgttttaggcccaggcccattagtactcccgataccctaataacaccaaaaaaccaaacgccgtttcgttttccccaccgaaactttcgccattttccccattcctcgctacagtgccaaaccactccggcggaactagggttctccgattcgctcaaatcccccttccaaaactccacagaaaccatccgcgcatccaccgcatcaatcccccatccatccccagccatttcgaaagcaaattgcatcatccaattcacatccatggtagaggagagagaaagcttcgagagccaatgggcgccctccgacgtcacggtggaaagcttgaaggaaatggtagcacatggtgttcttccagcgaaggagatcattggatggcgttcggcgtacgacgaagcattcccgaccccggacacacacgaggtcatggtgttctcctatttcttttacggtgggttctctcttccaacctcaagattcttccggtggattttggatttctatgggattagtttgcatcacctaaacccgaattccatagttcatattgccaacttcatacatgcctgcgaagcttttatgggcgtcaggccacattttgccctattctgctatatcttcttcctcaaaccccaaccgaacaagagcaagccatgcgtagttgggggtgctggatttcaactgaggggaactctgagccaaaagtatttgtccatgcccttcaaaacttcaaacaaaggctggcatgcaaattggttctatgtacaaaaccccgagcctgcactccccgagtactcctgtcttcctccagtttatcaggacacttggaactcacttctaatgggaaaggaagccgctcaggcgcttgccctgatggactgtatgctgaaactaaaggagcaaggtctgcaaggagaacagatcacccggcactttatcaagagctgactggccccaatcaaagaaagatctcgcacggcctttgaattcgacggcaagcatgaccctaaccgtgaagatcctgaatctcttgaatttaaggttatgaaggagagaatgtataaactcttctcaaatgcagtcgtagttagctattcacacttgctccagtggtgccatacaatgccttcaacccccctccagcggtatgcatttcaaatttcagcctttctcgaaagcatgcttttatcatctacaaagttgattgaaaacgtgaatcatc

SEQ ID NO: 7787 - DNA, 15790 bp, Oryza sativa
  unsure (1)..(15790): unsure at all n locations
cagttccacgcgcgcctcctcacctcgggccacctcggcgcccacccgggcctccgcgcccgcttcctcgacgcgcctcgcgctctcgccgcaccccgccgcgctcccccacgcgctgctcctcctccgctccctccctaccccggccaccaacgacctcaacgccgcgctcagggggctcgccgcctcgccgcacccggcccgctcgctcctcctcctcgcgggccgcctcctccccgccctgctccctcgccccgacgcgctctcgctctccttcgcgctcaaggcgtccgcccgctgctccgacgcgcacaccacggtgcagctccacgcgctcgtcctccgcctcggcgtcgccgccgacgtccggctgctaaccacgctgcttgactcgtacgccaagtgtggagatctcgcgtccgcgcggaaggtgtttgatgaaatgaccgtgcgggacgtggccacatggaactcgctgctggcggggctagcgcaaggcacggagcctaaccttgctctcgcgctgttccacaggctggctaacagcttccaggagttgccgtcgagggaggaacccaatgaggtgactattgttgcggcgctttccgcgtgtgcgcagattggcttgttaaaagatgggatgtatgtgcacgagtttgctaaaagatttggactggatcgcaatgttcgggtctgcaattcactaattgacatgtactccaagtgtggctcgctgtcaagggccctggatgtgttccattccatcaagccggaagaccagacgcttgtgtcctacaatgctgcaattcaggcacattccatgcatgggcatgggggtgatgcactgagattgtttgatgaaatgcccacacgcattgagccagatggagtgacttaccttgctgtgttgtgcgggtgcaaccattctggccttgtggatgatgggctcagggtattcaactcgatgcgagttgctccaaatatgaagcactatggaacaattgtggaccttcttggccgtgcaggccgtctcactgaggcatatgacaccgtcatttctatgccatttccagctgatattgtcctttggcagacattgttgggtgcagccaagatgcatggggttgttgagcttgcggagttggctgccaataaacttgctgagcttggttctaatgtcgatggtgactatgtgctcctatcgaatgtttatgcatccaaggctcggtggatggatgttggtcgagtacgtgataccatgcgaagcaacgatgtgcgaaaagttcctggcttcagctacacagaaatagatggagtaatgcataagtttattaatggtgacaaagagcacccgaggtggcaagagatatacagagcactggaggacattgtatcaagaattagtgagctaggatatgagccagagacaagcaatgtactgcatgacattggggaggaggaaaaacagtatgcattgtgttatcatagtgagaagctggccattgcatttgggttgattgcaacaccacctggggagactcttcgggtgatcaaaaatctccgaatatgtggggactgtcatgtggtggcaaagctcatctctaaagcttatggtcgtgttattgtcattcgggacagggcgagattccatcgatttgaagatgggcagtgttcctgcagggattactggtaaatagtggcatgctggatcatttaaaggataaatttggcatgagctcgtggagatgaggtcaaaaaggatgatataacatgtctctgatccagcatatcgatttgtatggatactggaacatattcttgaaccatgcatatcacttctgacacttcacacaatgggtcaaacatcaaaaggttgttcgagatataatccagggctccaggcttgctgttgcagatacattcaatttagtccccattgaaattaatcttgtaagttagggtgtgggtggtttgaaaatcctccacttagccttcacagagaatgatcttgagaatgaaataccaaatacagtatacacggtttgaggtttccggatggtttctgctgccactggacctcacaaccctacaaaggtttataatcaccaagagtccaggacacaactggatagtcacaatgccgtaggttacaactagcattcagctggtaatggtatggtactaatgaaaaactgacatcaggataggagcatgctatttttcctttcagggagacaacataatttttcatatctacggagcgaagttttccttcaagtctttggttctttgtcccgattccttaatattgtaagttacagtcatggttcagctgttccattccattaatagctgatgatttcattgtcgattttgatgatgcataataagatgcgcctttatatggtttaatctagaatcccttgcaatgatgatactatagtgatgaagtaaacttatcctggattataataaatacaaatttttgccttatctttgtgctatgatcattgatgcatttggcagttttggtcagtaccaacgtggtcgtaaaataatcattgcatgatattttccacacataattttgtttgcagtggagtttgggctatctggttctgtgtgaaattattgggttttcaaaaacatttcattgagcgatgtcatgtagcttcctcacaaggatttgtcacttttgcaacagtggaaggccacgacgcaggtgaaactagcaaaaaaaaaagatggacgagctccgggccttgtttcttgccagactttgtcttctacacgcggcaagagatacaggatgtggacggagaaaaagatgctggacgcgcaggtgaggtctgctcttggttttttaagcaactgcatctatgttaactttgatggtcaaagttagtcatgtctcacttagaacaaatctaaaatgacaataagtttgaaacagagggaatgttttacataatcttacaattaattattacatggtctaaaggaaaaaacacattgaattattgaaaaccaagtgtaagcttaaccggtgttgtaaataatgatcccttagatacaactttcgtttatattgaagccgatttatgcacgggagaatgtttgatgctgccaacattggggccattggtgctgccaacattggggctcttggcactgcacttctctgttatgtaacaccaaaggagcaccttggattgcctaaccgtgatgatgtttagacaggcatgatatcctacaaaattgctgctcatgctgctgatttggcaaagtgccatccgtatgcacaagcatgggacgatacactaagcaaggcaagatttgagtttagatggttggatcaatttgctctgtatctggatcctgtgaccactatgtctttccatgatgaaacattaccatcggagggtgccaaagtagcacatttctgctcaatgtgtggcccaaagtcttgttcgatganannntgtgtggcccaaagtcttgttgatgaaaatcacagaggatattagaaaatatgctgatgaacatggttacaggatagtggaggaagcggtaataccaggaatgaatgctatgagtgctgagtttttggctgcaaggaaaacgatcagtggggagcaacacggtgaagctggaggggagatctatgttccagaaagctatacagctcgcaaataaggttggtctttttcttatgatgtatagttcaacttgtgggagatgtttggactcttttgttctgaatgtgtagggttgtttactcggtatgaagtaattagtcatctgggagtaaaatggtctagtgccatatttcaatcagttttacataaataagccattagtgtgtgcttaccgtcttgaaacagcgtcagcttgttgttggcccaataacttcatacatgctagtactagttatttagcattagtgcaacttgttacaaatatttctgaattatctggactataaataaatactactcgagtactatctaccatttggtaaacattctgctaatccttttatgtcagaattgtttcataaatctatgagaactgttgtaattttgactccacacattctcttcagtgatatttcttaagggaaaattactctcacagcaatcctttgaaatgggtttgcttgtacatttgaaatttgacactaactgtaatagcagtggatagctgctctgtctttatcaacttctacttgtaatttcagggaccttaataaacctttagtggcttggacttattgtgcattactgcaaaggcactaacttttatatcactataacatgttctcggaactcagaatacaatctctgtgcagatcatcttggcgtccatctactccgggtgataaagatttactgactggagcgtttatcagcagcactcaccatcctatgttagggaggtggtaagcagtttatgtgctttgataaagctggtgttgcttagctcagtttctcctaacccatccacttttcgagcttgtatgctactccttttagtattgtcaaaatcttgtttcgacatgaagtgaaaagttgtgtgaaaagatcagtaggatcttgttcgaacctgttggcgatcagcctttgaaccccaaggtgttcgacgaaatacaaaatcaaaagagagcattttgcaccgcgtaagcttgtagcattttctgatgcatttattaacttaaatagctcggcgatcgtgccatcccacgatcgagcgctctcctcgccatgcgccctacgactccatcatgcgcttcccgactgagccgcgcaatcccaaggcagaaagcacatgtccacatgacgcctactaactccgacgcgctcgcacatgaacaagcatgcgtaagagcccatggtacaaacgcacacgatccccagacacagacatcatgtaccatgaagaaacgcagagcagaaatgggtacggcgctaactcaacaggaccatatattaaatgtttagctagcttgcactttgtctgaattcccgaatagcactgcaaaatgaagggcaatcataggtcaggtactatcagaatgcaataaccaagcatacaagtaaagctctgcagattgacagtcctatatacgagaggatgaatcaatacctggcttccagcgcttctggtttccgactatgatcagtggctgctgaatatgatgctcttcagttccacctccctctgtactgccttttagctgctcctcttcatcttcctttaccatttcatcttcatagcgccttagaatttcgagagtaagacagcgagtctggatgctggccacgttcctaatggcatcttccaaagctttcacgtcccttgtagtgggcatcagaacaatcgagaacgacgattagatgctggaggctggaaaggtgcacaaagctctgctcaaacccaagtttggatgctgctttttgtgcaaacaactcaatagaaagcctttggagttttggcatagcgccaggttcaaacaacaaccaatgcaggcgactatgcctgaacatcaactcctttagacagggaaatccaccacagcctacagtgagtccatcctcccagccttgggcgaatattactttaagatagagaagcttgggtatacacccaaggaggttgatatctttctgatcattgcttctagtattatagaagatcacaagataggcaagattagaaagggaaatcatctgctccgaaagttttgatattccaacgccagaagtagaaagctctctgagaccgggagcactactacaacatgaatccatcaatgtatctgaaaacttggttgtaacatgtacatgtaatgattgaaggctatttttacctaactcatcgagagtcatgtaaaaggcgtccttgtacctctcgaaccttgctacatcacctccaaaaggcgtccttatgcgcagataccttagtctggtcagccgacggagctcttgtaaacattttatgctgtactctatgttgtaaaaaagagatagcatctccaaagcttgcaaaaatccaatttcatctggcaatctcattgggtaatcaacaattaggcgctctagtttttgcagtctacaaacacttgacggaatgtttatttcgttgacatgtcctcctccacgaataattagtgtttctagttgctgcagccgtccaatatccttgggcatctcggtaacatttgcaacattgagcttcagatacttcaactggaaaaggtatgttaggctgttaatatgctggctctccaggctcatgcacccatccagaaccaatacccgcagagcatggcatttcttaaattgtggtatttgctccggtttaggactgtcaaagaacagcgaacgaacatgtgagcagttgttcgtaatctccttgactattctattatctgtgccattggatgggaaccaggtcctccgaatcttcttgaaagaactccaatgctgttgttcatgcactattgtgacgaaattctgtccagttgataggctaatgataagatcaagcacaatatcgtggactcggcagcaactggccctaccatcatattggatataaactggttggatcaagcttctatttataagctcattgaagtagttctctcctacttgctcccgtgtttttcccttcgcttcaatgatgaatccttcagctatccatctccatataagttcttgtctatcaattacataatcctctggatacatgctgagatacaacagacaatttttcaggggataaggaagatcataataactgagcatcaaaatttttctcacttcgacgtctgagtttagtgtaacaccaatagaattgtgcacttgcatccactggtcctctgtatcaggtttgattgatagcaagctagctatggagattatagctaatggtaaactacgacatttcgatatgatggcatgagagatgtcttccaggtgaggcgggcagcaactctcagaattaaaagctctccggtaaaataatctctgtgaatcttgctcttctagtggctgcatgctgtgaagatagccttcagatgtggtacggctgcatgcttcagctacggcagtgtttcttgttgttgttatgattatactgcccaaattattctctgggaaagcacaattgaccaccttccacgcacctatgtcccaaatgtcatcaaaaacaatgaggtacctgcgtacaattaaatttatgatccagtcatcatactttcgcaccaatgtggatgaatgaacatacataaaagctagttaccactcatgtagccatagctaaaagactggtattgatcgaagtacagatgtttttgtggctagaatattacaattaagagtgcaaagtgttttattgggtttgttctagttctagatacaacgatatatgtctgtacatttcggatttgctatatatcttgcgacagaaaattgaagttggaaacttccaaatttaatttgtgctgtcagataggcgttaagattcacgattcacgtgtgggggaggaaaagagaatgtatccgcgcatgggatgaggatcgactcatcaaccgaagctagtggttgtgctagatcgtgattttatttgtaatatattagacctatttctgtatttgaagagaaaaaaaatatgtttgaaacctctatttgctgttatgttccacaaaaattagaaaacataaaaatgtgtgtaccttttatctttcaagaatcctcgaagatgactgatgaggttctgctcatcttccgatacatctccattgctcccgagtcctttaagcatatcaaccaagatcttccttatattaggggtacgtgaaatagacacaaaagttatacacttaaaatccccttgtattgtcttgtacacttcattagctagagttgtctttccaagaccacccaaaccaacaatagaaaccactttacgttgctctaatggcttgcctttggtcatgatccacttaatgatcttctcccttggaccatcaatccccacgagcctctccacctcctcatacaatgccggtagacggggatcaatttccaccacacttggctcggagatgaaatcatcgatctgattcctcttgcgacgttgatcctcctccataacccgattcttcagttcttggatacactctgtgatctggtgtttgccccataacttctttatcttgcttcctatcttctgaacaaagttggcattcgcatcgccacaactcaacttgtggatgaagaggtcgatgcaatcctcaatatcataagctagctcgagcatgttgttcctccactccttggtcggcccatcaagcttgtcctccttggtcgacagatgctcaagcaagacactgatgctgctgagctcattcctcaaaaagatgatatccttcttcacacttttgagcagcttgtactctccctcgaccaaggcggaaagcttggttagaagaggattcagcacccctactgaagcactaacaaatgctcctgccatctctgttccactctctgctgtttcatcaaccaaccatgcaacgtccagaaacaataacaagcatgaagtacataacacaaacggctagccaagacaattctccaaaagtgtatatgatgtagatgcacccaccaactgcttgattcgtgctccgcgccacgggaggagacgccgggaaaggagcgacgcacggtggaggtggcaacctgctgggagctgccgccagcagaaggaggcagagccagcctagtcgcctcgcctcgcctctaagcgacttctaggtgggttaatcggaggggaatcggtggcgagatcagcctaactcacttgattctcaccatcacaccggcagtgaggaaggagcccattaatagcttttccattgtgcggtggttgttggagcatcgaggaaggatacgccaggaccgaccgggggaataaaaccgagggaaaagaaggcctttcggtgccgttggtgggacctgcgatttgacgtcacatgctaacgctatggaaattgacatcggaaaccacacgagtacatgaccatgaacatggcctttttactcacatgggcgatgcacccagacttggttggattcattggattcatatatattgttcgttacttttcttactctgtatacagactattcaaattattaaacaagaaatcttttttaaaatgtttctatacaaaagttactttataaatttatattaatccattaaatctttagagtaatacttaattaatcatgctaatgagcagcaccgttttccgttgaaggtgggttcctaaccccacattcctaaagcaaccctagttttgtttcagctttaattgaaagagcacgattaataattagtaaatcagcaaactccctcgattccgaaaattgcgttattctgacttaccacgtataaatacttctcgttcctatctaatataccctactaaaactagtaatgtgcccgtgctaggcgatagttgcatttacattgcttgaaaatgctattggcctatttagatctccagacaaaatttttcaccctgtcacattgaatgttcggacatgcatggagtattaaatataaacaaaaaaaataactaattacacagattgtgtgtaaattgcgagacgaatcttttaagcctaattgctccatgatttgacaatgtggtgctacagtaaaaatttgctaatgacggattaattaggcttaataaattcgtctcgcggtttacatacggaatctgtaatttattttgttattagtctatattaatactttaaatgtgtgcccgtatatccgatgtgacatgccaaaacttttcacctctaaatctaaacacagccttagtacaaaatgtaatatacatagatcacaatacgattataatataaggatctagggcctgtttgttttgtgcctagtgcaccatgccataaaattttgcatgcctcgagcaccaaaatcgatggccggactcaggctaatcacgtctccccatatgtcaatccaggcgggagtgaaagagtcccaggctaggaaccaaacaaagcttagaataagccaggctagtctcaggctggcaaattcttctcaagttagaggtagacacacctattgggtggcatggggcaacctgcctagctacggctcacgtcgcctcacacctcggacccctctcatactttctggtctaggcttaggccacatattatctagtacacaccattggcttagtccattgatcagctattctagcctttcaagcatgacaaaatttttgattgattcatcttctgcagtccacactcgtcacgtcgcgtctttggcatcattcgttcgtattctcactcggtccactaagcctggacacaccgttggtgccgcggtccagggaacgagcttgcaccgtgtgcaggcgcgggcgtgcggctcgatgattgtgcctttgttgcggcatggcagaagtgcgccggcgctatcggcctagccaaacggttgcagcagcagctgcaggcagcattgcaatagaccccaacactagcgctggtgttgttgccttatatgtattgcaattggaatatattgagtgtacactgtttttatgcaatctatctattatattattaaaggaataaaaaaaaggagcctccacgttcgctctcatggtctataaattctcatattaatcgaagaaaaagaaaaggcagagtctatatagaaatacaatttagaaatagttgaaatttggaattaaaaaataatgaatattagaagaggagactagagtctgtatagaaatacaatttagaaatagttgaaattcggaattaaaaaataaggaatattagaagaggacactagagtccatatagaaatacaattaggaaataactaaaattcggaattaaaaataaggaatattagaagtagagtatagagtccatatagaaatacaattaagaaaaaaaatagaaattcggaattaaaaataaggaatattagaagtagattatagagtctatataggaatttaaaactaactaaaattcagaataaacataacaaaattaaaagtagagttttaagtccgtataaaaatacaatttacaaataactaaaattcaaaattaagaaaaacatgggaagaagagtttaaagtcaatataggaatacaatttagaagtaactgaaattcgaaattaaaaattaaagaatattgagagatgaatttagagtctacatagaaatacaattagaaataataaaaattcagaaataaaaataaataatattggaagaagagcctagagtctatatagaaatacaatttacagaaaattcggaattaaaaaaaatatgaaaagacgagtctagagtccatataggaatatatataatttacaaataactaaaatttgatattaaaaataattaataactaacacgtatataaaatacaatatgaatattacacatttgtagtttcgtaaagttattgcaaaatttaaaaatttgatgtcattctaaaaaaattgaataatataatgagaaaacatatatgctattatatgagagaaaatataatgatgcttgccgcgcaatctgtgcgggccaccatgctagttgtaatataaactagaaaggtagcccgcgcatatacgcaggcatcttatttgatgttgcttgaatttttattttggatgttttatgtgtgggttaatttttcttttatgttttatgactctcttataaatttgtttttgtcaataattagtttggggttgctttgaacattacatcagtatattggttatgatactctttgaactacccttgcaacatatgaattctaaactaatattacttgaaccgtgcaatcttaaatttatgagaaaatattgtgtcgcaataatagagttgattactattagactatcatttgtactatgtgtgtatcttttttgaatatttagcatatcttattttatagaactttcggttacaaaatttcttttatagtacagattatttgtagattttaggatatatttacttacatttacttctacgcccttctttctttcacatcccatcttctttttgaaaaaaacaatttatctgaaataagtatgtgtggagcatttgtaattggtcagtcaccgcggactaaagtataattttgtttggttaattcttttttttacatcgtatattttcattgcattgattctgatatataagcttcgtatgatttatgttccctaatttaccaaactgagtatgaaacacccatgtaccatttgtttttaataggaattaaagagaaaaaattacaagccctatactccgaatactttaggttattcccatactgtcctaactgctgaataaaatggaccccacattttgagcttgttcatatgatgatataatccatatcactaatttttcatgatttttcataattctcgattgccatgcaaagcaccaatatgacttgctacttttggacattgtagatttaatttaatggtgcatatttatgaaccaataatggatatatagtgatatacctatatactgttctttttcaaacttctcaataatgtttgtaacatacctgtgtacgtccacgtatagagcctgggtggagttgagtttgggaggttaatttttttcctttaagacagatctgatggttgtaaataatagatccattttacttttatcattgtagagttaatttaatttaattattgtgaagttatatgaaagatgataaaatctatatcattaattgtttataatctttataacagtttaaatactatgcaaaagtcagaaaatataacaaaaaatggcatatttcttttcgaagtgaatatggatatttaacactaaatttaaaaagttacatgtatggtttagatgttacagttgtttaattttgtaacacaaattttctaacttaaaatagcttgaaaataggagaaaaagataatgaaaggattgagggagaggggagtacgtactattgtgaatagaattgatttagcgagagagagaattgaacacaagaatgtagagggaatgaatgagcggatttctttattgatcaatgcggtacaatttatagatggggaaggggtggcaaccggagacgcgatggttgggaaccatcgcgtccgttgccaaggagcgcctagggaagaggcgcggttgccttcggttgtgatccatccttttatatggatgagatcaccctgttgtttcataacactccccgtaaagataatcatagaaataattatagttaaatacatcacgtaaaactcctcgaaaacccagtgggaaaaataaggagagaaccgtgatatattattgactatttttagatctctatgagtaaagctcatagtatgatccaaaatagtataatgtctacggttatcatttagtaaaaactctagtggggaaaagccaaatgataagacatataatcttatgttgatattacctcgttaaaaactttggatgagaaaacctaaagggtaaaactcatacaaagggaaaagagtataatatgacgaaaataggttattttccagaggaaagtactccccctgaatcttgcaaatttttaagtcgtctcataccaattccttcgacacatttaaagaatgtggagtatggcagatattttgtgaacaaatcagcaagattatcacatgacttagtttggaagatgtttatctctccatgttgctgaagctcatgaggataaaataatttgggagaaatatgcttagtgatgttgctcttaatataaccagtttccatctgaacaacacaagcggcattatcttcatagataatgctaggttattccaatgaaccaataccacaagatgttaatatgtggttaaccattctgcgaaggcatacacattcacgtgatgcctcatataatgcaattatttcagaatgatttgtggaagtggctaccaaagtatgtttagaagacttccatgaaatagcagttccaccttgtaaaaatacgaatcctgtttgtgatttggcgttgtggggatcaaatagatagccagcatcagtatacccaattaaagtcgaatcctggttctttctaaagaaaagtccaagatctcttgtgccattaagatatcgaaagacattcttaactccggtccaatggcatttggtaggagcagcgctgtatcttgctaatagatttactgagaaagcaatatctggcctcgtactatttgcaaggtacataagtgcgccaatagcactaagatatggaaaatcaggtccaagcacatcctcaccatcttcctttggtctaaatggatctttctccacgtttagagatcgaaccaccataggggttttagaaggatatgacttgtccatattaaatttctccaaaattttctgggtatatgcactttggtgcacaaggattccagaaggtaaatgctcaagttgtagacctaagcataatttggtttgacccaaatccttcatctcaaattccgtctttaaataatgacgtgcttcattaatatcttgtgtattgccaatgatgttgagatcattgacatataccgagataatacaaaatcctgtgggggactttttgataaagacgcacgggcaatcatcatttttagtgtattcctttagtgaaaggaattcacttaatcggttgtaccacatcctgcacgattgttttaagccataaagtgacttctgcaacttaacacaatacatgttacgatttaccttctgattcgggatgttgattccgtcaggaacctttatgtaaatatcagaatcaagtgacccataaaaatatgctgtcactatgtccatcaaatgcataaatagacgattttgtactgccaatgatattaaatatcggaaagttataccactcataactggagagtaagtttcgttgaaatcaacgccaggtttttgcgtaaaaccttgtgctacaagccttgctctatatctcatcacctcattgttttcattctgtttctagacgaaaacccatttgtatcccacagaaaagataccacgaggagtaggcattacagccgagaatacatctcttttgtaaagcgaggctaattctgcgtcaattgcgtccttccatttgttccagtcagagcgcttttggcactcttttatagacctaggttctggatcaacttggaggcaatcagcaattttttcagaaaaattaatgtcgacaattgtagctcttctatcaaaagattctccagtttcagagtagttgatggcaatttcatcaacccttatagactaatcgtgatctatggaaaaattaatgccgacaattgtagctcttctatcaaaagattctccagtttcagagtagttgatggcaatctacaatggttccgaaacaatgtgtctatggtcttccgaattcttagtctcagcattgtgcaccgctgttggtatttcttaacgacattactagaaatataattcccagcaatggcgcagaaacacttatggtatattatggttacagagttcatccgcaagcgcacggatataccattgtagcatttcacctgagagtattccaagggtatcgtatttattttatcccgtgggaagatcatgtagagagaactcaactagtatttatatattacttgtgataatcat

SEQ ID NO: 7788 - DNA, 9815 bp, Oryza sativa
  unsure (1)..(9815): unsure at all n locations
agatcgaaatcatcatcaacaaatcaatcggcatagccttgtcttcaaatcgagtccgattgccatctcgtcggctgatgcctcaatatctctcggttggatttggacaagtctcagaggaatacgagccctgcatgtacagcacgcacatgcacacaagtgctgtatgcacggctgtgcacgtggaggccaacactcagagcaccgatacatacgatgaccgaccgaggacatcccgacgtgacacatgcacgtcatccgaggtaattagtgagattgattttttaaattgatctactaattttgtagatacatccggcatatatgtacaaagatatttttcaggaacaactgagcactcgagtaggttgtggtcaagtacaccgtattatcgagaacgatctcgacaaatgcaaagtcgtcgcgcccccaacccaccaacgaagagcaacgacctatctcatagcaccggtcatgcctggactactcgaggaaaggttgttaacggataattcctcgcgaacgccgtcggcttgatcaccagacatgattgcgaacggacatccggatatgctacaagttgggtgtgtgagtcatgctggctatatgagacgcacataataaaccaactctagcacttccattggtgttggagagataactctacacgttcgctggtcctcgaaccagtacgtagcaatctctctcaccgcaactttcattagtgttcgagagataactctacacgttcgctggtcctcgaaccagtgcgtagcaatctctcgcaccgcaacctccattggtgttcgagatataactctacacgttcgctggtcctcgaaccagtacgtagcaatctctcgcaccgcaaacgtccattggttttcgagacataattctactcgctcgctggttctcgaaccaatacatagcaatctctcgcaccgcaacctccattggtgtttgagagataattctactcgctcgctggtcctcgaaccagtacgtagcaatctctcgcactgcaacctccattggtattcgagagataattttactcgctcgctcgttctcgaactagtacgtagcaatctctcacaccgcaacttccattggtgttcgagagataattctactcgctcgctggtcctcgaaccagtacatagcaatctcttgcaccgcaacttccattggtgttcgagagataattctactcactcgctagttctcgaactagtaaaacgtagcaatctctcgcaccttaacttcagatggtcgaggtacgactacagcaataatgcagcggtcctcgcaccatgacttcagatggttgagaaacagctacgactagtcttcgaccggcagcgttgcggtcctcgtaccatgactccaaatgaccgagagacacctactcactggttctcaaccagtcaatcgtagcgatctctcgtacatttacttctagtggtcgagtttagactacatctggttctcgaccagcggtgtagcgattctcccactatttctacttctagtggtcgagtttagactacatctggttctcgaccagcggtgtagcgattctcccactatttctacttctagtggtcgagttgcgactaccacctggtcctctactccaacaaagttgacatcagatacacaatatcaccaagggttttacccagagatcccttgccacgataacacctagcgttgaaacctatcctactgtccctttacgccgtcttgacaaggcctccgaggaacctaagggaacttcggctggggacgcccagagccgataaggccttgtcggatcctgtagaaacaaaagaccatgtaagatctggtcgtgtaagagttctcgccgtgcgtattaaccaaaccgtgtaatcggaaattgagttttccaacttcacggctgggagctaggatcagtgcttattcaactgaggcaggtcaaaggtccaagagccttatcatccgagaacgattctccgacgacaaggctgggggctagggagagtgtatgactctacaaactgactggtcggagtcggtaagagagaagacgctcatatacaaaacactggaaaattctattcgacattgacgaaggctccatgtctcaatggttgtacaccaagatcgactaaggcgagtatgacaaatgtcgacaaagctccgtcgcaaattctgtgccttctcgatcactcgagaacggttggtggatctcgacaaggaatacggaatggagagatggtgtacccgccgagataaatttcttgacttcaatccaaattctcgattacagcaagacgggagacttagtcgtacgctctgtactttcttggttgacgtcggagattgactcagactaaccctttaggtgtccgcacgaggctgataaaggaagtctaacattatctctaaactcaccgagaacggtcacgtaagctcgataacagttcctccaaagtctgcggttgagaatatgaactcgttcatttgcatcgaagtcgggggctactgtcagggttatggataccacatacctaatagtagttgactaaatctcggcaggatccaccacataccatgtcttatacggaaactgacgtcgagggagttccggataaggaaagacaactagagttctacatggaaacgacaaggactactcggattgtatccatattgatttccctagttctacttggacaaggggacacctatgggtataaatacaagacccctaaggaagagagagggggaccacctcaatcaacaccgccacaatctacggaacaatagatcaagacagaagatcaatatagaagcctacatacgccaagacacgccgccggatatcgacttcagggataagcatggctagtaccctacggtgtctctggatactgtcaggagagacgaaaccgctatctctgatctcgccgggcacggattcgaggaggaaggctaccctgttgtcgactacgagtcagatcgtcagactgccatgtcgacaacagttagataggctacctcaaatattgtacttatatgattatggtgaataagagcaacgaccggctttggccaacaggatgtagggctattacctgacaattcaggggcccgaacctgtataaaaattctcgtctccgtctcttttacctcagtctcgcgtatatcctagcaccgacgatccccatactatgcaaatatcagaattgcgacatcaaacgtcgacagtgtatgatatcaacccttcattggaggcaagtgaatgtagctgtggtttgttacgtttttaacaagttatttttccaacctccaccttgagactttaataccagcaatctattcctatactaatttggcactttttagaagctctcacgttaattagaaagatctgaccattaatccacccgatggtaatatcatgaccatatattataacgcgtatttaacatgggctttcgtttagaacgaatttattacatacgtgttccaaaagcccatttgatatacaagtgtattgaccaatccatatcgtatctcaccatctctaacttcctacgtacttacacggtcgtttcaattgtttccagtcgcttttcatcatgatcatgcacacgcggccgttaagatgttgccatgttgatcaacaaaatcgatacttcatggacgatgcatcttcctgacgatgattagatcgcgggcatcaaactcggcggattcttgcagtagtagtttctgctgcagaaacaccgccttcccgagcgagcggccgctgagatgaacacatctccttcgtgatcgccggttcgaatctcctggccacacgccggcacagtgaagtatagtttcgttaatcattccagattccaccatctataatttaagtgacgcttctaatgacaggcatatgcttgcatcatgtatgcagttctgctgcagaacccgtgcaacaaagccatggccatctagaaagcatattagcatagatcaatgacatggtgatcgtggaagatttctttaaaaatatggtcataggcgggtgaatgaaggatgcaaaacaggagtaatagttgtgattaatttaccaattttgtgagcaaaccaggttaggtgcttttcttccttttgtcttaatttaaatatgcattttcctttgcaatcttaactaataaatttcaagcgaaggcatcattagttggttgtgtgtgtagttcacaagcacttactattagtttggtttaattcatgcccttaggttttctttatcttgcttttgagctacacccatgatcagagctattattatattgtaaccttagcttctcataaaaatttaactctcagaattactaaattttcaaattactgaaccatgaagtatgaataaagttgcatttattaattcatttgaactataaaaacatattttgtaactattaatttcagaagttcatttgaatatgaatactatacgtatccaaatgataatttctcatatataacttgcattaaaattagtactaatgttaactttacaaatatatgaaattttaatagcatgtgtgaaaatacatacatagaaccgtcttccaaaataatcgaccatctacccactttatgcagatcgatcaattaaaaggtgtgaagaatcaaataatttcaaactaagagttcctgttaaataattaaacatgccatataagttttggttactggtgtgaaatatggagttctatatatctatcttggtttctcaatatggctcttcgttaatttaatttcgaaattaaaaattaataattaacaaattgtaacctacacgactcttctttcactctacttcataatccgctataatatagatataaatttagcattaataaatagggagttgtacctatcatggattctcattaccaacatattcagcacaaaaaaatccacaaaatcaatagtaatagcccatgcaatgcatgggttggcggctagttcacatcattttttatggtctgagaataaaccgtacaacananactcaatatttctttgtgcgtgccgttgttgtgtctgttccaatcattttggatcaatactaggcaataaacttctactttaaattgttatctatctttacaacaactatatttcaaatttcttagtgtatgtttatcccacgaagctccataaagaaatcgccatttacgttaatttgggtatattgtctttgcttaaccacatcacacaattaccggctcacatattaattttgtaacccatagggaatacataaaagctttgattggtcagagagggtgaggatgtgagagttttcacatctactttgctacttgctgtactaacaatggcagaaagaaggtacactgatcacacattttataaaaaagaactgatctcgaggtgtatcttgaatgggtaaatcaaatggagattgaacatgactaccaatgcttttgtgaagagtagttgcaacaagctactattgaatttcaaaaatatgcatgtacttggtggaaacgatttcctcataagtgctttaccaagtcttaggaagatttgtagaaagtgatgagaaaagaatttatcccaagagagtatgcgctaatttcacttcgccatttgaagcatggtcaagcaaggtagtaaatctactcaagcttattatggcaagttgtgttcttccatgtgtcgagcaaatattattgatgagataaatgcaattgagtatttcaagacatatatcaatcctagaattgttgccgcaattgatgaaaaatatgtaagaagtgtgtgaggtttcttaagctatgccatcaacaaagaaaaaatatgtccttatgcgcaataaatcaaagatgttatagaattcctcctaaaggattcagtagccatagcatgaaagaatttagtattctccccaccaaattttgcccacctaatagtacatattttctgccaatatgtttgcttatacatcaagtaggtcatcagtttgcttctgataaagactatgtattttcaccccaagacagtaagatctccgagctcttctatactgtctataaaatgaatggttgcattacaattcttgatcaattcttgcaaccttgaaagatttttgctctattttttaaggtcttttctcaatgccttaagcttagcagtaatattcctagcaggatcaaggggactgccatgattatcccaaattgtttgcaccaagtcaaaaaggccctcatgctccacccagtaactctcaaatctaaaggtatgtgctttaggtatatttatcacaatatgcaccacacaagggatatgatccgaaaaactattcttgacaatggctttaccattgtgttagggtaggaaagagtccaattcatgggagagttcaatagatacaacaaaggttgatgttgcatgtaacttcaggtgtaagccatacctttaattggaagttcaaaaaacccaaagagctaatgacctcattaaaaggaaaaatatcattcatgtcagctctaggtctatttctgttcagaacagaacaataaaagatgatctaagtctccaagaagaagttgtacaatcttgtcacattggtaaaataatgtgattcagccaaagcaatgcgagcaacctcttgagcttgatgattagtttattttgagtaaatttcactttaggttacattttattactattttttcattttggactaccctttaaaattatttattgaaagatcttgtttttttaaaaaaaagtattaaaagagttgaataatttagtaatttcttgtccaccacatgcatcaagcaaaaacaagcccagatccatgcatcttctccttgacgatggtgtcaaaacactccaccatttccggcgtcatgtggattttccagtctccggccttccctttccggaagtatgacgcattcgggaaggcgaacgatgcctctcccatcttattcacctccaagctcttcaggttctcgaagctgcacagcctcacaatatctgtcaccagtccagcttcttcctcggtcgatgagaacggctggccaagaaagtcggcgagcttcctgacgatgtttgccggatctcgcagaaggtcctcatagaccagaaacaggaccttctctgggttcgccttgcaagcattccagtagccaataatgtgatcccagatagcgccggtcaagaacttgccatcgcaggcagcctcgaacacttcttgaaatgaaagatcaggctctataattctgaagaagtgccaggctgagaccaggatatccttcggctccctgcaatttgctaatttgttagcaattttagaagagtaaaacccaacgaaaaatatgagaatcatgagacagaggttcgaattgtcaatgataatctggtgcctggtatcagtactgatatatcatccaataaaaaattgtttgccagcagcgaagcttgaatgttgaaatgctaaaagggcatgtttgatcgggccaatagcgttatttttttttttttgaaaatttgctaaagctaaagtaaatttagtgtaaaattttgatgacatgggaaggcatagcccctatcgcctcccctctgtctccgtcattgttgtttgcactatgccggtcatcaatcatccatgttgaactggctagaagcatgcccagatcgatacaaaagaaccagatataagagaaatattctgaaagagggtaccaactagatataagaaatttacctgcaaatataaacaaccttgcagccaggttcatctgcaatggacttgggtagagcagcgtgctgcatgtgggtggacatgagcctcggcgacggcagctcatcaatcttaccaccccatccttcagagatcgccccctccatgaacgggacgcagtcgtgcgggttaagacggaggagcggatgccggtcactggcaggggagtaggcgccgcgcgccaagacggcgaaggcgagcgccttgagccaggtggtgccgcacttaccggggctcgcgaggacgacgtcgccatggcggcgcggcacgaagctccgctggatggccatgatccctggaagggtgtactccatcagccacatgccctggtagtgccgcaggcgcagcttgggatagctcgggaggctggacacgacgccggcatactcctcctccggtgaggatcgctgtgccattgcgtctccgatgacgtccttgaacggcacggggccaatggcgccatgttgtggcttgctgggggctgccattctgcctgcatcaactggcaagggaatggaccaataaatatagaggagacgatggagagtaccaaacaagatactgaagatagacttatcaacttgacattggcattgatcggtttctgaaaatcttatgcacccatgtcaaatgtcggatgacacagctagcttaattaggctgtgtttggaaaatgtggttaggaactaatcccctgtgcacgtaaaatagagcaatcgttagcatatgattaattaagtattagcttgaaaaacttgaaaaaaaaaattagtacgattttttcaaacaactttcatataaaattctttttttttttgcaaaagaacacaccatttagctatttaggaaacgagggagtagtagttgagaaacctagattaccaaactcagccatatagtgaccacctctgtcacaaaattaatcaattactactatagtttaaagttagtctcaaaataaatcccttttacattttttatcctctcaactatcctcaattcagcaattaactgttttatctcttcaaagctactcacccaccaatactacttcttattaacaatgggcagggtaatatttttttttaccactagagttttcatcggatacaagactagctatgatttattatggacagagggagtagttaggacattttggctgtgttctttctagtgagttcccaacatcaactgcaccatgtggcttgctggggctgccatactgcctacatcaactgacacgggaatggaccaataaatacagtcccataatataagggattttaacttttttgtttacactgtttgaccattcgtcttattcgaaaagtttatgcaaatataaaaaacgaaaagttatgcttaaaatactttgaataataaagtaagtcacaaataaatgaaataaataataatccaaaattttttgaataagataaatggtcaaacagtgtaagagaaagtcaaaatctcttatattagtggatgaagggagtagtagtagagaaaacggagagtaccaaattaaagatagacttatcaacatgacattggcattaattgatcggtttccaaaaatcttgtgcggccatgacagatgacagctaacttagccactgccaccgtcagaaacacgggtggaaaaaccatctttcgtcggtccggcaaaattcacaatagtcccggatccaaaaagaatcgggactaaagattgtttttagtcccggttataaaaattttgatctaccaaccaggactaaagacgatctttagtcctggtttatcccttgtcagatgtatgtcagggggtcgaggatctttagtcccggttggtgtcaataaccgggactaaagatcaccactttagtcacggttggtactaccaaccgggactaaagataaagatgatctttagtcccggttggtactaacaaccgggactacaattaaacacgttgtatataatccctatcccttatcc

SEQ ID NO: 7789 - DNA, 21103 bp, Oryza sativa
tcaagagctgactggccccaatcaaagaaagatctcgcacggcctttgaattcgacggcaagcatgaccctaaccgtgaagatcctgaatctcttgaatttaaggttatgaaggagagaatgtataaactcttctcaaatgcagtcgtagttagctattcacacttgctgccagtggtgccatacaatgccttcaacccccctccagcggtatgtatttaaaatttcagcctttctcgaaagcatgcttttatcatctacaaagttgattgaaaacgtgaatcatcatgcccaggaattcgccttgatgaagttagaccctccaactgctcaacgccgctcaccccgtcgtcaaactggtcaagctggcggaggaccaaatatccggtctgattctcaacccagcaccactcaatcagccaaccaatcagacttctgcaagaggaaattggttctgagcgacgacaaaaatgatgactctgaaaaagttggcagcaagggggtgactggaaaaccaagaaggcaagctaacccaaagaagaaaacatccagtcgtcccatgccgaaaatcaggaagtcctccaagtacaaatcatttagccctcttccttgtattgctgctcactaactatcgaaatagcactgatagcataactcaaatttgtaggaagccatctgacatagatccttctggaaaagactctgagccgactgacatggagacgggcccttcaaaagaaaccgagccgaccgccgaagatcgcccgagtgataatcaaccagcaactgacaacgtagagaccagcgacaagcccccgactggaaatcagtcggccgaagcaggagttggtgctaatcaggagccctcgactggaaatcagtcgggtacagagcaaaataatgacatctcggaggtagagacccagcctgatagccctcccaaggcgagcgctggcgccaactctggaactaattcccctgttagggtgcaaggacctgctcgtccccgaccagaaatcataacaggtaagcaaatcctccaaatctattttgatccgacagactttcttcaattgtttcaccattattcatgaatgcctaaggcccgatggtcggcgacgaagaagaggtcctccggatacaatcggctgaagattctcgcccacccatattagtcaagtggtgggatgacgacatgcagccctaggggatcgtaataaataaacaaaaagaggacaaggaagtatgtctgctgaaaaagacactcggccaagctactcgcctcgtaaatgtaagtcttcttatactcagcttcaatcatcctgtcagccactttgctcaaatacggataaatttgcattgcagagaatccatctcaggaacgaggcgaagactgcgactcttgagaaattagttccccatcttggaacccttgaggccactagaaaccagctacacgaagctaaggagcttgctaggaagactgagcatgacctaagagaccgaatcgccgagctccaagactccaactttgaactgagcggatcgtcaaaaggtaaatacaatatttgtctgatttatttatgctaccatccatgtgatatcaaccaacaagaagcaatacagtgcaagctgccaagatatccgagctggaaaagcggatccaagctctggagaaagacaaggccgaattggcaagacagagggacttggctctgaaagatgttgaaggtactggtaactaatacttcaaaaaccattcctttctttatgcccactcgttgatataaatctatttatgttgatataaggagcttgccaggaagactgagcatgacctgagagaccgaatcgctgagctccaagactccaactttgaactgagcggatcgtcaaaaggtaaatacaatatttgtctgacttatttatgctaccatccatgtgatatcaaccaacaagaagaaatacagtgcaagctgccaagatatccgagctggaaaagcggatccaagctctggagaaagacaatgccgaattggcaagacagagggacttggctctgaaagatgttgaaggtactggtaactaatacttcaaaaaccattcctttctttatgcccactcgttgatataaatctatttatgtagatcgcaagatcaaatctcaggctcaattcgatgtcttggtcaacaaaattaagaggcttgagggagctagagatgaagtcgccaacgccgctacaccactcgtccaagccatgttcttcaataacaatggtccgagtacattcgatgcttccgaaatcttcgacaagctgagaattgctctggatacatattttaagaatatcaaggaagctggaagtatgggagcgagcttagcgttggcaatgaccaagtctttgtacccgaagattgacattgacgccgttgatggctttgcagacgggacaagcgaagaagccgcccttgaccttatcaatgatgcgcagaaagccgccgataagatagtcgttgatgtagttgagagattccaggacaacgacctccggccgactggatctaataattccgatgatgaaaaaactgatactgattgatgttgtattataacaatgatgatgatgatgataatgatgatggaggcacaatttgtacaatactgatgaatttatgctatgcttgatgatttaaactcagctcctgatttcttaaaagtttttgtcaaaccttattgagcctagaacccgcaaaagttcttaaaaactttcagtcttcattgactgagccaaaaaaccaaacaaggcaatgataaatcaagtaagcaaattgaattgataaaaatcacactccattattattatagtagcccccgactgataactcaaggaaaaacttgatgttagtagtcaaagagggaaatacaaaagtaatgcctaagcataaaaatgacgaagatgttcgatattccaagagttgtcgataggagtaccgtcttcacgcttgtgtcggtaagaacctggccgagtgacttcagaaattatgaatggtccttcccacaagggagataacttgtgccgatcccatgtagtttgaattgttctcaaaaccaggtcgccgactaaaaaagctcgtgatcgaacattgcgattatgataacggcgcatcccttgcaagtaccgagccaactgaattaaggctgcttcgcgggcttcttccagtcggttgagatcatctactcggtcttctccgtagcgctcctcgctgaagttacgaaaacgtagagattcatattccacctcactgggcaacattgcttccactccatatactaggaaaaacggtgattggcccgtagcccaactgggagtggtgcgcaaggaccaaaatatagacggcagctgtcctacccacttgccggcatagggatgcagtctgtcgaaaactcgtgcttttattccttggagtaccatgccattggcgcgtttgacttgtccattgctcataggatgcgctacggaggcataacaaattttgatgccgaagtcctcagagaaatctttaaataccccacccgtgaattgagtaccgttatccgtaatgatcctgttgggtaccccaaaccggtgcataatgttgatgaagaaatctctaaccttgtctgccgtgattgtgatgaccggtttggcttcaatccacttggaaaatttgttaacagccacaaagaggtgagtataaccaccgactgcctttttaaatgggccgaccatgtcgagcccccaaaccgcaaacggccaagacaattggatggtttgcaactcctgagctggtagatgagtttgtcgggcaaaaaattgacaaccctcacatgttcgcacaattttgtcagtgttggacacggctgtgggccagaaaaaaccttgccggtaagccttacgaaccaaggatggttcgtgcggcagtgtgattgccacagatgcctgaatgtatatctcttagcaattgtcttccctcctccaaagaaacgcagcgttgcaggactcccgatggactcttcttgtccagttcagtctcatgaatgacataaagtctgctgcacctggagatccgctcgacttcatctttatcttgagggagttcttgttttgttaaaaatattatgaggggctctctccagtcggattcaatcatgtttacgtcttgagtgtccgtggcctcgattgtttctttccttggtacggttggctcatagagatgttcaataaacacgtggaaggagctgcttctcgttttgaaccaaaattagccaatctgtcggctgcctcattgttgtgtcgaagaacatgggtgagcacaagtccatcgaatttgtcctctaacttacgtacctcctgtcagtaagcggtcatgttatcatcaaggcaggaccactccttcataacttgattaaaaaccaactgagaatctccacgaactatcaaacgccgaattcccaaagagattgcgatccttagtccgtgaagaagcgcctcgcattctgccatgttgtgagacgcagaaaaatgtatccacaatacgtagctcagtctttctccagtcggggaaattagaacaacccccgctccggtgcctgaaagcctcttcaacccgtcaaaatgcatggtccaatacttcatcttctccacgggcatgttgtcaaaccgtgaagtttcccccccttttcttgccttaaaaaaattggttaaataaattgcccgaagaaattatcttaattaacctagagctaaatccctaattaataaatgcatttaataatcgaattcggcgtggtggaatttttcttgagttccccatgctccaatacattaacatgatttttagtggaaattttcagagaattggaaataattttaaccaattaaaattgagcaagtgcaatatttttaatcctaggaaaatcctttttctctttttcttttcttttccctcctttttctttgttgggccgtcggcccatccctctcccgtggtccctcctccttgtgggccgacccaagccgcccctcctctctcgggacgccgacaggtgagccccacctgtcggtcgtctcctacctccggccgttacagccggagctccaaccgccgctgccgccaaaaccgccacgccgccgccgtttcccgccttctccgctccacgtcgcgcctccactccgcgcccacacctcgtgcccacgtcgccacccctcccccgctcctcccgcccccacgtgcgcccgagagtgggcggggttcaatttgaatccccctctctctcttcctccccactcccccacatcgccggccaaatcggccaccttcccggccacgtccgccccctcccgcacctttaaatcactcccccgagctccctctctcgtttcccacatttgccaccctctcccgtgcccctatcgccgccacacctagccgctgccgctacctatctccggccgcgcgccgccgccgctagagccgccgccgcgccgcgcagtcgccgccgtcgtgctcaccgagcccgcccgcacctctgccgccgcttcgttgccgcgaatcaccaccggagctccgattccctcgcgccgccggtgagcttgccattgtttccatctccagccatttctcctcgccgtgccgcggctcctctcttctccctaaccccttcactgccttttcccaggtcgcgccgctcccgtccgccgttttccgaagtgctgccaccgctcattccctcccgctccggtcgccgtccctccggtgaggactccctccccctcccttttctccccttcccgcgtgcgccgccgcctttggccgtgccaccgcctttggccgtgtcgccgctccggccgtccgccgcagcctttcgcgccgtccgccgccgcctttcgcgccgtccgccgccgcctccctccgccagtcgtcgccatcggcagccgcgcgcaccgccgccgctcgccatggccggtcggtcggctttgtgccgagccaagccgtgcctagccgccgcccgcgctgtccgatcggcctcgggtcgatccggaccgtcggtcccgtggaccggcggtggaccacctgcgtggtcccggtccacggtagaccagccaccttgtgccgctgccagtggggcccacttgcccgagccccctcttcctccccttgtgcgctgacaagcggggcccacctgtcggcgcagccgcccccccccccttggatgacgtcagccctgggatttattgcgcaataaattgattaaggacattttctttattagtaaaaacacagtttatcttctaaaattcataagtaattcatccgagcttcgtttaagtctattcaagtctcagtaaattcataaaaatgcaaagaatccattaaaaatggttttgtttcctgtttcagtagtcttatagcatgttttgcttgtgtgctttgtttgtcgcgtagatttcggccatttcatcgatccgcagtttctcaaagacgttgctgaggtctcatcagtgcgagagcaaggcaagttatcctttacatttgatcatattgtacccaatttacaaacaccctgcatttctattaaatgttgcactcttttacaatgtcatgtgggatgggtcctattactcagccatatatcatttaccatatgccattgataactggggtatcaaaatgattagatgttggtttaggaaatgctcagccatgcttagttattacatagactttgactatgagcatagttctggattggtgccaccgcaatggtgttagttatttaaaatacaccgaatggtgggttgtgggtgcatggttttgctggtcgcacccatggcaattaaggaccggttcataggaaaccctgggagacttaccgtgcttaccacaagcgggagtgggtaactgcttgatctgaggtatagctcaaccctttcctaggcaccggtggcgagggtgggcgtgatggagttgggtcggccggggtgtccggttgtccagctgccttttgaggggtgggggtgaaacctgtcacaccctaaaaatccaaaatgtataaattgttgtttaattggaatttttagaaatgattttaaaagcctagaagagaagatctaattttaattaataaattccaatataaaatggggccagataaaatttcattaaatactttgcttaattctataattcctagattcttctgggatttatttgagctaaggaagtatttttaataaatggaattgcatttcatgaataatttaaattgaaaaaggattttaaaagtctcttttggctttgggccgaaagtcggcccaaaaccttctctctctctccccagcccaagtcggcccagtccgtagccgagccgcctgcgcgagcgctcactgccgctgacaggtgggtcccgcctgtcggggtcgtcgtcaacctccagccgccaccggccgaaaccctagcgccgcaccgccgtcgtctccttccaaattcggccgcccctttccttctccggtgaaatcaatagaggggaaatgatctccgggatctcctccaccttttctcttttggaatcatcgtttaaatcgctttggaagttcgtggattcgagttcgattcggatcggcctctctccttcgaaccctaaccttccatcgcgtcgccggtcgccgtgggccttcgccgccgccctccaacccctataaaaggatccccaagcccgtcgctacccgccgccacccttgctttcgcctctcgccgtcggtagcgtcctagcaccgtgagacctcgcgccgccgtcgttgccgccgctccagccgtgcgtcgccgtcgctccagtcgtcgccgtcgctcgggaaggctgccgtcgtggtcgccgtcgcgtcgccgtcctcgtccaccccttcgccgtcgctgaagaccgccggagcaccgtcgccgtcgtcaagccgaagagtgccgccgcttcttcctcgacgccgtcgccgtccgttgatcttccgccgccgttttggtcaccggtgagttcgccgcgtcgccctctacgtgctggtgccctccgttcgcgtcgtcgcgccgtcgttcgccggcgagtttgcaagcccgagccgccgtcggtggtgacgtcaccgctgacgtcatcatcgtcgtctctcgtggtccggccgtggaccggtcgatctcggccgtccgttttggatggaaagatctcggccgttcgtttccgtgagccgccaccgtgcgcccggtccaccgcaaccctagccgctgacgcaataattccctttttccttttcaaaaataattcattattgcgtcataattcaattaaaatccatataagtgatttaaatcgatttaatctttgaaaattcataactaattcatcttagctcggatttagttggttcaagtctctaaatttttctaaaattgagatctacatgttaaaaatatccacatgtactgttcatgcttgtttatatgctgttttggtgattttgctcttttctgtttagattccgacgtttccggagagtccgttttcgcaggggaagattttgaagagttccagggccagcaaggcaagtcacacagatcccaaacaaccctttgagcatgttgatcccgtttaaagctattgtttctattcaactattgcatttattttcgaatgtcattgggtggaattaacctattgtttgttataatccttttgttcttgattactttattccttgataccttgggtttttataacttgactagttgggctatatatatattggttcagctagatattagatatgattgcttagccatgcttagaaacattagcacactattgggataacttatgattcactattatttaatgatggcttaatgatagctcacgatggccaatcgtgattggttaattaattacttgccaactaaaacttgataatggtgggttgtgagcacatggttttgagagacatgctcatgacaattaaggaccggttcacgagtttcggttgtgaaacattaaccgtgccaaccacaagccagcgtgggcaacggctttaccttttgtatagcatggttcattgcggagcaccagactgagaagtggcggagataagcccacgggggtcgctggggagtccatgccttgtttataacggggtgattatgatccaggaaaggtgccctgtggtggattgtgttgtgcgaggggtattgtcacagctcctttccgaggtaccgtggtggtattgaggcacatggtgacatgttgtggggctgtcttgtgggtacagtggtacacctctggccagagtaaaactattcgaatagccgtgcccgcggttatgggcgggtctaacaatgtctttcgtgattagtctcacacctctcatcatgataacagatgctataaatggtaataatttgtttagctcctggtttggaatggtatattcctggtttggagatagatctgtacagccgggtatggttgttcagaatggttgggcctatacaacagggtatgttgtatagcgttggattaatagtgtttaattattacttaaccgttttattaaattctgaaatgtttattaaatgttgtttatgcaaatgaaaccctactatgccatcctttggtatcctgtgcacttgcatatttgctgcgtgacttgttgagtatgtcatatactcaccttgcaatcattcatcagaggaagagttctacaatgatgctgatggtgtggaggattaggtgtagccctggtcaagctgcctgtggagtggagccgtctgcgccgtttatcttctttccgctgcttagatctttattgattgagaggaactatctacctctggaatgacattttattcgcttattaattagagtaataattgtactctattatcaatttgttattgtgtgcctcggctgattcctggacgagggttcacacacatgtaagcgtttggaattttggatagaaattccgggcgtgacaaaaccttagcgtggtgtggatggttagggaagggttatgcggagggtcttgtcacgatttccccctttgcagtatcatggtgatacttcggggcatggcgacatgtgtggaatcgtgtcttgtgggtacagttgtacacttctggccagagtaaaactattcgaatagccatgcccgcggttatgggcgatcaaccagattcaccgtgattagtctcacccctagtttagcttaataaactggtgtagttcagatggttggttgggcctgttgcaacgtggtgtagcgttggacagtgtttggttaatattgattaattactataactgttttactgctttcaactactgtttttaaatgcctactttgtgcaaagagcctttagcctccttaggttatatcctgcatcatacctcctcttccggtataacttgctgagtacagtgggtagtactcagtcttgctatcttttcccccacaccagagctgaagatcttcctagtgggaggtgtcttaccgaagttggtttcgtcgctggcatcaaggattgcctgtggagtggagtcgccccgctgcagaagtcaagtttccaagtctagctcgtttttcttttgcgctgcatttgtaatcttttccatttttgtaagacgtggatctgtatgtcaacaattgtcgtttgtgtaccctggctggtcctggacagggatttaatgcacattcagcttcgaaattctggttcgtgaatttctgggcatgacaagttggtatcagagccgagactgaccgtaggacaagccaactggaaacctaagagccctctgaaccccttttcatatgcatatgcctttttcacttggatttgtttcgggaaaattttgggttttgcctctttggtttgtgggaaaaatcttggtccttcattcggatcggatctttaaaattagctcagtctagggttttagtaaaattttatttggagtttatttgacagtcagtcgggaatctatcaggtgatatgcattaggtcgtgtctatgttcgatggggcaattttatgcgcattattttctatgcatctaatttatgcattaatttattgtttagtcagttgcattagtgtctttatctgggttcatgaaaaacgttctatgcataaaaatcagtcatgctaggttatttatttgagtcatttgttgctttgtttaatttggaatttagcatgaattggttcttatcccttgtctactttagatgtcagtcctatccctcgattgcaatcgccgctccgagcttcagagtcgccgcccttagttttatcgtcttcttagttttgtttgcttgctagtttccgtgcttaggtttgttgcttgtgggttagttggcggtcgatatcatgtgtgagtggtatggctgacttaattaagagttgcgtgcctctttttcagtgttttaatcaagattaagataattgcacctaaatttataagaaatattagtttctgagccccctgtttttcttccttttctcatatttctacctatcccccttcagatggtgaagacaaggaatggttcacgtgactctagcaatgtcagtggcagcgaagagcagattagtggagcacgtgccaacagtgcatctgacaacagtccatctccaccgcccgagaacccaacgatcgctcaggtgttggacaatcagactcagatgatgtcaatgatgatgcaacagatgcaacaacagtaccatcaggtgttgcagcaggtgcagcagcaagcacaacagcagcagcagaacctgcagtttggtcttccacctcctcaatccaaactgttagaatttctccatgtcaaactgcccactttctcaagtaccaccaacccaatcgagaccaacgactggcttcatgctattgagaagaagctgaaccttttgcaatgcaacgaccaagagaaggttgcttttgctacacactagctgcaaggtcccgcttctgtttggtgggacaactacgtggggacccgtccagctaggacagaggttacctgggcagagttttgtcagagtttcaataaagcacaggttcccgagggaattgtggcaccaaagaagagagagttccgttccttgcaacaaggaaccagaacagttatagagtatttgcatgagttcaatcgcctcgcgcgctacgctcctgaggacgtgcgcactgatgccgagaggcaggagaagtttttgtcgggtcttgatgatgaattgaccaaccagttgatctcccgagattatgaggactttcagaagttggtagacaaagctatccgtcaggaggagcagggtaacaaaatgaaccgaaaaaggaaggcatcttagttcagaacttcccaggggaacagtcagaagcctcgcttcacgatgggacatcagggtggaccttccaccatgattatccggcaccatcgtccttaccacccggacaatttcaacagcatcaacaacagtggcagtcacagaaatagtgagcagcacagcctcaaccctactccaagtccactaatgattccagctcagtcagttcagtcagctcagcaagaacagcccaaaaagtttggagaaaagcccgaactctgcttcaattgtaacgagcctagacacatggtacgtatgtgcccgaagccaagacgtgccagactcaagttcgttcaggcccgtgtcaatcatgcatctgcagaggaggcgcagtcagcaccagaggttatattgggcacattccccgtcaactcgacaccggcagtaatattgtttgattctggtgcaactcattccttcatttccaagcgttttgctggtgcgcatgggttatctttagtgaagcttaagataccaatgcgagttcatactcctggaggtggcatgaccacaactcactactgcccatcaatgacagttgaaattcaagggttgatttttccagccaacctcattcttcttgagtccaaggaccttgatgtcattcttggaatggattggttgacacggtacagaggagtgattgattgtgctagccgcaccatcaagttaaccaatgcgaaaggagaagtggtaaccttccagtctccagtgccgcagaagccagggatcagtttaaaccaggctgctggtgaagaacaagaggtagcagtggagaaaaccactaagaagttggaggatattcctatagtcagagagtatccagaggtttttccggatgatctgacaacaatgccaccaaaaagggatatcgagttccggattgacttggtacctagaactgcaccgatccacaagaggccttacagaatgagagccaacgagttggcggaagtcaagaaccaagttgatgaacagttacagaagggatacattcgcccgagcacgtcgccttggggtgctctagttatctttgtggaaaagaaagataaaaccaaaaggatgtgcgtcgactaccgcgcactcaatgaggtcactattaagaacaagtatccgttgccaagaattgatgatctgtttgatcagttgaaaggagctactgtgttctctaagatagacctacgatcaggctatcaccagttgaggatccgcgaagaggatattccaaagacagcattcatcgctcggtaagggttgttcgaatgcacagttatgtctttcggactcactaatgcacctgctttcttcatgaatttgatgaacaaggtgtttatggaatttctagacaagtttgtcgtggttttcatcgatgacatacttatctactccaagtccgaggaagagcatgagcagcatctccgactagtacttgaaaagttaaaagagcaccagctatatgccaagttcagcaagtgtgacttttggcttaaggaagttcagtttctcggtcacatcgtgaatgctcaaggagtagctgtggatccagcaaatgtggagtcagttaccaaatggaccccaccaaggacagtcactcaggttcagagtttcttatgacttgcgggctattaccgccgtttcattgagaacttctctaaaattgctaagccaatgacacagctattgaagaaggaagaaaaatttatctggtctgctgaatgcaataggagttttgaagaactcaaacgacggttggtgtctgcaccagtcttaatcctgcctgatcagacgaaagttttacaggtctattgtgatgcatctcgtcaggggctaggatgtgtgttgatgcaggatggcaaagtggtttcttatgcttcatggcagttgcgtcctcatgaaggcaactacccgacgcatgatctggaattggccgcagttgttcatgctttaaagatttggtggcactatctcatcggtaaccgttgtgaggtatatacagatcacaaaagtctaaagtacatcttcactcaacctgatttgaatctcagacagcgaagatggttagagctaatcaacgattatgatatgggaatacattatcatcccggcaaggctaatgtggttgcagatgccttgagcaggaagagctactgcaatgttgcatgggtagagcaactatgttgtgaggttcaatgtgatttggaacatctgaaccttggtatagttgagcacggattcgtggctgccctagaggcacaacccacactggtggagcaggttcgcatagctcaagcaagtgaccctaaaatagcagagctcaaaaagaacatgagagttggaaaagcccgaggttttgttgaggatgaacaaggaacaatctggatgggggaaagattgtgtgtacctgaaaacaaggagttaaaggacttgataatgacagaagctcatcaaactcagtattccattcatcctggcagtaccaagatgtaccaagacctcaaagaaaaattctggtgggtcaacatgagaagggaaatagctgaattcgtcgcactctgtgacgtttgccagcgagtaaaggcagaacaccaaaggccagcaggtttgctacagccacttcagattccagaatggaagtgggaagaaatcggaatggatttcattacgggtttgcccaggacgtcatcggggcatgattctatttgggtagttgttgatcgactcactaaagtggctcactgcattccggtgcatactacctactcagggaagaggttagcagaactttatctgacaagaatcatgtgtttacatggggtacctaagaagatagtgtctgatcgagggagccaattcacttcaaagttctagcagaaattacaagaggaattgggaacccttctgaacttcagcactgcttaccatccacaaacagatggctagaccgagcgagtcaatcaatgtcacgcccggaatttctatccaaaattccaaacgcttacatgtgtgtaaaccctcgtccaggaatcagccgaggcacacaataacaaattgataatagagtaccattattactctaattaataagcgaataaaatgtcattacagaggtagatagttcctctcaatcaataaagatctaagcagcggaaaataagataaacggcgcagacgactccactccacaggcagcttgactagggctacacctaatcctccacaccatcagcatcattgtagaactcttcctctgatgaatgattgcaaggtgagtatacgacatatgaatttttgaagatttaatcggattaaaacacttatatagattttaattgaattatgacgcaataatgaattatttttgaaaaggaaaaagggaattattgcgtcagcggctagggtttgcggtggaccgggcgcacggcagcggttcacgggaacggacggccgagattgatccatccaaaacggacggccgagatcgagcggatctacggcggctcacggcagacggccacgatgacgtcggcgatgacgtcatcaccggcggcgactcgggcggctcgggcgcgcatgctcgccggcgaacgacggcacgacgacgcgaacggagggcaccaggacgatgcgggcatcgcggcgaactcaccggtgaccaaagcaacggcggaggatgaacggacggcggcggcgttgaggaaaaggcggcggagtccttcggcttgacgacgacggcgatgctccggcggtctaccgcgacggcgaaggggcggacgaggacggcggcgacttggcgaccacaatggcgatcttcccgagcgacgacgacgaccggaacggcggcggcgcacggctgaagcgacggcggcgacggcggctcgaggttacacggcgctagggcgctacggacgacgagagacgaaggcgagggtggcgacgggtagcggcgacaccggggatccttttaaaggggttggagagcggcggcgaaggcccacggctgccggcgaagagaaggaaaggtcggggttcggaggaaagagaccgatccgattcgacctcgaatccacgaatttccaaagcgatttagaggatgattccaaaagagaaaaggtagaggagatcccgaagatcatttcccttctatcgatttcaccggatcgggaaagacgcgaccgaatttggaaggagacgacggcggcgcggcgctagggtttcgggcggcggccgacgcgaggaagacgacgactccgacaggcgggccccacctgtcagcggcagcgaactcgcgcgggcggctgcggctgcgaactgggccgacttgggccggggagagagagagagggtttttgggctgactttcggcccaaagacaaaagagacttttaaaaacctttttcaatttaaattattcatgaaatacaattccatttattaaaaatacttccttagctcaaataaatcccagaaaaatctaggaattatagaattaagcaaagtatttaatgaaattttatctggccccattttatattggaatttattaattaaaattagatcttctcttctaggctttttttaaaatcatttctaaaaattctaattaaacaacaatttatatattttgaatttttagggtgtgacaatcaaatactagaggatatgttgagagcctgtacgcttgactttggtggagcatgggacaaaagcttgccgtatgctgaattctcttacaataacagttaccaagctagtctgcagatggcaccgtttgaagcactgtatggatggaggtgtcgtactctgctcttctgggatcagacaggggaacgccagttgtttggtacataagttttaaatgaggcagaagagaaagtcagagctgtcagggaaagattgagaatcgcacaatgtcgacaaaaaagctatgtagacaaccgccgaagagagctcattttcgaaacagaggattatgtgtatctccgtgtcactccgctcaggggagtacatcacttccaaaccaaaggaaagttggcaccacgctttgtgggaccatacaggatcttggaacgtagaggtgaagttgcttaccagcttgagcttccctccaacatgcttggcatccacaatgtgttccacgtctctcagttgaagaaatgtttgagagttcctgaggaacaggcaagtccggatcaaatcgaaatccaaaaagacttgacgtatgtggagaagccgactcgtatcctcgaaactagcgagagaaggaccagaaacaaagtaatcagattctgcaaggttcagtggagtcatcactcagaagaagaggccacctaggaaagagaaaatgagttaaagaccgcccatccgcacctcttcaccaattcttccgaatctcggggtcgagattccgtttaagggggggtaggtttgtcacaccctgaagtttcccccccttttcttgctttaaaaaaattggttaaataaattgcccgaagaaattatcttaattaacctagagctaaatccctaattaataaatgcatttaataatcgaattcggcgtggtggaatttttcttgagttccccatgctccaatacattaacatgatttttagtggaaattttcagagccttggaaataattttaaccaattaaaattgagcaagtgcaatatttttagtcccaggaaaatcctttttctcttttttcttttcttttccctcctttttctttattgggccgtcggcctatccctctcccgcagccccttctccttgtgggccggcccaagccgcccctccctcctctctcgggacgccgacaggtgggccccacctatcggtcgtctcctacctccggccgttggagccggagctccaaccgccgctgccgccgaaaccgccacgccgccgccgtttcccgccttctccgctccacgtcgcgcctccactccgcgcccacacctcgcgctcacgtcgccggccctcccccgcttctcccgcccccacgcgcgcccgagagtgggcagggttcaatttgaatccccctctctctcttcctccccactcccccatgtcgccggccaaatcggccaccttcccggccccgtccgccccctcccgcacctttaaatcactcccccgagctccctctatcgtttcccccatttgccgccctctcccgtgcccctatcgctgccgcgcctagccgctgccgctgcctatctccggccgcgcgccgctgctgctagagccgccgccgcgccgtgcagtcgccgccgtcgcgctcaccgagcccacccgcacctctgccgccgcttcgttgccgcgaatcaccgccggagctccgattccttcgcgccgccggtgagctcgccattgtttccatctccggccatttcttctcgccgtgccgcggctcttctcttctccctcaccccttcaccgccttttcccaggtcgcgctgctcccgtccgctgttttccgaagcgctgccgccgctcatcccctcccactccggtcgccgcccctccggtgacgactccctccccctcccttttctccccttcccgcgtgcgccgccgcctttggctgtgccgccgcctttggccgtgtcgccgctccagccgtccgccgccgcctttcgcgtcgtccgccgccgcctcccttcgccggtcgtcgccgtcggcagccgcgcacgccgccgccgctcgccatggccggtcggtcggctttgtgccgagccgagccgtgcctagccgccgcccgcgccgtccgatcggtctcgggccgatccggtgtcagtcccgtggaccggcggtggaccacctgcgtggtcccggtccacggtagaccggccaccttgtgccgctgccagtggagcccacttgcccgagccccctctccctgcccttgtgcgctgacaagcggagccctcctgtcggcgcagccgcccctccccccttggatgacgtcagccctgggatttacagcgcaataaattgattaaggactttttctttattagtaaaaacacagtttatcttctaaaattcatatgtaattcatccgagcttcgtttaagtccattcaagtctcagtaaattcataaaaatgcaaagaatccattaaaatgattttgtttcctgtttcagtagtcttatagcatgttttgcttgtgtgctttgtttgtcgcgtagatttcggccgtttcgtcgatccgcggtttctcgaagacgttgctgaggtctcatcagtgcgagagacaggcaagtcatgctttacatttgatcatattgtacccaatttacaaataccttgcatttctattaattgttgcactcttttacaatgtcatgtgggatgggtcctattactcagccatatatcgtttaccatatgccattgataactggggtatcaaaatgattagatgttggtttaggaaatgcttagccatgcttagttcaactagtacacaaaaggggatcacattattacatgagcatagttcaattttgactatgagcatagttctggttggtgccaccgcaatggtgttagttatttaaaatacactgaatggtgggttgtgcgtgcatggttttgctggtcgcacccatggcaattaaggaccggttcacgggaaacactgggagacttaccgtgcttaccacaagcgggagtgggtaactgcttgatctgaggtatagctcaaccctttcctaggcaccggtggcgagggtgggcgtgatggagttgggtcggccggggtgtccggttgtctagctgccggattcaccgcggcacaagaggggaccgcccactaccttttgaggggtgggggtgaaaccttagcatggtgtggatggttagggaagggttatgaggagggtcttgtcacgatttccccctttgcagtgtcatggtgatacttcggggcatggcgacatgtgtggaatcgtgtcttgtgggtacagttgtacacctctgccagagtaaaactattcgaatagccgtgcccgcggttatgggcgatcaaccagatttaccgtgattagtctcacccctagtttagcttaatgaactggtgtagttcaggtggttggttgggcctattgcaatgtggtgtagcgttggacaatgtttggttaatattgattaattactacaactgttttactgctttcaactactgtttttaaatgcctgctttgtgcaaagagcctttagcctccttcggttatatcctgcatcatacctcctcttccggtatgacttgctgaatacagttggtagtactcagtcttgctctcttttcccccacaccagagctgaagatcttcctagtgggaagtgtcttaccgaagttgatttcgtcgctgtcgtcaaggattacctgtggagtggagtcaccccgctgcagaagtcaagtttccaagtctagctcgtttttcttttctgctgcatttgtaatcatctccatttttgtaagacgtggatctgtatgtcaaaaattgtcgtttgtgtaccctggctggtcctagacagggatttaatgcacattcagcttcgaaattctggttcgtgaatttctgggcatgacacatgtcttcttggcactcagtccactcagtgacgaagtcggcta

SEQ ID NO: 7790 - DNA, 12390 bp, Oryza sativa
agaaagagaaaaaagaagggagaggggagaaaaaaattaaaaaaatccatgtcattgtccacatggcgtgccacgtaggtaagaccacagtcaaacacggttttggaccggaatgatacaataaaccaagtttagggatcttgatgtgcactttgcaagttcgtggacctaagtgaaacctcatgacaagtttaaataccgctggtgtattttactcttttttttaattatgcaaagtccgtcggatgccttgctacagaattccttgctttaaacattttttgatttgtggatgagaccacatatagatcttcttaattgcaaggaaataagaaatacctacggtactgcagatgcaacgatcatatatcgatcttccttggtggcttggtctaaatgaacttttagatttgtgtattctcaacccttcaaatttacagggtccaatgatattagattagaaataacttaaaaacatagaaactaatgttgattattttttgaaaaaaaaacaatgcgatcgtgaagcttgctctatatgtgcagatatcttcagatatcttaatgaggaagcatcgccatatacctgtgtcaatggtaatgcagatatagtactgggtgcagataccctaatgagtaccaagtgcttgatcgatgcatgataatctctgtccaaggctccaaaggcattccggtttacgctggcagtgatctcggcaaagacagcaataataaggattctttgatttcctcgtaaaagaagcacatatggaattggtagctttactaaagtttacaaccgaattcgattctgtagcatgaaaataggagatcagagcgcatctaggattttgttagattttggaggctggtatgcggaaggggaaggaggtggataggaccggtgtttataaattattagagtgtcacgtggtggtttaggagtgtgtgtaggaggccatgtgacagcttaggagtgtttatagggtgtttcatggacttctagtgtataatagatagattgaaagatatggtagagttctaggatttaattgtataagaatttcgggacctactgaattgcataggatttaatagttataggattgtacaatatttcttgttttcccagtgcagccgcaccgctagccccctcaggggcggccctgtcatttatcaactcaaataggaaatatgcaataaaggtttgggagcctcttactagatcgtgccatcccacatcgagcgctctcctcttcttgcgccctccaggatttgctttccgactgagccacgccatcccacagctgaaagcacatgtccacacgacgcatactaactccgacgcgctcccacatgaacaagcgttagagcctaccgtacaagcacacacgatccccatacacacagacatcaagtgccacgaagaaacacataggagaatgggtgcggcgctagctaggattaactcaacaggaccacataataaatgtttagctagcttgcactttgtctgaattcctgaagaacactgcaaaattaagggcgatcgtaggtcagttgctatgatcaaaatgcaacaaacaagcatacatgtaaagcccagcagattgatggtcttatacgagaggatgaaccaatacctgggttccagcgcttctgatttccaactgtgatcagtggctactgaatatggtgctcttcaactccacatccatctgtactgtcttttagctgctcctcttcatcttcctttaccattcgatcttgcaagtatctccgcaatacgagagtgggacggcgggtgtggatgctgatcacgttcctgatggtagcttccactgctttcacgtccgttatagtggcattggtacagcaaagatagaaggtgagatgctggaggctggaaaggtgcacatagctttgctcgagcccaaggtttgatgctgcttcccgtgcatacaaactaaaacaaagcctctggagttttgggcatagctccaggttcaaacaacaaccaatgcaggcgactgttgtcgaaaataaactcctttagacatggaaatccactacagcctacagtgagtccatcccccaggcctcgggacaagaatacttcaagatagagaagcttgggtatgcccaaggaggacgaccactttctgatcaatgcttgtaatattccagagacgaagagaggcaagattacaaagggagaccatccgatccgaaaatttagatattccattgccatcaataaaaagctctttgagatctggagcactactgcaacatgaatccatcaatgtatctgaaaactcaggagaacaagtaacatgtaatgatcgaaggctatttttacccaactcattgagagtgaagtaaaaggcttccttgtacctctggaaccttgctacatcacctccaaaatcataaattccaggacaaagtatgcgcagctgccttaatctggttagccaacagagagctcttgtaaacattttatgctgtaccgaatgctattaagatatagcacctccaaagcttgcaaaactccaatttcatctggcaatctcattgggtaattaaaatttaggcgctgtagtttttgcagtctacaaacacttgacggaatgtttatttcgtcgacatctcctgcatgaatagttagtgtttctagttgctgcagccgtccaatatccttgggcagctcggtaacatttacaccaaaaaccttcagatacttcaactgcaaaaggtatgttaggctgttaatatgctagctatccaggttcctacaccgatacagatccaatacccgcagagcatggcatttcttaaattgtggtatttgtttcggtttaggattctcaaagaagagcagcgaacgaacttgtgaacagttgttcgtaatcttcttgactattctattatctgtgccattggatgggaaccaggtcctccgaatcttcttgaaagaactccaatgctgttgttcatccactattgcgacgaaattttgtccagtcgataggcttatgataagatcaagcacaatatcatgaactcggcaatacttggcgctgccatcatactggatactaactggttggatcaagcttctatttataagctcattaaagtagttctctcctacttgctcctgtgtttgattcttcacttcaacgatgaatccttcagctatccatctccatataaggtcttgtctatcaatttaataatcctctggatacatttttttttagataatggaatataatcccggcctttactcaaagagctacagccaatccactggatacatgcttagatacaacggatattttttcgggggataaggaagatcataataactgagcattaatattttcctcactcgagcctctgagtttagtgaagcaccaatagtatcatgcacttgcacccactggtcctctgaatcggatttggttgctagcaagctagctatggagattatagctaatggtaaaccacgacatttcgatatgatggcatgagagatgtcttccaggtgaggcgggcagcaattctcagaattaaaagctctccggtaaaataatctctgtgattcttgctctgctagtggctgcatgctgtgaagatagccttcagatgtggtacggctacacgctttagctacggcagcgtttcttgttgttgttatgattatactgcccaaattattctctgggaaagcacaactgaccaccttccacgcacctatgtcccaaatatcatcaacaacaatgaggtacgtgagtacaattaaatttatgatccggtcatcatactttcgcatcaatgtggatgaatgatcatacataaaagctagttaccactcatgtagctagaatattacaattaagagtgcaaagtgttttattgggtttgttctagttctagatacaaccatatctgtctgtacgtttcggatttgctatatatcttgcgacagaaaattgaagttggaaacttccaaatttgagcatcttttccatccttaaaggcctgtttggttggggagagtttttaggatggattgggaatttagagggatgaggctattaagtgttttattttgttgggagacatgacaattttggtgggatggggatggagaattgagaaagaaactcctttcttttcaatacctgggtagggacaggtaattgggagggaattcctcctttactttttctaagcaaatctcagccatccatttttattaatgacctaatctccaactaaactctctttaaatttccatcaccgctaccaaacaagatattaggattaaaaatcaaattctcatcttaatctcatcatcaattttctcgtgtaaactcccaatccccttccctcgagttaccaaacaagccgtaagaagataacatgaggtacgaggtaccatgaggtatcaatcttatctaaccgttggtttaacaggggtaggatcgtctaatgaaaatgaggtgcccgtgctaatgaccgcccactcggccaatagggagttcgtctgtgccgcccacttcttcggcgcatcgaagcttccccggcgccgccgcatcgagcctgttttcccgccacggcgccatcgcatcgaccccggcgcggctgccgccgcaacaaggccgccgtggccaccgtggcatcgaggccaccgcgggcgccgccacatccagcccgccgccccgccgtgggcgctgccgcatccagcctcatcgagacagccgcggccctcgtctcatcgagggcgctgtgcctgccgccgtcccgagccggcggcgtccgctgtcgcatcgagccggccgcgcctcccgtcgcatacaggccgccgcctgcagccgcatccagtcgcacagtgccgcatccgcagccccatataccgctgacagtactaattttgaggaccagccgcaggtaatttgatttgtgctgcatctgataatgtgtggtagattaggaagctctagtttttatgattgacagcaatgcttgaagtaatcaaggtggtcctttttttgggcaggttcattgcgccgtgtaaaatggaagcagttggtagcagtattgaggaggaagagtatgctctactattatgggcatgaaatttcctagtgagtatcatggttttcaattctacaatcagtatgctagagagagaggatttaggaaggaggtatatatggacagttctaacagaactagggagccacgggcattatctcgctgtggttgcaaagctcaatttgagataaaacatgatgaggaaaaaggaaattggtatgtcgttaggtttgaatcgaatcataaccatccgttgtgtaaagctgatcaagtgccatttttgcgctcacatcgtagaataactcctgcagcacaggctaagatggtggaattgagagatgttggtttgcatcagcatcaagtgatggatataatggagagagaccatggtggttatgaggctactggttttacttccagggacatgtacaatttttttgtgaagctgaagaagaaacatattaaaggtggagatgctgaccatgctattaatattgagtattgctgttcctgtaatgagatggttttataacctcgttggtttgatttggttcctgtaaggagatgcttagataacctctttggaaaccttgtttttcctgtaagagtgccttgatgaccttgatgattcctataagaggagtaccttgatgaccttgatgattttgttctttcatttactgtgatgatgtggtgtgagcagaaattattacagtgcgcacgcaagtagctctgtttgtttgcaaacacatatcagcaagtaccttgatgaccttgatgattcctgtaagagtaataccttgatgactttgatgattttgttctttcatttactgtgatgatgtggtgtgagtaggaattattacagtgcgcacgcaagtagctctgttaaattgcaaacacagatcatcaagtacctctgtattagttatgcaactgaacatgcctgtcatcactaactttgcttttcggtatgtaaaaggatctgtttgagcatgtaaaagttatgcagtccataatgactgtctgaagtgagcataacattccattgttgtgatcatctttgcaaaattctcaggtccatcacaaaatgcacacaaacaggtggcgcatagtaatagacacacatacaggggcatcagttttgcaatccagtgcactagaattgactgatagatattttacatcggattaacatagcatacattacacatggtgcactataatggactgataagtcttaactgataacctaggcaaagtgcatagcatccattacatatggtgcagctagaacaaacagcataatactacatatggcaggaaacaacttaatactagatttcgcctaataccacattaggggggagggggcacatagatgttgttcatccttcacagttgttgaggagctcaaggctaagagtaagctcagcatcgttctcactgaacatgaagacacaaacatcacatagctcgaataatttgtctccaaccaacttattccatccagttgtgaaggttgcttgcttatctttcgatttcattagtctcatcgggtaggaaacagttgatccgaccacagtcacaagcaaatcttcaattggaaggtgttcgtttatgtactgctcgctaaatggtatggagaaggcctgaaaaataaatacatgacagttacactcaggacaagtacggctgaagaaatgcaaaagcggtggaattaaaaggtcaaacacaccatttttccctttttcagattagtcttatgtatctcatacacatacagtgaaatcttaggcaaattgcttgctgcaatgcaggcaagttggtactgcatcttgtgtgttaaaacaatgtatctggatcaaaatgtattgaaatttttctttcaaaatatgtctttcaagctattctgtatgatttctgtttccctaatttcaatccaactgtaagatttttgtttccctaatttcaatccatcatcacccatccaaaatatactgcccaaacattgaataaaaaccacaaattgcaacgaataacacaaaccttttcgatcggtctccatcctctctctgcatgttctgccacaccaagtcgggattttggactatttgccatcctcctgaatggcgtattcccaaatgccatcttcccaaataactttgatgatttgccatccgggtccactgatttgtttctattttaccactattcacctcaaactcagcaaattgagtagaaaatgacctcactacccctcccatttctcctttcccttcttccttcttgctctcaggcattagtgatgtggcggagcagtcttcggcgtcttctgcggcggtggcatcgctcatgctgctgctaccctacaagaggttcaacagcccatacatcacacaaaatcgagcctgacaccacccgtcctgtgccgatgatcgatctcgccagtggagtggcacccgcgcacatggatagacacccagagaaacttctggaacacagctgccattagtgccaaccggatgcgcatccctgtccaccacgagtcgagccaaagaaataatgtcggctatgaagcgactcgacaaacttgatggctggtggtgcattaactgaacaggtcagtaattgaagccggtgagcatgatctccccaaggtagcacatgaataggacgtctacgggacagctttcctacgctgacgtcggcgtcgttgtccttctgatggccgtggcagctccattcatcggtgaacctttctgacacgcatgtcatgttgtactcggaggtaatgagcgggatgttggcgaggttgaatgccttggaatgagggaattggcaatgcacaggatgccacgagaaggccagtcagctgaacacgccggtgttgcgtatggaaggaagaagaaagaaggaagtggatagatatgaggggcaatcaactcattttctactcaatttgctgagttggtggtgaaaagtggcaaattagaaacaaaacagtagaccgaatggtaaatcgtcaaagtcatttgggaagatggcatttgggaatacgccattcaagaggatggcaaatagtccaaaatccccaccaagtccgaatcgctgccgcaaacatcgccgacctcacgacgaatggccgctacaaccatcgccgagttctccggcgaatggcatcctgccaatgccccgccgtcgcatcgaggctgcctcgcaccaaggccgccgtgcccgtcgtcacagcaaggccgccgcgcccgtcgtcgcatcaaggccgccgcgcccgccgtcgccccaaggccgcctcgcccgctgtcgccccaaggccgccttgcttgccgtcgccgatgaaactccgatagccggccttccgccgttcaactcgaccaatccgccttgccgttcaacaccgctgtacggttccctcgccgatttagggttaagctttccccctcacacgataacagatgacgcacgcgaaattacaaagttaccctcccacccacggtaccgcgtcaaacagaaggagcggtaccatgaggtaccgacgaatcctgtccattagatgaagccagatcaacggtcatgatttggtactgcatagcctcaaggacagtaaaaaagctctccaaatttaatttgtgctgtcagataggcgttaagattcacgattcacgtgtgggggaggaaatgaaaatgtatccgcgcatgggatgaggatcgactcatcaaccgaagctagtggttgtgctagatcgtgattttatttgtaatatattagacctatttctgtatttgaagagaaaaaaaactatgtttgaaatctctattcgctgttatgttccacaaaaattagaaaacataaaaatttgtgtaacttttatctttcaggaatcctcgaagatgactgatgaggttctgctcatcttcagatacatctccattgctcccaagtcctttaagcatatcaaccaagaccttccttatattaggggtacgtgaaatagacacaaaagttatacacttaaaatccccttgtattgtcttgtacaattcattagctagagttgtctttccaagaccacccaaccaacaatcgaaaccactttgcgttgttctgatgaccaatctttgtgcatgatccacttaacgatcttctcccttggaccatcaatccctacgagcctctccacctcctcatacaatgccagcagacggggatcaatttccaccatacttggctcggagatgaaatcatcgatctgataccgcttgcgacgttggtcctcctccataacccgattcttcagttcttggatacactctgtgatctggtgttttccccatagcttctttatcttgcttcctatcttgcgaacaaagttggcattggcatcgccacaactcaacttgtggatgaagaggtcgatgcaatcctcaatatcataagctagctcgagcatgttgttcctccactccatggtcggcccatcaagcttgtcctccttgttcgatagatgctcaagcaagacactgatgctgctgagctcattcctcaaaaagatgatatccttcttcacacttttgagcagcttgtactctccctcgatcaaggaggaaagcttggttagaaggggattcagcaccccaactgaagcactcacgattgctcctgccatctctagctccgttcctctcccacacacacagtagcagctatctcaattgctgttatgctaatgagagactaatccaaccatttgactttaaggtgtagtcttcacctgtgcacagtggttgtcgcaccatttgattcctttcaagtttaataggctattgattatttcctcatgatccacaccctgacaagtgacagggttcttaattaactgactacagagctcgagtctcgcacatgaccacgtgatctaacatgcttcacatgcctctgcctcatcttttgttgaaaaaaacacaacccagtcaaaaaaacaaatggcaaacctgggtgaattttagtatgatattaattccgtcatggcagtactatttgtgaaacatgagaggattctttgtggtaaatctgcagctgtatgcccaatcaataaggaaacatttctttctgtcatcaactcggcgggcctagagctctcgccgacaaagttataggctagattagcgttgtgacctctactcgtgagaatcaaatagaatgtatagggttattggactgaatcaatttaaaaatcccattatttttctttctgtcagcacccttacacctgccatacgctatatacataaatacatatgaaatcaatataaatacatgtgaaatcaatatgttgatttaatctatataatgaacatttgtcaaaggtaagtctttcggaaaatatggtgaacagaatgttggcacttggagccggtcagaccgagcagtgggcgccgatcagaccggaggtgtccgagcggtctaaccgggtagcatgacggtctgaccagcagactccaggagggaatcggtttcgggttgttttcgtggaatttctagattgcttcatgtttatgactactagattgtttttattcatatgtgatactatgtgtgctgatatgagtcaagtcggtgcggacttgtatacggatatggagttttttagttgttcgtgcgcaggtgttgcttgaggccatgggagtatagctagtgatggatcgggactagacttgggagaagttgaggtccagatggtcaaggatatacgtgggatgcttaggctagaaaacaatgcacgtgtaggtgaaggttttcatatgacatacacgtggtgttgtatgcgtatggaaagagaagccaaatttagattggagttcaagtttgaaaagattagggtttacagttgtatggggatgttgtttccctagtttggtgggtttcttatgttatgagtcctattttgtaacaccctgaaattaaaataaaaatatcatgattgaaattgggccgaatcaaattgggcaagtcctaccagtgcagcccacctcccctaactagtaccctagggaggggcgactcccaccttcccactcgacgccgccacacctttctcttggcacccatggaactcatgtattcttttctcccctgttaaccctactccatggatctcctagaaccatagccctaatcaagaatctgattggaaaaatggatcgtcgaggaagaggagaggagcaggaggagtggtgggttggttttcccatcatattctcacaagttctccaagcacaccctaggtgaggcattcctctcctgtagcagaggttgtaggttattttagggttttagttcatcgttttgggagggttagaggatgggttctaggtgctgtgttttggatcgttagttcggggcgctgtcagattttctgtctctctgtatttcaccaattagaggatcaaaacgatttttgctgcgaaagcttataacaaggaagttgtagaggttttccttatctttccatattggtaaagtacattttgattaggagagtagaactccagatatggttgctttagtgtggacaatctgaaatcttgggcagattctgaagcttgttttgatgtgcgctttaggccatataaatgacagaataaaaatatggtttctacacgaaagttgtaggtattattctgtagtttcctaaaatgtattcgttttcagtgttaaacttaataattactgaagtaacaatgttgtttatagatgggagaggtgatttctgttttgcttgaggttgggatagcgtcgtaggagcgtgccacttaatttattatagttatatttgaatgtgttttataaggttttgttttaatttattatagttatatttgaatgtgtctgctgaggttatgtttgtgattatgtggtagtccttcagatcgtgtatgtcagggttatggataccacatacctaatagtagttgactaaatctcggcaggatccaccacataccatgttttatacggaaactgacctcgagggagttccggataaggaaagacaactagagttctacatgaaaatgacaaggactactcggattgtatccatattgatttccctagttctacttggacaaggagacacctatgggtataaatacaagaccccctaggaagagagagggggaccacctcaatcaacaccgccacaatctacggaacaatagatcaagacagaagatcaacatagaagcctacatacgccaaga

SEQ ID NO: 7791 - DNA, 44933 bp, Oryza sativa
agagttttatctcttcaatcctcttaatccacccagccactaatactacttcctattaacaagggacatcgtaattttttttctcactacaaaagttttcgaagctttcatttattagtctagaggagtagttagggcatctcgagttgcttctatatatggaaagagaattcatgcgctattgaacttttgaattaaagagcaaacaaagaaatgcatgtattgcaggtgcactaagtacctataaatcaattaatttagaaacatgcaaaatagcatcagggactaaaggtagtactacggaaattatttttttagatgactgataaccgaaatgcagtgaaccacatgtgatttaggccctgtacagatcagtgattttcatatataggtgcctatgataaaatttgcagtgtttttatttatgtaggcgccaaaaaaatcaaaatattccacattttactatgtatctatacacggccgtgtgtctcaacttataagtcacgcaatttttcgtgtaaaatattcacgtgcggaatatataatttgaacccaagagctctcattccatgcatatgctccccttgacatcttacctgtcaaaactttcatgactataaagcatattatgaagtttttaacttgacctctataaaaactacttgtaatacatatttggtacttgaaatatcatcaaatgagaaaagtaatcaactaaaaggttctctatccaaggttgtctgaaaaagtaaccaacgaaaagtaatctcgttgagctctacaactttaagtagagcatgtctccattcgaggtgttgtgaaaaatgaaaaaatatggtttataaaaaagatccaagagcttttgatgaatatttaggcctacactaattaattaggtagtatatataggctgttttctccgttcgctaatcggtttttacaggtggcacttgaaaaacttcctctacatattaccctttttaaaaatatatcttaaaaagtatgatcgatatttggccccaaaacgatctgaaatgaaaaagaaaatttaactaaaatgttgtatatctcaggagctccagttttcatgtggaagttgtcatcaatatcgtgaatttcttcaataaaaaaagtgacttcacaaacaatttcataggaaaaccatttgtggaaatagacctatttcataagcacattatctctttgaatttgtatttcgcaggcagcctcagccatcttcataaaagcgtctagaaatttaatcgtatgctcccataaaaaaatcattttcaaggatgaacttggacaagcatatgttcaaaagtttatccctagaagcatatataaaaactatatattttgtatgtataaatggtgtctatatctatatttatatatacactaaaataaaaaacgggaggttcactttttattagagtaaattgcataggcgctaaatttgtacacctatgttgtctacataccaaaactctcgaaatgcatatttatattcagaaatttatcccggacgtcatcatagatctcctctgaacttatcccagacttgtatgtcccaatgagggtcgggcccatatgtcagctgtggagattatggataccccatatctatatgacagttataatttagtcggatatacggtaccaaatatagatagaatatctttacgaggactcgggttagtttctaacttgtatgtcaaagaaatacccgagatcttagtcggttacgattgtattttacctgtaatcgcatattccgttagggatatggactgtattttgtaatatggatcccttcccctatataaggaggggtccgggttcctctcgggacgatttttttccctagatcatacaatcaataatctactcggcggaatcatccccggacaggagtagggtattacttcttgaataagaaggcctgaacctgtataaaattccttgtctccaaacctatccacttttctagcttgatagctaccccttttagtattgccgaaatcttgtttcgacagttggcgcaccaggtgtcacgcccggaatttctatccaaaattccaaacgcttacatgtgtgtgaaccctcgtccaggaatcagccgaggcacacaataacaaattgataatagagtacaattattactcaaactattaagcatataaaatatcattacagaggtagatagttcctctcaatcaataaagatctaagcagcggaaaaaaataagataaacggcgcagacggctccactccacaggcagcttgaccaaggctacacctaatcctccacaccatcagcttcactgtagaactcttcctctgatgaatgattgcaaggtgagtatatgacatactcagcaagccacgcagcaaatatgcaagtgcacaggataacaaaggatggcatagtggggtttcatttgcaaaagcagcatttagcaaacatttgagaatttaataaaacagttaagtaattaaacaatattaatccaacgctatacaacataccctgttgcataggcccaaccattctgaacaaccatcccggctgcacagttctatctccaaaccaggaatataccattccaaaccaggagctaatcaaattattaccaattatagcatcatttaccatggtgagaagggtgagactaatcacgaaagacattgttagacccgcccataaccgcgggcacggctattcgaatagttttactctgatcagaggtgtaccactgtacccacaagacacaaccccacatcatgtcaccatgtgcctcaataccaccacggtacctcggaaaggagttgtgacaataccccttatacaacacaatccactgcagcgcaccttcctggatcataatcacccccttataaacaaggcatggactccccagcgacccccgtgggcttatctccgccacttctcagtctggtgccccgcaatgaaccatgctatacaaaagataaagccgttgcccatgctggcttgtggctggcacggttaatgtttcacaaccgaaactcgtgaaccggtccttaattgtcatgagcacgaccatcaaaaccatgtgctcacaacccaccattatcaggttttagttggcacattaattaattaactaatcacgattgaccatcgtgaactatcattaagccatcattaaataatagtgagtcataagttatcccaaaagtgagctaatgtttctaagcagggctaagcaattatatctaatatctagttgaaccaatatataaagctcaactagtcaagttataattacccaaggtatcaagaaataaagtaaacaagaacaaaaggggctataacaaagaataggttaattccacccaatgacattcgaaaataaatgcaatagttgaaaagaaacaatagctttaaataggatcaacatgctcaaagggttgtttgggatctgtgtgacttgccttgctggccttggaactcttcaaactcttctccggcgaaaacggactctccggaaacgacggaatctaagcagaaaagagcaaaatcaccaaaacagcacataaacaagcatgaacagtacatgtggatatttttaatatgtagatctcaattttagaaaaatttagagacttgaaccaactaaatcggagctaagatgaattagttatgaatttttaaagattaaatcggattaaaacacttatatcgatttaaattgaattatgacgcaataatgaattatttttgaaaaggaaaagaaggtttattgcgtcagcgggctagggtttcggtggaccgggcgcacgggcggcggttcacgcgaacggacggccgagatcgaaccaatccaagatggacggccgagatcgatcgggtccacggcggctcacggcggacgaccccgatgacgtcagcggtgacgtcaccgacagccgcggcggctcggcggagcggacggctcgggcggcgcacgctcgccggcgaacggcggcactccggcacaaacggaggacaccagcacgtagaggacgacgcggcgaacacaccggtgaccaaaacggcggcggaagaacaacggacgacgacggcgacgaggaggaaacggcggaaaccttcgggttgacgacggcgacgaagctccggcgatctccggcgacggcgaaggggcggacgaggacggcgacgcgacggcgaacacgacggcggccttcccgagcgacggcgacggctgaagcgacggcggcgcacggctggagcgacggcgacgacggcggcgctagggcacacggtgctagagcttttccggcgacgagaggcgaaggcgaaggtggcggcgggtagaggagaccacggggagccttttaaagggactcggaggtggcggcgaaggcccacggcgacggcaacggcgaaggaaagctcggcttggagagagagagagcccgatctgattcgaactcgaatcccttgatttccaaaccgatttagccgatgattccaaaggagaaaaggtagaggagatcccgaggatcatttcccctctattgattcggccggagaaggaaagggacggccgaatttggaaaggaacggcggcggcggctcggcggcggcgcgctagggtttcggcccgaggaagacgacgggcctgacaggtgggacccacctgtcagcgaccgaacgcacgcgcgcggcgcgggcggctgcggactaggccggactgggccgaggagagagagaaggcggattttgggccgactttcggcccaaagccaaaagaggactttttaaaacctttttcaatttaaattatttcttaaatgcaattccatttattaaaaatacttccttagctcaaataaatcccagaaaaatctaggaattatagaattaagcaaagtatttaatgaaattttatctggccccattttatattggaatttattaattaaaattagatcttctcttcaagacttttaaaattattttctagaaattccatttaaacaacaatttatataatttgaatttttagggtgtgacaccaggtaggggcagcgtcaagtttttgccgacaaagtgcgatgggttccgtctccggcgtcgacgacctcgccttccctcctgggcaggcgttccggttcagcagcctcaacttcatcacgaacgaattcggcaagatctctctccttgactcggattcgaaccagtcggggagagatcaagtccccacgccgttcggtattctgaactcggccgagaactacttcaagatcatctctcccaagtcggctttaaaccactcggacgagatccaatctactcctcagcgaccagatcaagatgacgggtcctatccctcaatcctgatgagacttcctaatgatttggccgctgtcttcacagccaagacatctcccactcaaagatctaggcgagctccggcttcggccccgatccaatctagatccagagaggttggcgttatactccaacctcttgggacagtcttgacggaagagttggacggctaccttagctcccctggcgtaagttctcgaccaaccgaaatcctcgactacgacgacttcggctaccaccacgaccacgacgacttcgacgatagctataaggatagctacacgcctctctttttcggcgtattcatggctgacaacgaaacggaggaacagcaccgagctcgagaagtggaggaagagcgcgcacgacaagaaactgaacgtcgccgacaggaggaagaacgacaacgacaagagcgagaacgactacagcgtgagcaacaagatcgcgagcgagttgcaaaggaggctgaagatcgacggtagcgcgccttggaatccgggcgacgagcgagagagctcatcgggcaacaagacgtcgatggaacaacggtttttcgcaccccccagcagaacgcggttgcagcaatcactctcctcgacaccctccccaaggaagacgcactcaatcaagttgatcatgttgtcaacatcttgaaccagacgaagaccatgatcgctgcttcggttctagccaactccgcaagcactcgcacgccgactggtagccgggttccccatctccgatctcatgattatcatcagccaagcctcagcatcatcggtacaggatccgtcgcaggagcagggaccacgacgaatgatattttcactcgcctcccgaacgtcacggggaacgccgagtcgaacggcttcgctctccacctcgccaacgccccgtcgatctttgcgacacgatcaactagcgccatgcagcacgaggtcaccgtcattcaccagatcgctacgacgacgacgtggatggagtagctgccttcactaatgacctgcgtcgagtggattggccagccggcttcaagccgactggaatcgagaagtatgacggcaccactaatccggagtcttggctcactgtctacggactcacaatccgcgcagcaggaggagacagcaaggccatggcaaactatctacctgtggccctagcggattccgcccgatcctggctccatggactaccccgtggcacgatcggatcatgggcggaacttcgtgatcacttcatcgccaacttccaaggcacctttgaacgccccggcacacagtttgatctctacaacgtcattcagaagtctggagaatcccttcgagattacatccgacgcttctccgagcaacgcaacaagatctccgacatcaccgacgacgtcatcatcgccgcctttactaaaagcattcgccacgaggacctagtcggcaagttcggacgcaaacctcccaagacggttaagcagatgtttgaaaaagccaacgagtatgccaaagccgaagatgctattaccgcgtccaaacagtcgggcaccacttggaaaccgaagaaagacacgccggctgcaggagggagtggaagtaacaaccacaaggatcgcaagcgtaagcccggagaacttgtggcaacagcctctccatcttcccgacaacgttcccgcgtcaacaccttcgacaagataataaactcccaatgtccgcatcatcccaactccaaccatgcggccaaagattgcttcgtctacaagcaatttgcggaacaatatgccaagaacgcgcgtaagccttcagacagagatcaaggcacatcaaagaagaaagatgacgaagacgatgccccgactggttttcaggactctcgcaaagaactcaatcacatcttcggcggacccctggcttatgaatctaagagaaagcagaagctaacagaacgggagatcaatgcggtttagcctaacacaccccaataccttcggtggtcagagatagcaatcaagttcgactgctcggatcatcccgaccgagtggtccacccggggcggtaccccctggtactagacccagtggttcgcaatgtcaagctccgaagaactctcatcgatggtggtagcgcactcaacatccttttcgctaagaccctggacgatatgcagattcctcacatggaattaaagccgagtaatgcacccttccacggtgttatcccaggattgtcagctacaccactcggccagatcactcttccggttacctttggcacttgggagaattttcgcaccgaaaatgtttgtttcgaagtcgcttatttcgagacagcgtaccatgctatactcggatgaccggctctagccaaattcatggccgtcccacactacacctacatgatgattgtcacgaccggaaataacccaacgggcgttccttacgtgcgtgcattattccttgtcccaggaggcaaggtacaccaaaagttgatacaattcagagtttaacaagcggaagcgtaattaattaatttattacatgggcggcgaagacccagcacacaagaagacaaacgaaaaatagcggaagactagggcgacgaccacaggcgcttgacgacaggcacgagctagacaccaaagccttcatcttccaggggctcctcttctgggtttgggcaaaattgagcaagactgagtacaaccaccgtactcaacaagacacacccacaagtgcagaataaatgcaagggagtacaagggggttaaaatataaagggttagggtttgcagtaaacagcattaaaagacagttagttgctcaaagctattttgtaaacacgatcctagagctatacaatattattaatcaaggccgtgaacccacacgaacctgccttaacccaaggcctacgatgattcagaccgaactggcaacccgaccctaggtcccagctcgtcccaagccaacccaggccaaccattctacattttggttgttaagcaggttttaagaattaaaaatactaacttgggtacattgctcggcttgcccataaccgagggcgcggctattcgaatagattatactctgatcagaggtgtacatctttacccacaagacacatcttcctcatatgtaaccacatgccacataccaccacggtatacggacggaagacgtgacatagtttccaacccatcctagccatagataagagtaccgacccaaccccacctacggccggaacctccgggacaggtaggcaggactgagcccctagcagcaggacaccggccctgtgccatgacatctcgactactgagccgcagctcgtgtagccttcatttgttctagagatgtccatcgacccccgacttcgtccatctccatccgtgtacttttgtttataaccagactgagccacaaactaagccttacccactagacatgtggaagtacggtagtgctttgcaacagaggcctgaagaccggtccttatatggccgaggtgctactatcaaaaccatgcaccccgagcccagcctaaaaccattttgagggttttgaatagagggggaggtgtgaatccaattccacaataatccatccattccatagtgtccaggtgatgagaatattcccaaagtctagagttgtaaaaccacctaatgttgcctaattaactagcgaagcatctacctaaaatcatactagtggtaccatgagtagataacaataataatatcaataacaataataataaggtcataacaaaggtaaataggtatggctaaataaaacagtgataacgcgggaatttaagtaaagcgataatgcaatattttaaatcaaaataattttataaactgggattcaatatgctcaaggatgatgtgacttgccttgctcgctttcccaaacgtcggcttcaacctccacgaagagcggatcttccgaagctgcagcgtctacacgaccaacggaaaagaaatggcttttactctaataaactccatataaccagcaggaacaaagcacaaaaatgggttattgacttcataaggaaaaattagagacttgaacggtccaattccgagttcaaatggccaagttatggccatttgaagtttatatgctctttaaatgaatatttgcaaatttcttcatttaaattttaattaaaaaaaggtttattgcgtcagccgaggggaggggcgcgcggaccgggtccacgggagtggggcccacgcagcagccgcacccgagggcatgggcggctgacggccgggccccacgcggcagccgctcggtgcgcccggaggcggccacgccggcgcagcggcgtgaggctgcgcgcccgcgcccctatggtcgccggcggcggccataggcacggcggagcggcggccgagagaggggagggaaagggggaaacgaagcgacggtccacggctcaccccgggtcgacggcggcgacggaaacggcagtcggagtggaggaaggcggcggcgcggctcgggtggacagggtcgacggtgctccggcggtcggcgaccgaaacggagagctggacgaggtcggcgaggatgcggcgaaggcgaaggaggcggcgccgaggtgggaggtggtccggggcgacgacggcggcggaccggagctcggcggtgacggcggagagagagagcgatgtcgcgagctcgattccggcggggagagagggcggtgagtggcggaaacggtggtaggaagctcggggagggtttaaattgggttggaagggggagagagcgcccggaggggaaggaacccggtgcgggaggtccggccgccatcaatggcgctggcgagatttgaacgcgagagagagagggaaaaatatggggaaagggagaggggatcacggggagtaattccccccactttattgcacgtggggacggcgggaggcggcgggattcgcggctgcggcggcactagggcgcgggggaggcggcgggagcggcgggaggaaggggatgacgggtgggccccacccgtcagcgagggtggcgggcgggcccgcccgtcagcggcgcgctcgcggggagagggcggatgggccgcggggagaggagagagagagagagagcgggggggagagatgggccgggccggcccaagggagggaagggggactttttagggtttttctttttataaaacctttttaactttgtttatttcttaacaattattatttgtgctctgaaaattccactaaaatttagttacgtattttaggcttctaggaaatatacaaaaatcctctaagcattatttgacttttaactttgcacattttatttgttggagactttcacatggattttaattattctaggcataatttagaggatatattttagggtcgttttaggacgtgacaatgatgaagatgcctgctcctcgaggagtcatatcactatggagcgacatcaagcaagccgtcacatgtgacaaagaaagttgcgagatggcccaaacccgcgagatcacccttgctcgtgaagagatccgactgactacgactatggcaagtgaaggagaagtgcctgcgaccaagctgtcaaagaccaaagaaggcaacgacaaaactaagaagattccactagatccctccgatcctaccaaaactgttgtaataggagctgagttagattgtaaataggaaagcgcgctcattacctttcttcagaataataaagatatttttgcgtggaaatcatccgatatgcctggtattcctagagaggtgattgagcactccttatatgtcaaggaagatgccaaacctatcaaacaacgactccgccattttgcacaagataggaaagatgcgatcaaagaggaattaaccaagctgttagcagcaggcttcatcaaagaggtcctccatcccgactggctggctaatccagtcctagttcggaagaagatcgggcagtggcgcatgtgtgtcgattacaccaacctcaacaagtcttgccctaaagatcctttcgggttacctcgcattgaccaggtggttgactcaacggccggctgtgagttactcagtttcttggactgctactcggggtatcatcagatctgactgaaagaatccgactgcttgaaaacctcgtttattacgccctttggggcctactgctacatcaccatgccctttggattgaagaacgcaggagcaacctatcaacgcatgattcaaatatatttttcaactcagatcggccgcaatgttgaagcttacgttgatgatgtagttgtcaagaccaagcagaaggatgacttgattgcagatttagaagaaacttttgcaagcatccatgttttcaggatgaaactaaaccctgaaaagtgcatcttcggagtaacgtcagggaagttgctcggatttatggtatctcaaagaggcatacaggccaacccggagaaaatcaacgccatcctcaacatgaaaccgccgagctcccagaaagatgtccaaaatctgactggttgcatggcggcgctcagccggttcgtctcacgactcggcgagcgggggatgccctttttcaagctgctgaagaaaaccgacaatttctagtggggacccgaagcacaaaaagccttagaagacttcaagaaacttctcactactccacaagttttggcctcgccacatccacaagagccgctactgttatatgtgtcggcgacctcccaggttgtgagcacggtcctagttgtcgagcgtgaagaggaaggccatattcaacaagttcaacgaccaatttatttcgttagcgaggttttggcctactccaagacaagatatcctcaggttcaaaagttattgtatggtgtcttaattaccgtcaggaaattatctcactactttcaaagtcactcggtcatggtggtcacatcgtttccactcggggatatacttcataaccacgaagcaaacggacggattgcgaagtgggccttagaattgatgtctttggacatatctttcaagccacgaacttcgatcaagtcacaagctttagctgattttctcgccgagtggaccgagtgccaagaagacatgccagaggaaaagatggaatattggactatgcattttgatgggtcgaagaggcttacaggcactggagctggggttgttctaatttccccgaccggagaaagattgagctacgtattgtggatacatttttctgcgtcccataacatggcggaatatgaggcgctgctccatcgattaaggattgcaatctctctaggcattcgccgactaatcatccgtggagattctcagttggttattaatcaagtcatgaaagagtggtcttgtctaaatgataatatgaccgcttatcgacaagaggtacgtaagttggaagataaattcgatggacttgagctcacccatgtcctcggacataataatgaagcagcaaacagactgtccaattttggttcaaaacgggaagcagccccttcagatgtgttcgtcgaacatctttacgaaccgaccgtgcccagaaaagaaacaattgaagccatggatactcaaggcgtaagcatgattgaagccgactggagagaacctctcataagatttttgactaaacaagaactccctcaagacaaaaatgaagccgagcagatttccaggcgcagcagactctacgtcatgcacgagaccgagttgtacaagaaatgtccttcaggaattttgcagcgctgtgtatctttggaagagggaagacaattgctgaaagatattcattcaggcatctgtggtaatcatgctgctgcatgaaccattgttggcaaagcctatcggcagggtttcttctggcccacagctgtttccgacgccgacaaaattgtgcgaacatgtgagggttgtcaattctttgcccgacaagctcatttaccagctcaggagttgcaaaccatcctgctgtcttagctgttcgcagtttgggggcttgatatggtcggtccatttaaaaagcagtcggtggttacactcatctctttgaaatattgaacaccttcgtcaattttgtgcttaggcatttcgtttgtatctttcctctttgactgctaacttcaagtttttccttgaagttttcagtcggggggctactataataataatggaacatgatttttatcaattcaatttgcttacttgatttatcattgccatgcttgattttttggcttacacaatgaggactgaaagttttttaagaacttttgcgagttttagactcaataaggtttgacaaaagcttttaagaaatcagaggctaagtttgaaatatctagcacagcataaattcatcagtattgtacaaattgatcttccatcatcatcagaatcactactactaatcagtgtcagtcttttcatcgtcagaattatcagacccagtcggccgaaggtcgacatcttggaatctctcaactacgtcagcagcaatcgtgtcagcggctttttgtgcatcattgatgaggttgagggctgtttcttcgcttgtcccgtctgcaaacccgtcaacggcgtcaatatcgattttggggtataaagatttggtcatagctaatgccatgcttgctcccatacttccagcctccctgatattcttgaagtaagtatccggagcgactctcagcttgtcgaagatctcggaagcatcaagtgtactcggaccggcgttattgaagaacatggcttggatgagtggggtagcggcattagcgactttatccctagccccttcaagcctattgatcttgttgactaagacatcaaactgcgcctgggacttgatcttgcggtctgcatcaacagattcacattaatgagtcagcatatagaagataatggcttttgaggtattgattattggtaccttcaacctcctttaatgccgagtccctctgtcttgccagttctgccttgtcattttccagagtttgaatctgcttctccagttgagatatcttggcagcttgcactacattgactctggttaatcaagattacaaagataacagcacaagttagttgggcagagtttgtgcgtatcttttgatgagccactcagttcaaaattggattccttgagctcagcaatccgatccctcagatcatgttcattcttcctggcaagttcttttgtctcgtgcagttgattcccggtggcttcgagggttccgagatggggggctaacctctctaaggttgccgttttagctttgttcctaagatgaatcctctgcaagacagtttaattagcgcttgaactaaatggcaaacgagatggttgagatcaggcgccaaagagcttacatttacaatgcgggtggcctggctgagtgccttcttcagcaagcatacttcttcatcttctttttgtttgtttattacgattccttgaggttgcctatcatcgtcccaccacttgactaggatgggagggcgcgagtcttcagctacttgtatacggggaatttcttcttcgtcaccaatcattggtcctaatgaatccactgacaaaggttagacaattgattagaatcatttggataaacacggttccaggcaaggtgtttacctgtaatgatttccggacggggacgagtcgactcttgcgtcttaacgggagatcctggtgtcgggtcactgctggtgtcttgtttacgagggttgtctgcctgagctccaacttctggaatttcttggcttgacccagtgcccgactggttttcagtcgagggctcctgattaactccggctccagcttcggccgactcgtttctggttgagggttaatcaccagatcctacattatcggttgttggctggttatcactcggatgatcctcagcagttggctcggtttcttttaagttcgttcccgtgctggtcggatcagagtcctttccagaaggatctatgttagatggtttcctacaagttttgccatcagtgttattttcacgatgggagaatattaatacaaggaagattgttatatgatttatacctggaagactttctgatttttggttcaggacgactggaggttttcttcttcaaattagttggcttcggaggtcttccagttgctcctttatctctgagctttccggtatcatcgccttcgtcgtcacttggaactagcttcctcttgcgagaatctgactggccgactggatcagaagcatttggttgggtttcagaccgaattcttggtcctccacttccctgaccagtttggcggcgaggtgattggtgctgggcgattggaggatctgacttcaacaaagcaaattcctgggcgtaatatccttcattgttaatggattcaacaaaaagacaagaccatattttgtgaaaggttgaagtgtttgattacataccggtggaggaggattgaaggcattgaatggcacgactggcagcaagtgcgaatagctgacgacgatagcatttgagaagatcttgtacatcctttccttcatgaccttaaagtcaagagagtctgaatcttaacgatttggatcatgtttgccgtcaaactcaaaagctgtgcgggatctttctttgattggagctaaccggctttttatgaagtgccgagtgatttgttctccctgcaaaccctgctcctttagctttatcatgcgctccatcagttccactgcttgcgcagcttcatctcccattggcagtgagttccaagtatcccgataaactgaaggaagacaggagtactcggggagagcaggctcagggttttgaacataaaaccattgcgtgccagcctttatttgaggtcttgaagggcatgaagaagtatttttggcttagtgttcccctgagttggaaaccagcgcccccaacaacacatggtttgcccttgtttggctgaggcttaaggaaaaagatacggcggaacaaggcgaaatgtggcctaatacctaaaaaggcttcgcaggcatgaataaaattggcgatgtgaactatggagttcgggttcagatgatgcaggctgattccatagaaattcagaattccccgaaaaaatcttgaggttggaagggagaaaccgccatagaagaaatgagcaaataccacgatttcatgcgtatcaggggtcgggaatgcttcgccgaatgctggtcgccatccgatgatctcctttgccggaagaacgccgtgcgccaccatctccttcagattatcttccgtcacatcggagggcgcccactgactctcgaagctttctctttcttccgccatgaatgtgaactggatggtttaatttggtccgagatatggctggaaggggatggggaatcggagcggtggatgcggggagaaatttcgtgaagtttttgaggatggattggagcggattgatgaaccctagttttgctggcgcagctttgtactgtagcaggaaatggggaaaatggcgagagtctcggcggggaagacgaagagacgttttatttcacttcggcgttattagggtatcgggagtgctaacaggcctgggcctgtacagtgcttcagcccaatattattaccagcgtggcccattgtgatctttagggacttaggcgctttttgctttgccaatttgtgctcacaatgatgtgacccgatgctgctaaaatcctttttaatgcgattagataattctttggaattactacgatgcaaataaaaggtacccaacagaaaagtgttatattatttttgtaagcttttttaggctacaaaagctgtttgggttaatttgagatgactggtttattagtagtcattctcttagcatgttatatgcttattttgattatggtaaggattatagcctaggctattaaacttcttaattaccatgatctttatcatgtttggtggatcattttaagagtttcttgctcggattcctatcaaatatgtctatttttggaccttttgagtgtttatcactcgacccttttcgtattttttatccttgatatgttcaagatgagaagcagtcggctgggtattttactgagtaccatgcatgcttcgctataaaaccactcggctcttaactacatgtttagttcttcaactaatcacatagtcgggggctatatctaattaggtgcatctactcgatgcaccatgttttatttttgcccttcacagtctttgattttagcactcggcaagctggagcaggttgaattgaagtgctcggattactgttttttgtttcgagaaggctattatgtcaactgcgaaggtctcgggggctactgtggagattatggataccccatatctacatgacagttataatttagtcggatatacggtaccaaatatagatagaatatctttatgaggactcgagttagtttctaacttgtatgtcaaggaaatacccgagatcttagtcggttacgattgtattttacctgtaatcgcatattccgttagggatatggactgtattttgtaatacggatctcttcccctatataaggaggggtccgggttcctctcgggacgattttttttccctagatcatacaatcaataatctactcggcggaatcatccctggacaggagtagggtattacttcttgaataagaagccctgaacctgtataaaatttcttgtctctaaacccatctacttttctagcttgatagctaccccttttagtattgccgaaatcttatttcgacatcaaccctctagtttaaccctaagtccacctaagtccacctggtcagcagacatgtgtcaacaccggccagcacagacacaaaggtggaggtgcatggaagagctcatggaccaaacccgaggactcagtggtggcactgctactggagctgtgtctacaggacgggctgctcttcccgctgctcgaatcgtcaccgccgacatcatgtgtaaggccatagcgccatcgtcgccgcagatgtcggcatgtccgctgtcctctcgcttccctcctactttgggcgatgccaggaatgtgttcctcgacagcaaggaaagtattttgactcgttaaccatactgtattcaccaccagatctctttggccatccttctctctccgatgggctaagatcttgtcacccgtgtcctgtttgtccacatcatattctgcaatgccagtgacctccctggtgtgtgccaccctgttggacgcatcacgccaccggatcaccggcgctcgacctcttgaatgcgcgggtatatgtcgtatgcttagtttgagatatttataagagcaaaatattaaccggagaacatctgccatgatttcggcattaattacttttataatttttttaacctgttagttatatattctatcatatttaagtaatatctataaataattatttataatcttcttcatcatttgaaaagaaggtagagttattttatttagaaaacatgtcaacgaaagtaaaaaataagtgtaaaataaaagtaagattttttttctttttaattgcataatattatcatggtttattagaagatgatttgggacatcaagctccactaaattttatatagcctaatatgattgacatatacttgtgatataatacttattttcacttttttataatattgtgttctttttgctatttggttaccacgcacaggataggtgtctatgttcaaatggctcttttttaacttaaaatttataattgtggagattatggatatcccatatctacacggcgatgatatttggactgaatataggataccgaatatagatagaatatcttatgtgtatcctgggtttgtttcctaacttgtatatcaaggaaacaccttgaaacttagtcggtcacgactgtatttaatctgtatctgtgtattccgttagggatataggttatcttttgtaacccggactccttcccatatataaggggggtctgggcgcctctaggggcagaggttgatcttctccaaatcatacaatcaataatacactcggcggattcatccccggacaggagtagggtattacttcttttataagaaggcctgaacctgtataaatcctttgtctccaaacccatacactttcctagcttgatagccacccccttttattattgccgaaatctagtttcgacagttggcgcgccaggtaggggttgcgtcaagcttttctccgatcagtgcaatgggttccgtctccggcatcgacgacctcgtcttccctcccgggcagacgtttcggttcggcagcctcgacttcatcaccaacaacttcggcaagatttctctcctcgactcggaatcagaccagtcgggagagaaccggatttcggtcctgtttggattcccgaacgcggctgaaagctacctcaagaccatcttaaccgagtcggcttcaaaccactcggccgagatcgcatcttcttcaacgacaccagatcaagatgatggggcttacccaccagtcctgatgaagctccccgacgatttagcggccgtcttcaccacgacagcgtcttcatcccgtaggcctaggcggaagtcggcttcaacaccgatttcgcctagcttcagggaagtcggcgtcatcctccaaccactcggcacggtttcgacggatcagctggatgactacaacagctctcctaccgtcgactcacgtcctactgacatcgtggagtacgacgaatttagttctcgctacaacgacttcgacgacttcgacgacttcgacggaagcctagatgacaactacacccctctctactttggcgttttcatggccaataatgagacggaggagcaacgccaagcccgggagaccgaagaacgtcgccgactggaggaggagcatcaagcacaagaacaagaacggctacggcgtgagcagcaggaccgtgagcggatcgcgaaggaggctgaggatcgacgtcagcgagctttggaagcagggcgccgagcgcgtgatctcatcggccaacaagatgtcgaagggacaccggttttccgcacccctcaacagaatgcggttgccgcgatcacccttctcgacaccctcctcaaccaaaacgagctcaatcgatccgaccacgtcgtcaacatcttgaaccagacgaagaccatgattgcggcttcggtcccagttaactccgaaagcgtccacacgccgactggcagccgagtcccccacttccgatctcatgactactgtcatccaagcctcagcatcaccggcgccggatccaaccgcaggagcaggggacacgacgagcggtctgttcactcacctcccgaccttcatagggagcgccgagtggaacggcctcgctcaccacctcgtcgccgccccgtcgatcttcgcgacacaatcatacagcgccgagcagctcgaggccatcatcattcgccgaaccgccacgacgacgaccttgacggagtagcagccttcatcgacgatctgcgtcgagtggattggccagccggcttcaagccgactggaatagagaagtacgacggtaccactaatccagaatcgtggcttaccgtctacggtctcgcaatccgcgcagcaggaggagacaacaaagccatggcgaattatttaccagtggctttagcagattccgcccgatcttggctccatggattgccccgtggtacaattggatcttgggctgaattacgcgaccacttcatcgccaacttccaaggcaccttcgagcgtcccggcacacaatacgacctctacaacgttattcagaagtccggagaatcccttcgagattacatccggcgattttctgaacaatgcaacaagatctccgacatcaccgacgacgttatcatcgccgcattcaccaaagggattcgccacgaagaattggtcggcaagttcgggcgtaagccccccaggacagtcaagcttatgtttgaaaaagccaacgagtacgccaaagctgaagacgccgtcaccgcatcaaagcagtcgggtcccagttggaagcaaaacaagggtacgccggctacgggaggcggtggaagtaacaatcataaggaccgcaagcgtaagcctgcggaacttgttgcagccgccagtcactcttctcgacagcgttcgcgcgtcaacacgttcgacaagatcatgaactcccaatgcccgcatcatcctaactccaaccacgtggccaaagattgtttcgtctacaagcaattcgcggatcaatacaccaagactgcacggaagaactctgacgaagaacaaagcacgtcaaggaagaaagacgacggcgacaccccggcaggctttcaagatcaccgcaaggagctcaaccatatcttcggcggccccctggcttatgagtctaaacggaagcagaagttgactgaacgggagatcaatgctgttcagcccgacacgccccaatatcttcgatggtcagagatcgcaatcaagtttgaccgctcggatcatcctgaccgagtggtccacccggggcggtaccccctggtactagacccagtggtccgtaatgtcaagcttcgcagaaccctcatcgacggtggcagtgcactcaatatcctcttcgccaagaccctggatgatatgcagatccctcgctccgagttaaaaccaagcaatgcgccttttcacggagtgattccaggattatccgcatctccactcggccagatcaccctcccggtcacttttggcacgcgggaaaactttcgcacagagaatatcagctttgaagtcgccgatttcgagacagcataccatgccatactcggacgcccggcgctagccaagttcatggccgtcccgcactacacttacatgatgatgaagatgcctggtccccgaggagtcctatccctacggagcgacatcaagcaagccgtcacatgcgacaaggagagttgcgacatggcccaaactcgcgagatggcgtctgcccgagaggatatccgactggctgcagccacggcgagcgaaggagaaatacctgctaccaagacttcaaaaagtggagaaagcgaagccaagactaagaagattcccctagatccctctgatcctactaaaactgctgtaataggcgccgagttagattgtaaataggaaagcgcgctcatcacctttcttcagaacaataaagatatctttgcgtggaaaccatctgatatgcccggtattcctagagaggtgattgagcactccttacatgtcaaagaagatgccaagcctatcaaacaacgactccgccgatttgcacaagacaggaaagatgcgatcaaggaggaattaaccaagctgttagcagcaggcttcatcaaagaagtccttcatcccgactggctggcaaacccggttctagttcggaagaaaacagggcaatggcgcatgtgtgtcgactatactgacctcaacaaatcttgccctaaagatccttttgggttgcctcgcattgaccaggtagtcgactcgaccgccggctgtgagcttctcagttttttggattgttactcggggtatcatcagatccgactgaaagaatccgactgcttgaagacttcattcatcacgccctttggggcatactgctatatcaccatgccgttcgggctaaaaaacgcaggagcaacctatcaacgcatgatccagagatgcttctcaacgcagatcggccgcaacgttgaagcctatgtggatgatgtagtcgtcaagaccaagcaaaaggatgatttgatctcggatctggaagaaaccttcgcgagcatccgtgctttcaggatgaaattaaaccctgaaaaatacatcttcggagtaccgtcagggaagctgcttggttttatggtgtctcataggggcatccaagccaacccggagaaagttactgctatcctcaacatgaaaccgccaagtacccagaaagatgttcagaagctgactggatgcatggcggcgctcagccgatttgtttcacgacttggcgagcgggggatgcccttctttaagctgctgaagaaaacagatgatttccagtggggacccgaagcacagaaggccttcgaagatttcaagaaactcctcaccgagccaccagtcttagcctcaccacacccgcaggagccgttgttgctgtatgtatcagccacctcccaggttgtgagcacagtcttggtcgttgagcgcgaggaagaaggccatgtccaaaaagtccagcgaccgatttattttgtcagcgaggtcctagccgactccaaaacgaggtaccctcaggttcagaagctgttatatggtattctaattactaccaggaagctatctcactactttcaaggtcactcggtaacggtggtcacatcatttccactcggtgatatactgcacaaccgcgaagcaaacggacgtattgccaagtgggctttggagttgatgtctttggacatatcattcaagccccgaatttcaatcaagtcccaagcgttagctgattttgtcgccgaatggaccgagtgccaggaggatacccccgcggaaaacatggagcactggaccatgcattttgacggatccaaacgactttcgggcattggagcaggagtggttttgatttccccaactggagaaagattgagctatgtgctttggatacatttttcggcgtcccacaacgtcgccgagtatgaggcccttcttcatggactacggattgcaatttccctagggataaagcgtctgattgttcgaggcgattcacagttggttgtcaaccaagttatgaaagagtggtcctgcattgacgacaatatgatggcatatcgacaagaggtgcgcaaattggaagacaagttcgagggactcgagctcagtcacgttctttgacacaacaatgaagccgccgacagacttgccaattttggatccaagcgcgagacggcgccctcagatgttttcgtcgaacacctttatacaccgaccgtacctcatagagatactactcaaaatgcggacactcataacgtagctatggttgaagccgactggcgagagcccttcatacgatttttaacttctcaagagctccctcaagataaagatgaagccgagcggatttcaaggcggagcaaactttatgttatgcatgaatctgagttatacaagaaaagcccttcaggaatcctgcaacgctgcgtatctttagaggaagggagacaattgctgaaagacatacattctgggatatgcggaaaccatgctgctgcgcgcaccattgtcggcaaagcttaccggcagggttttttctggcctactgcagtgtccgacgccgacaagattgtacgcacgtgcgaaggttgccagtttttcgccagacaaattcatctaccagctcaagagttgcagactatcccgctgtcttggccgtttgcggtttgggggctcgacatggttggcccatttaaaaaggcagtcggcggttacacgcatctctttgtggccattgacaaattctccaagtggattgaagctaaaccggttgtcacaatcacagccgataacgctcgagacttcttcatcaacattgtgcatagatttggagtgcccaatcggatcattactgataatggcacacaattcaccggtggagtttttaaagacttttgtgaagactttggaattaagatttgctatgcctcagtggcgcatcctatgagcaatggacaggtggagcgagccaatggtatgatacttcaagggattaaagcgcgtgtttttgaccggctaaaaccctatgccggcaaatgggtgcaacagctgccatcagtactttggtctttgcgaactacacccagtcgggccacaggccagtcaccttttttccttgtctatggggcagaagcaatgttgccgagtgaagttgaattcgagtctttgcgctttcgaaatttccgtgaagatcgctacgacgaggaccgagtggatgacttgaaccgattggaagaagttcgtgaagcagctttgattcggtcggctcgatacttacaagggttgcggcgttatcataatcgcaatgttcgatcccgtgcctttttagtcggcgacctggttttgaggaaaattcaaaccacacgagatcggcataagttatctcctttatgggaggggccatttatcatctctgaagtcacccggccaggttcctatcgactcaagcgcgaagacggtactctcgtcgacaactcttggaacattgaacatcttcgtcgttctatgcttaagctttatcattgtatttccctatcttgactgtcaacatcaagttttcttcttgccgtgtcagtcgggggctatcatcataataatggagtgtgattttttatcaatttaatttgcttacttggtctatcattgccttgtttgattttttctacttagtctgcgaggactgaaagtttttaatagcttctttgggttttaggctcaacaaagcttgataaaagcttttaagaaatcaaagacttggctagaactatcaagcacagcataaatacaccagtattgtacaaattgagcctccatttgctacatttactcagtcagaatcagtcctttcatcatcagagttattattgctcggctgaaggtcgttgttgcggaattgctctacaacatcacttgcaatcttgtcagccgcactttgagcattgctgataagatcaagagcagcttcttcacttgtcccgtctgcaaagccatcaatggtatcaatttcaatcctcgggtacaaggatttggtcatcgccaatgccatactagctcccatacttccagctttcttgatattcttgaaatatacatccggtgcaactctcagcttgtcaaagatttcggttgcgtcaagtgcactcggaccactgttattaaggaacatagcttggacgagtggtgtagcgacattggcgacttcgtctcttgctccttcaagcttcttgatcttaccaaccaggacatcaaactgagcttgagatttgattttacggtctgcaaaacacatttataataagaatctgctgcattaaagagaggacagttcaaattgtcagctggcaataccttcaacctccttcaaggctgagtccctttccgcagccagttctaccttgtctcttttcaaggcttcaatttgtttctccatctgagccatcctggtggcttgcgctgtttgaaatccaaatgtttgaggatacagttatgacagcataaatccatggagcagatctggaagattaccttttgatgaaccactcagctcgaagtttgaatcctggagctgagcaattcgctcccttaattccttctccgttttcttggcatgctccttggcctcgtgtagctgttccctaacggcttcaagagttcccaaatgtggaaccagcttttctaaggttgcagtcttggcttcattacgaagatggattctctgcacggtggttcatggattagtcttgctaacgagaaaacaaagtcatcaaaggcagtcacctagaagacttacattcacaatgcgagtggcttctccaagtactttcttcagctggcacacttcctcatcttctttttggcgatttataacaatgccggaaacttgagagttctcgtcccaccatttgagtaagataggaggacgagagtcattagctgcctttatgcggagaatttcttcttcgtcgccgcttagtggacctgatgtattcccaagatattagacgaacaagctggagttattcagaacggcatcacttgagaagatgagattacctgaggatgtgcctggcggaacgcgaggtgatccttgctctttatctggagacccaatcactgagtcattaccaacttctggtccttgagaagttgtctgcgcttcagcttcaggaatctcttgatttagatctacatccgactggtttccagtcgggggctctctggttgttgcagtttcagttgttgccgactggtttccagtcggcggctggtcactcggattggccttgtcatccgaagcatgggcgccagtcggctgactttcggcagtcggctggctttcagcagtcggctcagcatccttggatatatttggttctgtcacagccggatcaggatcttttccggttggatctatatcggacggtttcctgcaaagtgccctttcgatatttagcataattcctatgagagaagcatgccgaaataaaatggtaccgagaggtttatacctggaagatgttctaatctttggcatttgacggccagccagttttttcctgggcatggtatgctttgggagtttgttgggcgtgcccttgtccccagatttgttgctgtcatcgccctcatcgtcattaagcaccagctttctcttgcgaggacctgtctgcccagccggtttggaggtttgaggttgtgggtctgacctgattgtcggccctccacttccctgaacggtgtgctggcgaggagatcggcgctgagcaattgggggatcagatttcatcaatacgtattcctgaacgagatgcttccacagttagctaactcaacatgaagatgaaattatgttttgaccttgggttgaagatttcagatacatacctgcggaggcggattgaatgcgttgtatggtacaactggcagttgatgtgaatagctgacgacaatagcgttcgagaatatcctgtacatcctctccttcaggatcttaaaatccagagaatctgggtcttcacagtttggatcatgcttgccgtcaaactcaaatgctgtgcgagatctttctttgattggagctaatcggcacttaatgaaatgccgagtgatttgctctccttgcaagccttgttctttgagttttaacatgcgttccatcaactccaaggcttggactgcttcatctccgattggaagagagttccaggtatcttggtacaccggaggaagacaagagtacccgggaagagcaggttcaggattctgaacatagaaccagtttgcatgccaccctttgtttgaagtcttgaagggcatagagaaatacttttggctcagagttcccctcagctggaatcctgcccccccgactacgcacggtttgctcttgttcggttggggtttgaggaagaagatccggcgaaacagggcaaagtgaggcttgattcccaaaaaggcttcacaaacatggacgaaattggcgatatgcactatggaatttgggtttaggtgatgcaagctgattccatagaagttcaagatcccgcggaaaaatttcgaggtcggaagagcgaagccgccgtagaagaaatgcgagaagaccacaatctcgtgtgtatcgggggtcggaaaaatctcaccgcacgctggccgccacccgatgatctccttagcagggagaacgccgtgcgccaccatctccttcaggttctcttccgttacgtcggacggcgcccattggccttcaaagctttctttctcctccgtcatcgattttacccgaatgcgctgatttgattcgagggatggccggggagaagtgagggattgaggcggtggatcacgggaaggattttgatgcacttttcgaaggtggatttgagtggagtagtgaaccctagttcgccggcgcagttctgcactgtagcaaggagtggggaaaatggcgagagttccggcggggaagacgaagcgtcgcttggatctcgggatttcttgttaagggtatcggaggtgcgaatgggcctaggcctgaacagtacttcagcccaatacttttaacagcgtggcccattgtattccttagggacttaggcatattttgctttggcaatattatgcgcacaatagtgttgcccaatgctgataaaatcctttttatgcggtcatataattctttggaattattgcaatgcaaattaaaaggtgcccgacagaaaggcgttatgctgtttttgtaagcttttttaggctacaaaagctgtctgtgttaacttggagtggcttgtttttaccatagtcatttccctggtatgttatatgcctgttttcattatggtaaatagtcatagcctaggctattagacttatttattgccataatttttataatacttggtgggtaatctttagagtttttattcggatgcctgtcaagtgggttcattcgtgaaccttttagagtgttaaccactcggatttcttttgttatggctaaaaagcagtcggctagaatgcctctttaggcgccgcatatgcttttgtcatatgatgcatgattgtgctattattttgttctcaactatatgtttagtttgttaactaatcacatagttgggggctacacctaattaggtgcatctattcgatgcaccatattctttatcttttcgccctttacagtcttcgtcttcgctactcggcaggccttggcatgaaaagtttgaagcactcggattattatctttgagaaggctacgatggttgactgcaaaggtctcgggggctactgtggagattatggatatcccatatctacacggcgatgatatttggactgaatataggataccgaatatagatagaatatcttatgtgtatcctgggtttgtttcctaacttgtatatcaaggaaacaccttgaaacttagtcggtcacgactgtatttaatctgtatctgtgtattccgttagggatataggttatcttttgtaacccggactccttcccatatataaggggggtctgggcgcctctaggggcagaggttgatcttctccaaatcatacaatcaataatacactcggcggattcatccccggacaggagtagggtattacttcttttataagaaggcctgaacctgtataaatcctttgtctccaaacccatacactttcctagcttgatagccacccccttttattattgccgaaatctagtttcgacaataatcattttgctttctacttattgatcatttttagtaattagttaaaaaaataagacatcaaaggaattaaattagacatgagaggaggagagagtagaaggggagagtgtagcgtgcttataattatcattttttagggttgtagtgttttagttgctattactttatcaaataaaaaagaataaaatatttattgattgattaaaatctatcttttttttactaaaactatgaacgctaccaatctaataatgttaaaattgggggaataattttgtagaatattgcttagagttaggttcattttacttttatcactatagatctagtttaattattgtgaagttgtataggatgataaaatatatatcattattttttaataattttattagttatttgaatagcatgaaaaagttggaaaaatataccccgaaagtgatatatttctttttaaatttgaattagagtggatatgagtctttatatataaaataatctaaagatataagtggatcaaatattagttattatagtatgatttagatattatatttgcttattttttagcataacttttactttatgaataatatatttggggaacattactcatagttttcattttacttttatggttttagatctaatttgcttgaatggcacgcaaaaatcagaaactataacccataatgatatttcttttcaaagttaaattatagtaaaatttggtcttcaactctaaatttagtcatatataatttaaagatataaccggataaaaattagttgatttggttgttatagttgcttaattatttaagagatttttttttgctcttttatatttaagtaataaagcacaaaaatataaaaaagaataggtggaaaagaactgatcaatgaattgaggaggggagaggggcgcacggacatgagtacgtacgcacgttctctaataaattaacgtgtacaggcccaggtgggtccggtttgggagatgaattttttttattgaagataaatctaatgattgtaaataatgggtccaccaaatttaatgaaaatcaacggctagattttttttccttttttctcatatttttttaggaatttatctaatttgttagagtgccacatggcggtttatgagcgttttcaggatgccacatggcggtttaggagcgtttataggaagtttaatggtgggcatgtattgtacacaatgttaaactttttggttcagccaatttgatcgggcatcaccgaaatttttgtgtgaaattttgaacaaatattaccaaaattcatgaaaaataaaaaaatttggccggaataatattgtatcgaaagggtctgaaatgaccgaaatttctaaccctgattgtacattgcgtttgaaatatatatataaacagaatatcaatcggctggcacctcccatgtttaaaagtacttttttttatttgaataagacacatcaggggtattttgctttgataattttttcaaagatatttattaggtttaaaaatatatcatatttaatacatctgtataaataattatctatgatctctttattatatagaaggaagttcgatttagtttgtttggaaaacatgtctaacaaatcaagtgtaaattagaagtaaggtgtttggcctttttttaatagaatgtttacttgctttttttacaaattctaaagaactatattgttaataaatatattttatttgtaccatcaagtagtttttcttctagtaggtttaagttgatgcaagttgttacatacttacatataaattaataaagacatgtcatatacctcgcttccttctgatttatgcgatctatactatctttttcaaaagaatatacctagttaacatgaatccaaaattttaaatttaatagtaacaaatataacttttcaaagaactatatactgcgaaccttagtgtggcttatatatgtaataatatgtagagaaactcataatgctatgatataggatagacgtaaggccattaatgtctaagcattttaaaattgttatgaaaatggaacatgcaatggttggtctaattttagtgaaatgtaagaaccctttttttacgaacttattacattttctattacatgctttattttatattttaaaccagttcaaaatataggctttttggatctttaaattattcttttaattataaatacaacaatatttagattagaaatcagatgcatagcttgaaatttatgcatgttttaatatttttattacttttggctatataaacagtaaggggtagagtagagagctcaagcctagaagggatgggacgagtaatgccatgttgtacgtatgattggggggggggcgaagtggaggggtgtttttttctatgttatgtaaaagatttaagtaaaaccatgatctatttttttctcaatttttttgttattttttctaatttttaagacgtaacacattgtggcttaagatgttctaaaaagtacatctgttggttgaaaatagtggatctacctatttaagtggaaactgatgatcggatgatttttcttccaatttgtaaagttttatttttatttaaggtgtaacacgtgacgccttaagtgcgctcagaggatgtacaatgatttacgataatataatacttattttcattttgtattatggtctgtcttttttctatttggttaccatgcaaaggaacgatgtctatgtttaaatcacgtattttcatttttgtagagtgaaatatgggtataatggatcttaaattatctatttaattataaataaagcaaaaattcaaataagttaacattatgatttaacctaagaattataattatttggctttctaattattgatttttttcacatagttaaaaattaggagacaaagaagttaaatgagtgaggagaggaagagagagttgaagggaagagattacgcgtgcatataattgtaataattatttttaccgggttgtagtgttttagttgcaattattttttaactaaaaattgaaaaacgatttattgattgattaaaatctatcctttttacttgtcttttccagtatattcatagtagatattaaaaatacgaacactacaatctaataatgttattttgacttattctaatgttataatgggggagtagctttttaaagcattcctcagagttaggttcattttatttttatccatatagatctaatttaattattccaaagtcatatatggtgataaaatctataccattatctttctataattttataattgttcaaatgacacataaaaatcagaaaatatagctccaaagtgacatatttcttctcaaagtcaatattacaatggatatgagtctttacatgtaaaatagtctaaagagataagttcatgaaatattagttgtgtgagttagatgttatagttgcttattttttgcataagttttgctttcgaactaacatattttggaaacattgctcatagtatattcattttacttttatgattgtagacctaatttaattattatgaagttatgtatgatgataaaatctatattattatcgttatttcatatgtttttataattgcttgaatggcatgcaaaagtcaagaaatctaaaccaaaatggcattttttttcaaagctaaattgtagtgaaatatggacttcaactgtaaatttagttatgtcttcaactgtaaatttagttataaataatataaagattttcgtggatcagaaattagttgtatgattttgaagcttaattgtttaacacaaaattattgcttatctaactaataaggcatgaaaatagaagaaggaataggtgaaaagtggacaaatgaattgaaggaagaggaggcgtacaaacgtacgttcgtttttgtaaaaaaaaaaagtaacttatacatacaggcttaggtgggcccgggtttaggagatgaattttttcttgaaaattaatctaatggttgaaaataatgcatccaccaattttaatgaaaatatgttttgttattttagaatttttgagaatttcactaatttattagaacatcacatggcaacttaggagcatttgtaggatgtcatatggcgaattaggagcatttttgaaaagtttaatggacttttagacatgtaatctaatgttctgaaacattagtcgggtccaccaatttaaataaaaattaacggtgatatttatgtaaatttatagagtaataagatttatcattaaataatagtaaatcctgtttgaaatatcatcaattttttccaatggtaattttatggtaattttgtgcgtatttttttcttctgacacgaccagtaggtaagctttcattggtttcttcagttgtaagtacgtaagtttttcctatatacataaatacgtaatattacgtaatattcaggatgattttttaagattttgacctttctcttaaaagtttttatttaggactttttttttaagttgattgtatatatttgtgtgtaaagacctttagaacaaataaattctaaactcaaaccattcaaaaccatgaaatcaagtagatatatggattaaaaattatagccattaacttgaacttatctgactgttgattccttttatgagaaattgattacttaataatagaaatagagaataggtgaggagggtatatatatggggtggacggacagacgtacgtacgtacgtacggtaggaggtggtggagtaggggtggggtgggatttaaatttaatctaatggtctaaaatattaggtccaccaatttaagtgaaaatagacggttagatttaatagagccacgtggtggcctagaagcatttgtaggagcaccaagtggtggcttgagagtatttctaggaagtttaatggacttttagtatatctcatagattatataatgtatattattcatttatttagatattttatgaatatttcgatgacgtgcgtataatacaatacaactcaaaataacttatatttgtacaactatgggttggaattattaacgtggtttttatctcacgtgcgtataatacaagacaagaaaagtgggacgtggggccctacatgcaagtacatactccgaatcatatggcctggaatatgaattttgttttttcttcatgtgttagtgaaaaagaaaaaagaaaagggggagtggggcccacatacaaaatatgtaacatacatgcacgtacacgtacggggcatgtgtggatttttaaagataataataaatctaattgatatttttttatgctatatctaacggttaaaaatagtgggtccaccagattaaatgaaaaaccaacggctagatgctttgcttaattcttctaatttattagagtgccacgtggcggcgtaggagcgtttgtaggggggcacgtggcggtttaggagcgtttgtaggaagtttaatggacttttagtatataataatagatagatagactagaaaaaatgcccgtgcgttgcaacgggtgaagtctattttaattttattattgctatacggtttagttaagatgaaattcactctgtagttcgcttgcatatatataattttagaaaatcatgagctacggttaggagtccgatcgtctcaagctagcatgcgagtttttttaaatagatttcttatatgattgcttctgtattaccaaaagtgaacgatcttaaaaaccgatccgaatatgaatatgtatttcccaaagcaaacgaacttaaaaaaaatatcggcaaaaacatattcaatttttataatagtagagatatgataaaaaaattaatgaagtaaaaaataaaacaagtttcatgtagatgaaaccatgtctacacctttttcattacaacttgtctattatgtattgcatatgaaaaaaaataaaagtaaaacaatgcattctatgagttatttcaatcatcagttaaatgcatttttgcagtgcttcagattttctttagaagtttaccagaaaatgtttcgatatgcctttatatctgtggagaatattatggatgaaaagttgagtgtgggattgctcagtgaatcttttatgttaatgcatgaaatacaggattcaaccgagcatcgtcaccatctttagaccattatattgtccctctccaaagaggatatgcatcgatatcgttggacccttaggctaaatattgatgttgttagttttgtgctaatgaagtaaatcaattaataactccaaacctattttactgaaagtaatgcaatgatacgcctataggatattcattttttttcttttaatctattcataataacatttaatggtaaatttagaaacacgggccgggcctgtttctttcagtttgagattattataatctagattattgagtcagattactgtaagctagattgttataatctgtagtaaaataatctgtagtaaaataagcggttagttgtttctttcctagattattagagcctagattattgggtttgtaagtctaaagagggagtggggtggcatggtgggtaatttttcacccaataatctgtaaaaagctcagctaaataagcttatcagattataataagctacatcaataagttgtctttttctttcagcttactcccaataatctggattataataatcctaagctaaaagaaacagatagacatgatgtatggcacttagcaaataaatatattattattgatcaagtacagttataccttctactttaagaagcaggcccaatcattaaatgaacaatatataatcatatagtgttgaccctattgtttgtattagcgatcttatacaatatttaagaaaatatttactactactgcatagtcgatttttacgtgcggtcaaaatcgattttcagaagcggctgggcttcccacctgtaccctatgaaatgaatattttggcatgcaggtagtgcaaccgctttcgaaaatacaacttttggaagtgggcccttaagccgtccatttgcaaaacaaaaaaggcaaaataataaaaaatatgaatatcaaaatccaaattccagaaaccctagaatctgtcacgaccgtcatgcttgaatccactgcaaacatcaccgttgttggttcctcccttccagtcgcatatactagaaaaacgattttttatgcgtggcgaaaaaataccaaaaccaccagcaatatcgtaatgagggggtggggggcactgaccgccagcgaaaatggattttcgctggcgtccacgttataccggccgccagcgaagatatgttcatttttgctggcggtcacttagatgcgccgccagcaaagatggataattttcgctggcggttaggttatatagcccgatagcgaagatccaattctttttactggcggctcacttaagcaaccacaggtgaaaattgatttccgctggcgctcttaaaaaaattcgcacataaacaaatcactgcgcgcccatacaggcatacccttatccacccaccaccgcataataaaaatatctccacttctccctctccagatccagatccacttcctctcctccaaatccctgcaccctcctctcctcctcccctccagatccacatcctctcctcctcccaggcggcgacggcggggttctcgggtggtggcggcggctccggcagctgtgtgtggtggcgaaggcaacgggaggtgggcgcacagctgcgacgggaggcggtcgtcgggggggtgcggcgacggcaacaggaggagccatcgaggggctcgacggcaacgggacgcgcagcgactgcgacgggaggtgggggcatggcgacgacgatgggaggagccgtcggggggctcgacggcgacagggggcgcggcgagctcctcctcctcctcgtcctccccctcccacgtggcttggtgctgcaacggtcgcggcgacgactcattgctgcggggcgcgacgagctcctccccctccccctcccacgggtgtggcgacggctcggtgctgcggggcgtgacggcttggtgcttgctgctcggtcggtgagacgacgacctggtcagcgacggcttggtgcttgctgcggggcttgctcgatttttttgtcagttttttttttcatgttctaaatgtttgtaagcccgtgttcactcgtatgattattgaaaggtgaatacccaatatgatccttaaacttttgcttaaggatcaatctagtccctgacatttcgtattgtgcaaacaagtaccttgagtttactgtgtgattcaatatagtcttttgaccctctaaacatgccatgtgtacatgccacatcatctatgcatgcaaattaaatatttaaatgtcctttacacccttatctgttcatacgaaataatgaaaaactattgagaaaacacacaaaaaaaagcttttgaccattggcaaaaaaagcttttgaccattggcaaaaatatgtagcattgatagataaaaataattgacatttttctttgttttatgattgcttcttcttgtttttcttttctttatttgatagaaaattaaaggttaaaatggacatttaaatgttatcttatatgcacaaatgacgtggcatatccacgtggcgttttaagttggtctaaggactatattaagccgcatgataatctttaggtcttgtttggatattataaaacatgaaggactaattcgacccctgagcaaaagttgaaggactgaattggctattcacccattattgaatctaatgaactctggatgtggatttgaatatatactcaaaaatttggatgtggatttgaatatgtacatgctgcgaaaatctgatttatttattttttttggcgaaaagagattttggggattacttttttttatagaaaatcatttttactggtggatcgcgtaagaagccgctagcaaaaactattttagctggcggagcacataaggtagccgtcagcgaagactatttttgctagcggcccacatacgacagccgcaagcaaaaatgattgtcactagcggttgtctttagccgtccgcaagcgaaaagttattttctttagcggtttagagccgccaacgaagatgctatgttttcattggcctttttttttgtggcggcgctaaataccgtcagcgaaaacccaaaatgactgccacaaaagatggttttcgtagtagtatcatcgtcgctcgaaaccgccaccgctgccgccttcgtcatcattatcgcttgaagccgtaggatctgcccgtctcctcggtggatctgcacacgtggagggcagagaggcggtgagatccacgcaggagggggagtagccgttggatccgctcctcttgtggccaccaccgtcgcccgagctcgcccccgctcttgtcgacactgttgcggccccgctcgctgttgccaggagtgggagggaaagaggctagacgggacaagggggagaagtgagagagagaggaggggagagaaatgagtggggacatagaggaggcggagaaaaaaaataggggaggaaggtgattttgacaaacacactttgcattcgaaactttacatctgactgcaaaactcattttcacctgcgggcctcttaaaatgccaatatgcgaaaatgactttccgtaagctggccttgatccaccctatttatttttgcatgcgaacgccattacagtctgcttggagcttccaagaggtctcgtccgtgaaaatctaatagtgattctcacatgccatattaaataaaatatcaacaaactgcatgcactaactatttattgcaggcagattataaagagaaccttgcgtaaaaatcaacctattttcagaacaagaaaaacattttaatgaacatttgggcccctaatatgatgtcaactgagaaaactttcaagtaaaacgtgtgatctcaattgagaaaactttcaagtaaaatgttgtatatctagtcgagagttccggttttgatacaaaatttgtcatcattcgttcttgatatattaaagttatgacttttttttaaaaaaaatagtattatttatgttttcaatgttagttcgttatataacgccggtaaaaatcatttttatatgtctttagagagaggaggggagagaaatgagaagtgagtttccacgtgcagttcgttagaaaaacctccttagttgcctttatgcttatgcagagaaaaaggacaacatgccactccgaatcgggttttgacaaaatgccaccccctacaatacaaaggataaaatgccactttaataggttactttcaggatattttgtcactttggaagattttaagaccaaaatacccttggatgtggataaattggaagagggaggagcggggaaggttgagatcgacggtactcatgcttcccggcggtgggcgtggggcgttggctgcgacgggcggacggggagaggaagacgttgacactgatgggaggaggaagacgacggcgctgatggggagacggcggtggcgatggtggagaagggtggtgactgggggaggaggagggtggcgccgatgagagggaggaggaggcggcgacgatgcggagggctctccagcactacccacccacgcgcttgtagcttgccgccttcggcgccgcccgtgcgcgcgctccatgctcgtcgcttctggcgccacccgcgcatgcgctcaccgctcaccttcttcggcgtcacccgctgctcgcggcaccaccgtccccctcccccatagtcgttcgtccccacgccctcaccaccggccgctgacgagcacagacgccgccgtctcgatgttccccggtgctcccctcacctctctctttctctctccaatgtattttggtcttaaaatttttcagtggcaaaatatcccgaaaataactcagtgagtggtatttcatcctttacattaggtggcatttcatcgaaacccaccgaatggagtggcatattatcctttttctctgcttatgcatggttggttttcttaaataaccacgtgttgaaataggattttttggcagtataagaccttgagaaaggacagacaattttgaaaaagcagtgtctgtgtggcctagaaatttgggacgccctgtgaatatgaacgcctggatcctgaataaggctgcgttcgttgggtggagaaagagagagagtttgtttggttttccgcgcgcacgcttcccaaactactaaacggtgcgttttttgtaaaaaatttctatagaaaagttgctttaaaaaatcatattaatccatttttaaaatttaaaatagttaatactcaattaatcatgagctaatggcttacctcgttttgcgtatcttcccaatctcctcgatccccttctcctcaaacactccctaaatcgttttagcagtggtgagccggtgagtgcccgttacacaaagtatatgggcgaataatagcaaatgtaattgaataattgatggagggataaagaaacttcttgttgcatggttgtaccccacctgcaaaaatgtacagattgtgtctatatatctctatatctacttctacttctacttatatatatactacttaaaaaataaaacaaaatttccgtcgtccgtccggtgagaaaaaaaagaacagagaaaaaacttcaatcggcaaaaaaggaaaaaaaagtccgactcctccggtggaaaagaaaaaggagagaaaaaaaagaagagaaaaaaatctatcccaaaacaaaaagaaaaataaaagggcgtccgactccctggtggagaaaaaaaagacgagaaaaaaaaagaaaaaaaaaacttctacctaaaaaaaagtccctaaaaaaggttcgactccctaaaaaagatttttcgtccgtaatctacttcaaaaaatgtccgactccttacaaaaggttcgactacttttattcaaaaaaatataaaaattaaagatgtttttgtcagtactttggtacgtctaggtcggtttttaaatgttcgcttttgaaaatacacaagaaatctctttaaaaaaactcgcatgctaatttgagacgatcggactcctaattgcagctcatgattttctaacaaaatatggccgtgtttagttccaaattttttcttcaaacttctaacttttccattacatcaaaacttttctacacacacaaacttccaacttttccgtcacatcgttccaatttcaaccaaacttccaattttggcgtgaactaaacacaccctatatatccaagcaaatttaacatagtgaatttcatcttaactaaaccatataacaataataagattaaaatagtcttcacccgatgcaacgcacgggcactttttctagtagatatatagaaatacaactattccttttttactagaaagatctaacatactccctccgtcccacgatataagcacttttggcatagtgacaagtcaaatatttataactttaactattaatagcaaaaaaataaaaaagatcaatcatgtaaaattgatattgctagatttatcactaaacaaactatcataatttacaactctttttatttaaaacatattacttttataaatattattggtcaaagtagcatcacgaagaccatgtcaaagtccaaatatgcttatattttgggacggagggagaattttacatacgattatctgatctgcatcagccggatcatcttgatggaacgatatatctactttattgtgaggaggaagtcaatttttatttatgtcactttaatttttcatgagtaaatttcacagaacaacatatacataggccaaataatcacagaactatagatttaaaagtaatgtataacaaaactacagatttaacaataaatttatcccaaaactacatgttaaaggccaagtagcagaaaattataaatttaataataatattatcacaaaactacaaatttgagtttaaatcattggcaataatattatgtttgagttataaatgtccaaattttgagatcaaattgatataaaatctatagttttgtgataactttattactaaatatgtagttttgcgatattccatcttaaatatgtaattctataagaaatttaatgttaaatatgtagttttgtgataatttgactaatgcaactatagttttgtaaaatttactcatttttcattgattttcctcacccgtagtgactttaatgttaaatttaaggggcaattttgttcttgcccctacttctatgtccagtattgattttgctcctgttttttttagggtttttattttttgccctcacttttttgaaacgaataagcagtttgcccctgttccgttaatttttgctaacggtgttaaatgtggggtaaaaaggacaattatacccttagatattttccggtactttcatacaaactttcaaatttgacccaaattttggcaaacttttacaaaattttgacaaataaaattactgctataaaatggcatcaataggtctgtattttgattatgtcaaaagtacggaaaaatatttaagggtttacttatctttttatccctcacatttaacaccgttagcaagaattaacggaacaaaagtaaacgattgattcgtttaaaaaaagtaaggtaaaaacgaaaacctaaaaaatatgggcaaaattaatattagacatgaaagtaggggtaagaacgaaattatccctaaatttaatgtttctttttactggaagtttgccaattgtgccattttagaaaaaagtttcgacctgcccttatttccatacggaatattatctacaagataagattgtgatggaaatagcagacggtatcttttatgataatgcaatcaattcaggtttcaagtttcaacaaagcacggtgaccatcattatttcgatgagagggacaatggttggtatgcatctggaccctaaggccaaatatcgcttttgcaataaaactatgttagctgtgttctaaaataactaccctcttaggatcttcaactatactctcttcatcctgttttgatcattctctaggttattaagttattcccaaataatcatctaaccagtatacactggtggagaaaccatctttggtcggtcggccaaaatccataatagtcccggttgcaaaaaaaaacaccacagctattttatgatctacaccaaccgggactaaaaatcatatttactcccggttcattccgtgtcagtagtctgtcagggggccgaggatctttagtcccgatcggtgacatcaaccgggactaaagatcatctttatagtcccggttggtgttgctc

SEQ ID NO: 7792 - DNA, 23214 bp, Oryza sativa
aagtgagtgaggagtcataacattatctatcttgccaaccatcaagtatctgtgatgggcaataaagttactttgacgatggtatacaaggacatctgtggaggcacatcacgtaacttccaaatgacatgactcactctgatcccaatagaatatccacaaaaacaaacactctagagcaaccgataaggaattcaaagaaaacccatccatcgcatctataaatagacaagcacaatgtaaacccacttcatcattctcacaactcaaacattacagcaaaagcataagaactagaaacccaccacaatgaagatcattttcttctttgctctccttgctattgctgcatgcagcgcctctacgcagtttgatgctgttactcatgtttacaggcaatatcagctgcagccgcatctcatgctgcagcaacagatgcttagcccatgcggtgagttcgtaaggcagcagtgcagcacagtggaaatccccttcttccaatcacccgtgtttcagctgagaaactgccaagtcatgcagcagcagtgctgccaacagctcaggatgatcgcgcaacagtctcactgccaggccgttagcagtgttcaggtgattgtgcagcagctacagctacaacagtttactggcatcaacttcgatcagactcaagctctagcccaagctatgttggccctaaacttgccgttaatatgcagtatctacccaagctacaacactgctccctgtagcattcccaccatcggtggtatctggtactgaattgtagcagtatagtagtacaggagagaaaaataaagtcatgcatcatcgtgtgtgacaagttgaaacatcagggtgatacaaatcttaataaaaatgtcatgcaagtttaaacataatgcctctgtaaggataaatcctagtacattgttgaaattaattatcatcaccgtctactatggttgcatttacaactttacgatgcatgcctacattcggttctaagctactatggctactcgacgtgaacggagtgtgttaagcaggtcaatcttttcatttcgatgagaacaaagtcaaaacgcatgtggcaaatagtatataccctacaacgtaatcctacaccatataaaacatgcccaacctatagcgattataaatccactattcaaaatataagtatcgatgggaccattttccatatcattgttaattcaatcttaccttgtcaccgaaacaagacgctccgcgtaacatgaagttaaaatttccatatttgaaggcttggtcgcggaaatatcaatttataatttaaaaacattaagctaatcatgtagagagaactcaactagtaatttatatattatttgtgataatcatattctaagcaggggttaagataatccaagggtagagtgacacacaagcattaattactcatcctcataatatatcatctaagctaagtggaaagaaaagagaaagagaatctattcctatacttctaatatacatagtatacatacattctagttaactgatatactagctaataccctctatccgatgccctcctggtacttcgagaagccacccctgactgccgagttccttacgacagcctgtcatgaccaaataatgatatcccataatctagacaccacgtctaaactaccagatactactctaatatcatcgtcacgacatagagtaaatgcataagcaaacattatacccgcaccaaagcatcttctagataagctagccgtatattcagtataacatgaacataatgtaaagtaggtactcatatactcgaaaagtatttcagtaccataaatgtatatagaagagtattctaataaaagtacaaagcttacaaaagaggaaaggaaagctgctagagccatacccgaactcttccaaaggcttccggactcctgattcctattctaattctattccaccaactagatactactaaactaaacttgagaggaatgagagaactattgcttgaggtgtgtgagtgaagtgggaaggtgaggggtttatatagcctcccaatgacggttgtgacggttggaatggtcggaaataccgtccaaccgtaattgggagctaatccacaccgtccagaagaaaccctgcatccagcggcgatgagggaggttcggtcgaaccccctagttcggccgaacctggggccagcccaaccagcccatggctcggctgctggcctcctctattgttcttctccgcagacttgtgaattttggcccaattcatcgtgtcaattctgaattcttggcctattcacacacaagtctggttctcgacatcgtccgattgatttatcgtctgagttaatatcgattctcctccactttagtgtcattccctgcaagaggttagtatacctaatactagtggaagtttattattctagcagatatatgcattgcaagcatcactagttctctcctattttagtaatattgacggtcgaaactgatcgataatgaccgtcaacaaaaccccccaagcttgaacctttgctcgtcccgagtgaaggacgaaaggaaacaaagacttggttattgatcaggaggtgctactatgctgcatatctcaaagatacaggtggaaggtatatgtactctctcttagattaaataatctttggcacggtggcttacccttacccctgattcccacaagacactgtttctccttgccttgggcggttgaaggacagaacattaattagagcaccaatcacccgatctttattcaactcttgttccggaagttttcaaatgattttgaaaaagaaagccaagttcctcaattgattcacatagtctctctaagtgtatcaatttgaattcctcaccaaacattgcattgttgattcctactctaaggtttatatgtggagcttggtagggatcaaacatggcacacttacattcacatttattaccaagtcaaaattttagactagagcagataactaaacatactaaagatcaagatcgtgcataatgtgtgtatggtatatagtcgaaaaataaaggaaaatgcttctcctttggtaggaaaatgcttcttttatttataaggagagggcatggctatattttttttcaacatcatgctcatgcttgatggagcataactttattattattattattattgttattgttattattattattattattattattattattattattattattattttataaccatgcctttacctcctcttttttttcttttttgtcaaaaggatttttttctttttaggacaagaaagtacatgaaaacatggagaatttattttgatggtaatgtgaaaatagaatggaatattgcttaactcccagtgtaggagtttagcatgtgcatatatgtgggtgtatgatcttgatcatagagcatgagaagtatctacacaagtcacaagagtttgacaaagttcaatggaatggtaagcaaccaaaatgtatatggtttaatcatgatagcacatttttggctctggtagaaatttacatcaaatgaggaacttcaatgttatcattttgaaaaacaaaacatccggaattcaagtcaaactagtatcaggatcatagctactcatatttactatctcatatctcacaacaacttagacttagattagcaactgcagcccatttacctcaggttcccggataattgttggctacttatatttaacctttgagagagtatttaccaagaactcatatataagagatataaaacagagcaactattcatcatttcaacaaagagaactagcttgtcttacctaccatgactcaaacctatcctatctttttggtattttctattttgcaattttttatgttgttttcaagttttgtaggatgcaattggaaagcaaacatacaattggaaagggaaatatgcaatgtgatacaagttacctcagtgggtgtcacgtcctgataaattcatcccaaaataaaaatcattctctaaaaggaataatagaattaattaaaattcaaaaagaaattggcaaacactaaaatacatacaagaaaaatttgaatgttgcccggagaatttttgttaaattctccttggtctaaaaggagacctcaaattttacttgaattttcagagcaccagaaatatttattaagcaacaacaacaattaagaaagtttactaaaaagaaaaactaaaaataaatcttccttcctcctttgggccaagtctggcccaaagtcctccctctctctctccctcggcccacggccaaagtcctctcttcctccctctctttctctccctctccttctctccctccttctcttgggcctccccttcccctcccggcccactccctcctcttctcctcctgggccgcctcggcttcgcccggcccaagccgagccgcgcctcccacccgttgccgcgcgttgaccgcgcgcctcccacgtgggtcccgcctgtcaggcgcgtccccgacctccagccgtcggcctcttctctctcccgtgcaaaccctagtgccaatcctccccaaaatccacgcgattcaaaccggggtttccgaaattgattagggggttttaatccccattgattcctctttgatttcccccgttttcccctttgaatggcgcccccaatcgccgggaacggacgcgccaacaccggccgccttccgttgctgccggccgccattcccgcctccgttccgacctctctcgttgccggctccctccccgcgcctataaaatggaaccccctccttgcgttctctcatttttgcctcctcctgagtcttcccgaggtccctagccaccttcccgccgtcctcctctctctcccgtgccgtcggccgcctccagctgcctctccctcctcgccggaacgccgtccagtcgtgccgtcacccccagcggcctcgcagctgcctcctcttccccggcgtcgctccgtttcacgggaaaatcatcggagccgcgtcctggccgacgaccagtggtgtcgccaccactccaccgactccagctgcccctgccgcaccgctcaggtgcgggccggccgcgccatctactccctcggcgtcgccgcgtcgacctccaccccggcctgccctctgattcatctggagaccgccgtcactgccgcgccggcttctccatcctcctcgtcgactcctccgattggccgttcctcctcgccggctcgtcgtctcgctgcgccgccaccgtcgtcgacatcgcagcggcgtgttccacgccgtccttgcctccgtgcagctgctgccggctgccctcgtcgcctcctcgccggttccgggcgtcgtcctttcgtcgctcctggtcgtcatggcgttcgtccctccgtgaagccgatcgcgttcgccgcccgtggttcgtcaagcgagctgctgcagccccgtcatcgtcttcatcctcgcctccgcgtcatcaagcctcgtgccggtcgcgtctcgccttcgtctaaggatcgccgccgaaatcgtcccctcgccgttcgtctccgctgcccattcgtcgtcatcgttcccatgcctcgtcgcgtggtggtaaggatccgtcctctcgctgcccccgtcctcgtcctttcggtgtcacccgtgcccattgtgcggttgtcgaccccggtacccgtgtaccggtgtcggtagtcattcgcttgtgcgtgtggtgaccgtgttagtgtgcccgctcggtagccacgtggtttccacgtgtgcagcccgcgtggtgtctagtggagtccgtttgtcggccactcgcctcggttgacacacggggtccgcttctgtcgacccgtggaccgtctctatgtacccggtctgccgtggtctcttaggttgacatgtggggtccgcatgtcaacagcgcagccttcctgtcttttccaggctagcgcttacacatgttttatagttgcaaaacctaattataataatccgcaaatctccatataacagcatttaacttcggatgaccatgtcttggtcatacgaactccgaatcgatccgttcaagtctcctaatgtttgttataacctaaagaagattgtgctttctttttatgtattgttattgcttctttataggcttgtagttttgcttgtgtgcttcgcgtagcttctgtcgttccggaggttctcgaagcgtgggtcgcggtcatcgccgaaggttcggaaggccgttgtctctgagcaaggcaagtcacatcatcctttagcatattgaatcccagtttataaaattattttgatttaaattaatgcattattgctttatttaaattcccgcgttatcactgttttatttagccagcctatttacctttgttatgaccttattatgattgctattgttattattaccttgttcaccctaggaaaatagaaccccaactagtgggtactctatttatggttccactagtatgaacttaggtagatgcttcgctggttaattatgcagcattaggtggttttataactttagactttaggaattctcatatcacttggacactatggaatggttggattatggtggaattggacatacacctctcttcctctttcaaaacccctaaaacctgttttccggtggggtttgggtgcatgccagttgtgggaagtagcaccccggccaatataaggattaagctcgggcctctgttgtaaagcactaccgtaattccacatgtctagtgggtaaggcttagtttgtggctcagtctggttattgtcgcgtcccaaaacgactctaaaatacatcctctaaattctgcctacaataattaaaatccatgtgaaagcctccaacaattaaaatgtgcaaagttaaaagtcaaataaggcttgcaggatttttgtatatttcctaaaagcctaaaatgcgtaaataaattttagtggaattttcagagcacaaataataattattaagaaataaacaaagttaaaatgactttataaaaagaaaaaccctaaaagtcccctttccctccctccccctcttgggccggctcggcccacttccctccccctctctcctcttcccccgcggcccactcggcccctccccgcgcacgcgccgctgacgggcgggcccgcccgccaccctcgctgacgggtggggcccacccgtcatccccttcctcccgccgctcccgccgcctcgcccgcgccctagcgccgcgaatcccgccgcctcccgccgtccccgcgtgcaataaagagggggaaatcactccccgtgatcccctctccctttccccccatttttccctctctcttccacgttcaaacgggcggatttgcccctgcaaatctcgccggcgccattgatggtggccgacctcccgcgccggtttccttcctttcccggccgccctctctcgtcctggctctatttaaaccctccccgcacctcctccgtccgtttccgcctctcgccgcccttcctcctcgccggaatcgagctcacgccgtcgccctctctctccgctgtcgccgccgagctccagtccgccgccgtcgtcgccccggaccccctcccacctcggcgccgcctcctgcggcttcgccgcatccttgccgacctcgtccacccctccgtttcgctcgccgaccgccggaactccgtcgaccccgtcgacccgagccgcgccgccgccttcctccgctccagccgcctttttcgtcgtcgccgtcgacctagggtgagccgtggaccgccgcctcttttcccccttcccttcccctctctcggccaccactccgacgtgcctatggccgccgccagcgaccataggggccagggcgccgcctcccaccggctgcgcctgcttggccgccctcgggcgcgccgagtggctgccgcgtggggcccggccgtcagccgcccgcgcctttaggtgcagctgacgcgtgggacccacggcgccggccggtgcgagccctggtgcgcccggtccaccgtggaccatgaggcttccacgtgggccccactcccgtggacccggtccgcgcgccccctcccctcggctgacgcaataaacccttttaaaattaaaatttaaatgaagaaattcgcaaatattcatttaaagagcatataaacttcaaatgaccataacttggccatatgaactcggaattggaccgttcaagtctctaatttttgtgctttgttcctgcttgttatatggagtttattagagtaaaagccttttcttttccgttggtcgtgtagacgctgcagcttcggaagatccgctcttcgtggaggttgaagccgacgtttgggaaagcgagcaaggcaagtcacatcatccttgaacatattgaatcctagtttataaaattattttgatttaaattatcgcattatcgctttatttaaattcccgcgttatcactgttttatctagccatgcctatgtacctttgttatgaccttattattgttattgttattatttccttgttcaccctagaataaacaaaaccccaactagtggacactctactcatggtaccactagtatgattttaggtagatttggattcacacctccccctctattcaaaaccctcaaaatggttttaggctgggctcggggtgcatggttttgatagtagcaccttggccatataaggaccggtcttcgggcctctgttgcaaagcactaccgtacttccacatgtctagtgggtaaggcttagtttgtggctcagtctggttataaacaaaagtacacggatggagatggacgaagtcgggggtcgatggacatctctaggacaaatgaaggctacacgagctgcggcccggtagtcgagatgtcatggcacagggccgatgtcctgctgctaggggctcagtcctgcctacctgtcccgggggtcccggccgtaggtggggttgggtcggtactcttgtctatggctaggatgggttggaaactatgtcacgtatttcgtccgtataccgtggtggtatgtggcacgtggctacacgtgaggaagatgtgtcttgtgggtaaagatgtacacctctgatcagagtataatctattcgaatagccgtgccctcggttatgggcaagccgagcaatgtacccaagttagtgttttaaattcttaaaacctgcttaacaactaaaatgtggaatggttggcttgggacgagctgggacccagggtcgggttgccagttcggtctgaatcatcgtaggccttgggttaaggcaggttcgtgtgggttcacggccttgtttaataatattgtatagctctggaatcgtgtttacaaaatagctttgagcaactaagtgtcttttaatgctgtttactgcgaaccctaaccctttatatcttaacccccttgtactcccttgcatttatcctgcacttgtgggtgtgtcttgttgagtacggtggttgtactcagtcttgctcaatttttcccaaacccagaagaggagcccctggaagatgaaggctttggtgtctagctcgtgcctgccgtcaagcgcctgtggtcgtcgccctagtcttccgttgtttctcgtttgtctttgtgtgtgctgggccttcgctgcccatgtaataattaactatttacgcttccgcttgataaactctgaaatgtatcaacttttggtgtatcttgcctcctgggacaaggaataatacacacacgtaaggaacgcccgttgggttaattccggtcgtgacaataatgtaaagtaggtactcatatactcagaaagtatttcaataccataaatgtatatagaagagtattctaataaaagtacaaagcttacaaaagaggaaaggaaagctgctagagccatacccgaactcttccgaaggcttccggactcctgattcctattctaattctattccaccagctagatactactaaactaaacttgagagaaatgagagagctattgcttgaggtgtgtgagtgaagtgagaaggtgagaggtttatatagcatcccaatgacggttgtgatggttggaatggtcggaaataccgtccaaccctcattgggagctaatccacaccgtccagaaaaaccctgcatccagcggcgttgagggaggttcggctgaaccccttggttcggccgaacctggggccggcccaaccagcccatggtttggcttgtggcctcctctgttgttcttcttcgcagacttgtgaattttggcccaatttatcgtgtcaattctgagttcttggcctattcacacacaagtctggttctcgacatcatccgattgatttatcgtctgagttaatatcgattctcctccactttagtgtcattccctgcaagaggttagtatacctaatactagtggaagtttattattctaacagatatatgcattgcaagcatcactagttctctcctagtttagtaatattgacggtcgaaactgatcgataacgaccgtcaacacaggatatcatttgtacaactgccataaactaaccattcccctgcagaccatagaagaatctcgtgcaggtggagcaaacagggagacgcgtaacatggcaaagaatgaacaagaaagttcatcatccttaacacccgtgcagatgtatgagaaaggttgggcaccaactagggatgcacccagagggacccaagctccacgccacagcatcggagtctaaaactgggcgagtgccagtgaggaccgatggcatgcgtctcatgacatacattgggggataaccaacctcccagatcaagtggtgtgcctccatctccttgtgaatggtgctcgagttcctcttgttgggacttaggtgaaatcactaggagaatggatacccttgatgtgcagacgggggagatccagtacaacctcacggaacacatatctcaaacgctagaattgcaacaatctgctaatgctcagttcgccaacttcaacaaaatgatgcagcaacagcacgatgaccttcaagcgtacttcctcttccaggggttcaatcattatcaaggaccctaagcgaaagccaagcttgaggtggggagacatctctccccccactgaggtaacttgtatcacattgcatatttccctttccaattgcatatttgctttacaattgcatcttataaactgaaaacaacataaaaatttgcaaactagaaaatactaaaaagataggataggtttgagtcatgataggtaagataagctagttctctttgttgaaatgatgaatagttgctctgttttatatctcttatatatgggttcgtggtaagtgctctctcaaaggttaaatataagtagccaacaattatctgggagtctgaggtaaatgagctgcacttgctgttcagagtctaagttgttgtaagatatgagatagtaaataagagttgctatgaccctgatactagtttgacttgaattccggatgttttgtttttcaaaatgataaaattgagagttgctcatttaatataaattcctaccaaagccaaaattgtgccatcatgattaaaccatatacattttggtttcttgccattccattgaactttgtcaaactcttgagacttgtgtagatacttctcatgctctatgatcaagatcatacacccacatatatgcacatgctaaactcctacactgggagccaagcaaatattccattccactccatttccatattaccacctaaataaattatccatgctttcatgagctttcttctcctaaaaagaaaagtcctttcgaaaaaaaaaagagaaggagggaaaggcatggttatgaaaagagaaaaaataaagttacgctctcacaagcatgagcatgatgttgaaaaaaaatgtagccgtgccctctcctaatcaataaaagaaggattttttgggagaagaaagtaagcacaaaggagaagcattttctttatttttcctcatgtgccatttccaccatataccacacacactttgcacaatcttgatcttaagtatgtttagttatctgctttagtctaagtttttgatttagtaataaatgagaatgcaagtatgccatgtttgatccctaccgagctccacatatcaaaccttagagtaggaatcaaaaaggcaacatttggtgaggaattcaaagtgatacacttagagagattgagtgaatcatttgaggaacttgagtttcttttgcaaaaatcatttgaaaacttccggaattagagttggataaatatcgggtgattggtgctttatttgttgttctgtctttcaaccgcctaaggcaaggagaagcagtgtctcgtgggaatcaggggtaagggtaagccaccgtgccaaagattatttaatctgagagagagtacatataccttgcacatgtatctttgagatatacagcatagtagcaactcctgatcaacaaccaagtttttgtttcctttcgtccttcactcgagacgagcaaaggttcaagcttggggggttttgttgacggtcgttatttaccaatttcgaccgtcaatattaccaaaataaaggagagctagtgatgcttgaaatgcataaacatgttagaataataatattccactagtattaggtatactaaccttttacagagaataacaataaagtggaggagaatcgacatcaacacatatgataaatcaatcggacgatgtcgagaatcaggccaaaattcacaagtctacgaagtgaagcagcggaggaggccaccagccaaaatgtgggctggttgggccggcccaccctggttcggccgaacctgccgtgaagccgctggatgcagggtttggatggacggtgtggattgcttccctatggcggttgggggtattaccgacctttccaaccgccataaccgtcattacctgcctatttaaggagttcactctcttcacttcaacacacacctcaagcaagagctctctcatttctctcaagtttagtttagtagtatctagctggtggaataggaatatagtagtaatcaggagtccggaagcctttggatagttcgggtatggctctagtagctttcctttcctcttttgtaagctttgtactttatttagaatactcttctttatacatttgtggtattaaaatactttccgagtatatgaatgcctactttacattatgttcttgttatactgaatatacggctagcttatctgggagatgctttggtgcgggtataatatttgcttatgaaattactctatgtcatgatgatgatattacactacaagaaatatgaccttctatgaagaattcctcgtgacatcggagctattcgtcattagcacattccattttatgacgattagtatgagatggggtggcttagtgacgaaaaaaatgtgttcgtcgttaatgccaactagaaatcgtcataaattatttcaatgggacgtcgtgacgaatattaacttgtcataaggggcacaaagcaaacgtcataaatatatataatgcatttctagaaaaatatactccatctatcccataatataaggcgtggttactataagatttgtagcaacaaaattataaccatatgaaagtaaatttaaatgtcaatctaatgatataatttttaacaattaaaattcatttcatattatactaagtgttggtcaaatgtttaaaagttaaatcttaaaatgcgtgcacgtcttatattatgagatggagggagtattaaaagttaaagcaatttaatcaagtgaataaatgaggaaaacaaaattttcctgcaaaaattatggccggaaatattttttttaatattctacgtggtctaaattattctctgaaaatttctgtgaattttcagagctcaataactaattttaatagtgagtgagcaaatttgagttatgctatcagtgctatttcaatagtgagtgagcagcaatacaaggaagatggctaaatgatttgtacctggaggacttcttgattttcgacatgggacaacgggatgttttcttcttcgggttagcttgccttgctggttttccagtcatccccttgctgccagctttttcagagtcatcattttcatcatcgctcagaactaatttcctcttgcggaagtctgattggttggccaattgagtggtgctgggttgagagtcagaccagatttttggtcctctgccagcttgaccagtttgccgacggggtgagcggcgttgagcagttggagggtctgacttcatcaaggcgaattcctaggcatgatgattcaagttttccatcaactttgtagatgataaaagcatgcttttgagaaaggttgaaattttaaatacataccggtggagggtggttgaaggcactgtatggcaccactggcagcaagtgcgaatagcttactacgattgcatttgagaagatcttatacattctctccttcataaccttgaattcaagagattcaggatcttcacggttggggtcatgcttgccgtcgaattcaaaggtcgtgcgagatctttctttgattggggctagctggctcttgataaaatgccgggtgatctgttctccttgcagaccttgctcctttagtttcagcatacggtccatcagggcaagtgcctgagcggcttcctctcccattggaagtgagttccaagtgtcctgataaactggaggaagacaggagtactcggggagtgcaggctcggggttttgtacatagaaccaattttcatgccagcctttgtttgaggttttgaagggcatggagaaatacttttggctcagagttccccttagttgaaatccagccccccctactacgcatggcttgttcttgttcggttggggtttgaggaagaagatgcggcgaaatagtgcaaaatgtggtctgacgcccaaaaaagcatcgcaggcatgtatgaagttggcgatatgaactatggaattcgggtttaggtgatgcaaactaatcccataaaactctaatatcccccggaagaatcttgaggttggaagagaaaatccgccatagaagaaatgagaaaataccatgacttcatttgtgtcaggggtcgggaatgcttcgccgaacgccggacgccatccaatgatctccttcgccggaagaacaccatgtgctaccatttccttcaagctttcctccgtgatgtcggagggcgcccattggctctcgaagctttctctctcctccgccatggatgcgaattgggtgatgcgatttgctttggaaatggctgagaatggatgggggatcgatgcggtggatgcgcggatggtttatgtggaattttggaaggtggatttgagcgaattggagaaccctagttccgccggagtggttttgcactgtagtgggaaatggggaaaatggcgagagtctcggcggggaagacgaaacgacgctctgacttcggcgtttatttctctagggtatcgggagtgctaatgggcctaggcctatacagtacttcagcccaattctgttatcggcgtggctaagttgtgatccgtagggacttaggcatttttgcttcggcaatttttcctcacaacagtatggcctaatgctgttaaaatcctttgtgatgcagttagatgattccttggaattactatgatgcaaataaaaaaaggtacccgacaaaaggtgttatacttcttttgtaagcctttttaggctgcaaaggctgtttgggttttgttgagatgattggtttttgaacagtcattctctcggcatgttatatgcttattttttattatggcgtgagtatagcctaggctattttgactcattaattgtcgtgatatcatatttataccacatttgatggatctttgagagtttttactcagattcttgtcatatgtgctgatttatggacctttggagtattttttactcgggcctctttacgtcttcatttttggtatattaaagctaaagcagtcggctcgatgttttattaagcgctgcatatgcttagctatatgatactctggatgatacggttgtaaaaccactcggatggatgttatttgcactttgactatatgtttagcttttagctactcacatagtcgggggctacacctaattaggtgcatctattcgatgcacctgattatttatttttagcccttcacagtctttgattttggtactcgggagatcaatgcagaagaaattgaagcactcggattatcattttgtgctacaagaaaagactatttcatcgactgtaaaggtctcagaggctactgtggagattatggataccccatacctacacggcatgtatagtccgactgggtatgaggtgccatgtatagatagaatatctttaagaggactcgggttaaattctaaacttgtatgtcaaggaagtacctgagatcctagtcggttacgattgtattttatctgtaattacatattccgttagggatatgaactgtattttataatatggaccccttcccctatatatggaggggtccgggtgtctctaggggcacgatttttcacctagatcatacgatcaataatactctcggcggatcaatccccagacaggagtagggtattacttcttgattaagaaggcctgaacctgtacaaaattccttgtctctaaacccatccacttttccagcttgatagccacccccttttagtattgcggaaatcttgtttcgacactgagccacttcgcccgagcttcatcaacctctgtagatcaagaatcccgaaggaaccgacgcgaggtggaccacggaggaagatcctcttcttcttccccaactccggccgccgacgccattcctttatttctccttctctggtgagcttcggtgcaaatatttttcgcctagagctaccttgtgctgatctaaaccgaagcatgcaccctccctatgcagtagaagcccgggggtacaccgtcgacgacgaccgtagcagccgcgccgtcgccgaaccagtacaccatcgccaagacttcgtcgagccgcgtttgcttcttggtgagcctcctagtagtccctagagtccttaccatacgcatgcacgattagatcgagcctcaaaacccacatgcatatgcaagctgtgctttgccgccgcttctaacactctaatagccgctatagagcacgaaagcttgcactaaagccaccaataggttcgcacggtcgttctctacacttttagttttgggagcttgagctgaatcgccgccgttcgccgccggtgatgctgtgaagctcgcggctgtgctgctgctctgctctgctctgcccagagcaagggcatgtctcgtgaaatttaaagactcccagggatgaaatggcaactcaaccaaaaacttacatgtaggaccagtactaattcgtaaataaattaaaactcgagagtctttttgcataaaatcctaaacaccgtactaggggctgcgggatctatttcccgagaacccaggggcttatgcgcaaaaccgtagtcgctgactggtggacccgagagagtaaatgatttgagaaaattggagaaaatacaaaccttgtttcttatcaactgaaaaatgacagaactttagaaatttgtagaaaattcatcctaactctaaaatttgcaaactaaattttgttggaataatattttcatgctttgcatcaaaaaaatggttagcttaacagaatcataaagatttatgtctcaaaaatccgaaatgcatgtaggtctatatttaacatgtagacactttaaaaatttgtaactttaaacgaaaattattaaaattaaaattctttcactaaaaatcaaattaacacagatcacaccaactccataaaaagcattcattttagagcatgttggatttttatgtatgttttaatttcgattttgcatatgtatgtttagacgattcgcagccgagtcacgaggaaacctacctttaagctgagcaaggagtggaagagcaaggcaagccacctcccctctttgatcacattgaacctatgatttggaggtttttgaaaagattgcaaaatatgcatgtctattgtacactaatctattaaaatcttgtaaaatttgttagatcaactccttaacttgcattatcacctaaactccacaaaagaccttaaccattattccaaatcttaggaaaaattcattgtgtcacattaagaatgatgtttgaggtcacaagtctataaaaatgcttagccatgcttagtgatgagtttacttaccgtttgggctcaattacatatatagaatgatttattttatgatctgaattaaaatgttaaaatgtgttatttgtcaaataaaatgatggaaaatatggatttttaggtttgggcctcatgtggtacacatatggtgtttagttgtgttctgatagggggagagtgtgtccagaccgacctaaggacttcacccagcgtcagttcatttcgtatacagtacaaccacatgtgctagtatgggatagcccaagcttagtaaattatttacggtttagccttacattctggtaggccggtgtgtatgagttagtcaataattctgaggaattagtcgttgattcagaggaacttcctatttaccccgacgtggtagtttaggtgactaagtctgtccaatacaacggtatagtgccacgtggtgggttcccgttgtgtccgccaccacggcgttaagtttaaggcgtgggcctgccacctaacggttctaagtcatatatcgagtatggcttaggatggaataacacatatcatactggtgtaaggctaaatcatgaatcttggaagggctttgttgtgagtaataaatcgggtacttatgtatcgcatgccatgctctttcatgattattatttcgcatcatgtgggtaaagtgtacgtactctgcagagttaaaactaatcaattagctgtgctcatggtcaagagaggcgtatgaatatgtcatgagtatagacctgtattttattcttctaaagctgaatttgaacttcaaaatgtgatctgatttatggatttttgtccttgctgccatggaaggcaataaggagctatgttctatgtggttaacatctattttgatgcccatttgctaagtgtatgcttgctgaaatttaattgaaaataaatctgaatttgaaatgttctttgcaaactaaatttgctttatgctaaaattatcccatgtaagctttactttgaatatgccatgcatgtagagtactaggcttgcttggtgcttgccattacaatttatttgtactgactcttgcttgtattgttgtattgttgcatgtttagatttggttgcagctgagatcactcctgaggaggatgatttcaatggggatgtctctttcttccaggatggttcttactagggtctaccctagtcggttgtatgaaaagtcttttgggtagaaaatgcttccacaaacctaacttttcggccaatcggccatatgtatctaagttataagttgtatgaacctaactaaaacttagaacttagaactctctatgttgagatatcatgtgcttggataaaagtgtttagtgtgttccttttgttagggacatattaaacatgagtatgagttaaagatatttgagatgtcgtagatctttagccatttttgtcaagtctcctgaatgtgtaacacatctggtcgccgtcttcgagtggtttgacaggcacatctcaggctgaagttgactggctggctaaaggcccagcaatgtctcacatatctttctcttggagcgtcgaatgtcttaatatgtttgatggaagaattgtgtttagctattcatccttcaaatatacaaaggggttcggagtgcttccgacagctgagggagaggaagggagggggattgggccgagcccaaaggagggaggacttgggccaaaaatggcccaaggcaaaggagaaggattttaatttgtttttctttttatttaattaattaatttaactttgtgactttaaaattatttcttgagctcctaaaattcacggaaaaatcctgagagtattttagggcacaaagaatattacaaaatattctcggccaatgatttttaaaggaaattttaatttcctctataatttcacttgattaaattgatttattttttatttaatttctagaaaatgcattatttaatggtttttaattccgaacgaaaatcagggcgttacagtttgtagctcagtctgggaatgaacaaaaggacacggatagggatggatgaagtcaggttcgatggatatctctagggcaaatgaaggctacacgggcggttgtctggtagtcgagatgtcatggcataggacaggcattgggaggtcactcccgagggatgttctgatgctaggggctcaaccatagcctacctgtcccgggttttccggccgtaggcgggcgttgggtcagtattcttgttcatggataggatgggttaggaactatgtcacatttttatgatgggttccaaggccatggaatgcggcgcaaagatgtgtcttctgggtaaagatatacacctctgatcaaagtataatccattctaatagccgcgcgctcggttatgggcaaacctagcaatgtacccaagttagtggtttcacacttaaaaattggttaatcaactaaaacctggaatagttggcctgggttcgcttgggacgggctgggacctggtttaggttgccagttcggtccaactcatcgtaaaccttgggttgaggcaggtttatgtgggttcacggccttaattaataatactgtttagctctagaatcgtgtttgcaaaatagctttaggcaactaagtcacttttaaatgctgtttaccgcaaaacctagccctatattattactcctttgtaaccccttgcattaatcatgcatgtcccgatgtgtcttgctgagtagtgtggttgaactcattcttgctcaatctttcctcccttcagtaagagaagctttggagaagtcctaggtggagtcttggcttataccccagttgagcgcctttgaagatggagccgtaggcccgctagtccactgctatttatttttggttgtcaggcctgaagtgcctttgtaataatgtaaatattatcattataataaagatgtgtcttttgtatcatgattgttgaagttaccttggcttttcctgggacagggatcaatgcactagtgttcaggagaggcatatttcccgggagcgacatgaggggataactctcgctttgatcgagtgcgacgtttacgatatggcaaccaaccagaacaagtccaggacgccatgtaatcgctacactataaacgatgtcgtatcaaccgtgacgcgctgttgatgatccctgtaatgcaaatgagagaacactgcaagaacaagataagatgcaatctaaatattatgaataggtgattaagaacaaagaaatagttacgattgaagtggtagatctaatcgacccgactaatcaacacaccaactattgggggctctgaatatatagtcaccaactaatcgagcgaggactagggacaagctgaatggcacttagcaaaattcaactaaacaaaagccaaatgtttttgagggtgtacaaaactatttatagaggaaaatgtatctacggttaagtgctaattcgtggaggtggagggagacacttccaacatggccctattctattacaaggcccaaggcccaagttcggtttcagcaatagcattgtcttgttttggcgattcccgttgactcgagataaatttagatatgagattagatgagattgaaaagtgacgaaataagctttccatcaagtccaagttcaccaaaatcagagttggcatgaaggcgctaggtcagtttgaattcagtgctctctctagaggccgaactggattccaaaactcattggacttgaatatcctatagatcctccattcatccgatgtattctttggcaatgttttatatttatcatgcttggttttatgtctatacttgacggtcacatcatctgctctgccctgagaatgaataggtaggcatttcattctttactggtatctttgatgaccgccgtgatacaatcagtccatggtctgatgctagtgaaatggtcaattaagcctagagggtgatgaataggctaattcaaaaactcaagtaaatgcggaagcaggaatttttagaatttccgaaaataacagagtatgcacaatacaaagaaaattctagagctagctgcctacaacaaagaaatactagcacaaacagcaactagacctatagcggcaccaaacaagcaaaaagtagaggagtgagaaaagggatatcaccaaagatgttgcaagatgagatgttcacggagtttgaataattgagaggattctactctcctttgaagctcacaaagagtcaggtcttcgctaaacctttcctcaagaggttgcacaaagcactgctccttccattagtggtatttctttcctttcggaggtgagatccgaccttcacaaacttctcccggccaaccacatattgatcggtgccttgagagtaatacctagccgtttaggagtcctcaaccttcaagagtaacaaatgatgccaagatctcctggagatgaagcaagtgctcacaaatgttcatgaagccaacaacaggcgttacacaaacttggaatccacaactgtcacacatacaccaaatccgaatcaaaccacaggtggagaggggaaacaagaaagcaagggtcaaaagtgaatctccagatgaacaagccaagggccgaaaatatccgatcagaccagcaacccacacaagtagagagagtgggttattatataccacagctctagatctacccgttatgcacaataattacaatttccgtaattccaaaaattaatttcggacatatcaaaaaatttccagaacaacaaaatagtaaagtcaactgatgtttttcggagattccgaaaacttttcggacaagttcga

SEQ ID NO: 7793 - DNA, 96873 bp, Oryza sativa
gcgcccggcggcgaccatggcgggcggtgccgggttggcgggtggcggggccgcgcccgacggtggccggcggcggcgctcccggcgggcagccggaggtgccgccgatgggggcgcacccgccggcggccgtgccctctcgactaccggccggcctcttttcttttctttttttttgataatttgtgattgattgagatgtgtaattttgtgattcattgcatggttataagatgtataatatgtgatgtatttaatttgtgtgtattttttaggatttgtgatgtatttgatttaagtgtatttttttaggatttgtgatgtatttgatttatgtttataagtaacttaggatgttactttgaattgtggatttggggattgatttagggatatacatggcactagattcgggagaaaatatagagattaaatctagcaaaagaaaaaaaaacgctactctctctttagtcccggttggtgttatcaacagggactaaagattcctctcttttttcccggttggtaacatcaaccggcactaaagatcgatctttagtcctaggtatttgaaccgggattaaagatagcgatctttagtcccggattcgtactctttattggaaaactgggactatagggggttaccaaccgggagtaaaaagactttctccaccagtgatatctctttgtatatttatgtaaaaagtaaaatatgcatcattaagtatgttgcatacaaccaatcaagattaatttctgttggtgcaatgatatatagtaatatttaaaacatgagcaatctacaggacacgaagcgatagagcaccttaaccaataagaattaatttgagaatgatgaatattttggtgtcctttgctcggaggatgagctaacttggacggggagtattcttttaaagattttagatggtatgctttaatggcaaattttgaaatgatgtcctcttatagacacgtgctaaatagggctggcatgatactatatgttgtaccaaaacaaatatcttaagcacgtacagttgtaccttctactttaatgagcaggccgaattaaatgaacaataatcaggtggtgttgaccctattgttttctagcttaatttgggcaactacacatgcgtgttcattgaactaatggaaagaatggttgaatggttatggtccgctatatatctccattgaattgaactggatggtaccccatgccttgttattggatttaattgttaggtttttcgccgtaccaaaattaaagttaactaaaacatttttcttatgaaacacgatacaaatgtatgagctcataacacgtgaaaactcactcttataaacgcacacacgcgtatagtccattccttccgaaaggctaggctggcacatcttgaaattgatgaagttgcctcgctatcatgaggtacaccacctatagcattaaaaaaaattaattagttgtaaattccaggacccaagttaattatatgacttcaacttaggtgaggcagtttcatcacaaggaactaaataagttgagctacactcgcttcgcgttaaaacattatgtttatacctgcatgataatgtagcttcatgtattgcctcccactacttaaaataattttcggtccacaagaatgcacatgcatgtaaaaatacaatgggaggtattaaaaacagtcttcacatgtgctggtattaaaaacaacgcttgtaaaaattgagctatataggaaccgcatcgtaaaagttgaacgccctgtaaatcactatttttacaagtggaccctaagaggaaccaccaagatgcctctcttatccatgaagtgacaacaacctgatttagcatagtcggacgataaaacggtgcaactgattcttgagtatgaagaatctcttcagttcgtttacgcaacgacaatgatagggtacgctgtgatggtgcatggttatttggccttgctgctgtggtggtattggttgagtaacaaaattgaaaatcagcacacctcttggtgcacctgcaagctcccatacaatgcgatatctcaatctctattttttgtgtgatagatagtagatgtagtatttatgtgaagatttatatgagagctagctattggcatagtcgcctggcctcaattaatatcataggttcaataataaccattctttttttattcctaagctaatcttctgactttatgtaaaaatacacaaatatgtataataataaataaatacactactaagacatattttatgatgaatctaattaaattaatttggtgttatgaatttaatttttttataaagtcaaccaaagttagagaagtttaactcaacacaaatttaaatagtttaaatagttgcaaccaaacttttactcggttaaccaaaatttgtgaggatttaaatagtttaactgagtaaaccaaaatttgtcaaatagcaaaattcgtctgaaatttaattagttaaaaacacgaagtcgcaaaagcaacgaaagtagtaaataatcatagtttgatagtggtatttttattttctcaaatatctatttttatgatgtcttaaaactaaatataaattcgtgatatctatagtagcaaaatttgctaatatttatttattatcagacggtacagattaagtacaatactcaatcagcccttctagcaatcaaccgatggttaggatggcctttgctactaattagcttggaaatacatatttttacattctttttaaaagaaatagagcacatcaacgtgatcgagttgcttagaatttaacatgaatctcctatttcactcttgcagcgggtgttgtagacgtgcggtgtggttgtttttttccctgactatagtttttcaggactatagacttgtatttttcgcttgttatatcaatacattaaactcgcgttgtcttgtgcggctcgtatttttttagaaaaaacatgattgttctgcttttaatttgtctccctcgacgttgcctaagtgagttgttatttatcgatcaggtacgatcattattttcattataatttaggaaaacacgagccctgttaacgattgggttatataacacgtgcatgtaaaagttcagaagacccataaatcaaatgcattttagtcttcttctttttccagcccctctgtaggttacctatatttgttgaaaatcttgataaaaaatctagttagagataaaagaacgggggccatagtagtactactagctatatccagcccacaaaccaatctgtacctcactttggtcattttggtccggaataagttcatatgagatcctttaacttgtcatggagtccgatttgtgcttcaaccaggaatcagatacaacgggtccctcaactgttaaaaccgatccaatacaggtcccatggtggtttgaacagcggttttagctgacggcctacgtggctaatttgattctatcttcatctaacatggtgcttacggtgcaattcaacatggaaaaataataaaatcatgggacccacatgtgagcatcatacatataataataaaaaaatggttgggctcatgtgggccccacctgtcattctcaatcccctcctcttcttcctcctctctctccccatctcccatctctctcccctctgctccctccactcccgcccccatgggcctaacgtcggcggccgccgcccctattccctttcttccccaagacagacatcaccgcggctcgcggcacccgcatccgcatcgtctccatcggaccgcagcacaacaacgaggtgcgccacgttctcccggtcgatccacgcatggatatcgctggcgacactgctagcccgcacgcgcgacctcgaccctgatccggacaggtccggtggcggctctgtcgacgtcacagagcttcgacggcgtcgtgttctggctgcggctgtggctgtgtcggcctcgcccgcggccggggcaccagaggaagatcccgtgaatctccgcgtcgctggacgatgccctagccgccgcggatgcctccacctccgaatccctcgcggcgctcgatgcccgcgaggctgccgtccccgcgttcctcgccgaggccgaggcggcgctgtccgcggctgtcgcggactcgcggaggctgagtgcacggagtccccgcccgccgaccagtggcgaagctaggatttaaggttaggggggtgtggtggggatgaaacaagccataagactaaataaccaatgtcgacaataaaacaacgtattatatgttttgccatacaatcattgtgatttttcatcttcacaaattgagtactaagttagactacaatctctaggtcagggatagaaaacggtcaaatatttaggtattgttgtattgggagagagatcagagaaataactccccagtaggccacaaccatcggtacgtgggaggatggagaggtgcgcacatcatgcaaagctgaagcgatgaagacaagaccttaatctgtgttgtctctctaatatctttctcgttaattaattttctagaccatgtttagtgataatgggtaattaacatgctaatgggctcacgtttgctgcctacctagccttgttacgtaaagcaccaggggagggggagtgtcggataggggggtgttggccccctccggcacccccgacagcttcgccactgccgccgacgtccggagcgcactctggtggatgtgcggccacatggacgccgccgcactctggtgcttcatggcggcgcgctggcggcgttttgctgtccatccgatggtccggccactatgccgggcaacggcgccactgcatcttaccacacgaacctgaacatgccactgcagagaagtcctccatgcgacactccggttgcacttgagttccgtcgctgagcccctagtaacctgtagcactatcgcttcaagttcagaaactgaagaaccgagccttggtttcttttcatgaatcacgagaaaaaaaaaaccacttttgattgcgtgtgcttatgatattactgtgttaaaaaatataatgaagtaacgaacattccaattttggatcctgtgaggtctcgagattgttgagagatggtcatcaatcaatttcatctatatactgcaagcggttctgaaagtttgacgacagcacacgaaaccaccactgcaacgttcggtttggcagcggcgatgccaccgtctagcaagcaccgtggccggaggcaacatgaacaggcaagggctagcaggattgctggtgatgctcctccgtgagctgagctctcgtgtgcccagccggcgcattggccaccgccttgccagccgcggaggtcgcaggtgtggccgtttccttgctggccacggaggtcgccggtgtggccgcctgcttgccaacggccgaggtcaacaccagagtccgcgtccttgacggcggccgaggtcgccgtctgcttgcagccggaagagggaaggagcgaggagtgaggatgaaatgtgcggtccacgtgggagccaccaattttaaattatttggtgtgtagctgacatgtgggctgacagtttttattcttttccagggttaaattaccatgtaaacactacgtcaatgtcacgtgagacgaaagacctagtcaaaccaaccatgtgcccaccacgtcaaccaaaaccaccttccaaactgctgagggacctcatttgcaccggttttgatagttcagggaccaattgtatctggtttttaggttaaggacgaaaatcgaatttggtgtaaagttaagggacctccgatgaacttattccttttggtccgttccctcgccgtcaccgggcagaggcacgtagtaatggattttcttttgttgccaaagggagcagatagttggaagtattggaaatgtgttgctttttatttcattgtttgtccttccctcgttttatgctgcaattttgatccccggtatagaaagctgatataatgaagtcaagcaatatgcaaagtgtctacgtttgatgtcgcgattatagtatttgcatagtatggagatcgttggtactaggatatatgcgagattgtaataaaagagatggagatagggatttttatacacgttcgggctcctgcattgtcaagtaatgaccctactgttggccgaagccggttgttactcttattcaccataatcacaccagtataatatttggggtagcctatctaactgttgtcgacttgatggtctgaagtgttgactcgtagtcgacaatagggtagcattcctcctcgaatccgcatcctgcgagatcaaagacagcactatgtctctcctgacaatatccgtagacaccgtaggggactagtcatacttatctctgaagtcgatattcggcgtcttgtcttggcgcatgttggcttgtatgttgatcttgtgtcttgatctattgttccgtgtcccctctcctcctagggggccttgtatttatacccataggtgtccccttatccaagtagaactagggaaaccattatggatacaatccgagtagtacttgtcgtttccatgtagaactctattcatccttccttatgcggaactcctcctatatccgaagattgtttccgtataagacatggtatgtggtatccataaccctgacacaaagaactttgtgttcaatttattctcccaattgcttttgccgtgtttttttttcatcatctttgattttcaatgctcttttttttcacatcacctgatttatatcgatcttgtttatagcggtgcgaggatctcgatccgttgtaggagggggaacgactgaagatagcactggtggagaaaccatctttcgtcggtcagccaaattccacaatagtcccggttgcaataaaaaccggggctaaagatgatctttagtcccggttaaaaagggtaacgggcatatttgatctttagtcccggttgataacaccaaccgggactaaagtcccacccctatatatatgtcttcttcctcctctagctgcccgagcaagcttcaaaatttcttcaaaaaagaggggaggtcatgccaaaatttctagtgaatttattttggtgattatatacaaaatcggaggtgcctaaaaggttagcaacttcatcctccaatgtttttttgtcatattacatttagagctatgttttgcacacttttttatctccaaaatttagttgtaagttgatgagagagaaaatttgtgtggggaagaaagaatatatagaaatttagtttatttgctaaagaaggttttataaaatagttgagaaggaaaatatagtgaaagttaatcttaaataatagaaaacaaacaaaaatgaaaattaaaagaagtacaacacattaatattagtttaaaactttagaaatagtacacaagaattagttggtgtaatattttataatttttgtatgaataatgatatgtcattattgtatgactgttgaaagagtttgtaattattttataattattgtatgattgtcattattgtaaaaataattatttgtgtacgattttttttcatgtcatgtagatggatcggcaatggatgtacgctgaccggcggtccaaagagtttattgacggcgtgcattattttttgagagtggccgaagctaacaggcataagggttttatttgttgtccatgcaataagtgtaagaatcagaaggagtattttgcatccaggactattcatttccacttgtttgagtcggggttcatgccaagctataattgttggacatcccacggagagcgaggtgttgaaatggaagaagatgaagtggaagacgacaatattccggactttgctcagtatgttggatttgaaggaaatcaaacggacgaggaggaaagggatgctgatggtaacaacgttgcggatgatcttggttagatgttgcaggacgccaaggaggactgcgaaagtgaaaagggggcccataaattggacaagatgttagaggaccacagaacgtcgttgtacccaggttgcgagcaggggcacaaaaagttcgataccactctggagttattgcaatggaaggcaaaaaatgatgttagtgacaaggcatttggcgatttattgaaactcgtcaagaacattcttccggagggaaacaaattgcccgagacaacgtacgagactaagaagatagtctgccctctaggactggaagttcagaagattcacgcatgtccgaatgattgtatcctatatcgcggtgaggagtacgagaacctagaagcatgccctatttgcaaagcactacgatacaagattagacgagatgatccaggagaagttgacaggcagctaacaaagaagagaattcctgctaaggtgatgtggtatttccctataataccacggctaaggcgtttgttcaggaacaaggggaatgctagaatgatgcgatggcatgctgaagagtgtcaacaggacgggatgctgagacaccccgccgatggttcgcagtggcgaaacatcgacagaaaatttaaagactttggaaaagacgcacgaaacatagggtttggtttgagtacggatggcatgaatccttttggagagatgagcagcggccatagcacttggcccgttacgatgtgtatctacaacctcccccctggctatgcatgaagaggaagtacataatgatgccgattattattcaaggccccaagcaacctggtaacgacatcgatgtgtacctaagaccactggtcgaagatcttaaactgttgtggaagaaggaaggtgtccctgtgtaggacgaggacaaacagcaggagtttaacctacgagcgctgctgttcgtaaccatcaacgattggcctgcacttagcaacctatccggacagtccaacaaggggtacaaggcttgcactcactgtatggatgaaacagaaagtacgtatcttaagcactgtaggaaggttgtgtacatgggtcatcgtcgattccttgcagcaaaccacccggtacagaagaaaggcaagcactttgaacataaggcggaccaccgtacgaagcctaaacatcgcagcgggaaaacagtgtttgctatggttaaagatcttaaagtagtgttcggaaaagggcctggaagccagcctatagagagcgaagatggtcacacggcaatgtggaaaaagaactctatattttgggagttaccctattgggaattcttggacgtccgccacgcaatcgacgtgaagcacctcactaagaacctttgcgtaaaccttcttggcttcctaggtgtatatggaaagtcgaaagatacactggaagcacgtaatgatctgaagcatatggaacaacgcggcgaccttcacccggaaccaaaggacaaaggaagccattacttgagtccagccagctacactcttagcaaggcagagaaggaaagtatgtttgaatgcttggagagcataaagtaccatctggatactccacaaatatcaagcgaataataagcacgaaggagaagaagttcacgaacctaaagtctcatgactgtcacgtgttgatgacacaactgctactagttgtaataaggggtatccttccagacaatgtccgggcaataataacaaaactatgtgcattcatgaacgcaatttcgcagaaggttgtcacgaccggaaataacccaacgggcgttccttacgtgtgtgcattattccttgtcccaggaggcaaggtacaccaaaagttgatacagttcagagtttaacaagcggaagcgtaaatagataatttattacatgggcagcgaaggcccagcacacacaaagacaaacgagaaacagcggaagactagggcgacgaccacaggcgcttgacggcaggcacgagctagacaccaaagccttcatcttccagggactcctcttctgggtttgggaaaaattgagcaagactgagtacaaccaccgtactcaacaagacacacccacaagtgcagaataaatgcaagggagtacaagggagttataatataaagggttagggtttgcagtaaacagcattaaaagacacttagttgctcaaagctattttgtaaatacggtcctagagctatacaatattattaaacaaggccgtgaacccacacgagcctggcaacccgaccctgggtcccagctcgtcccaagccaacccaggccaaccattccacattttagttgttaaacaggttttaagaattaaaacactaacttgggtacattgcttggcttgcccataaccgagggcgcggctattcgaatagattatactctgatcagaggtgtacatctttacccacaagacacatcttcctcacgtgtaaccacgtgccacataccaccacggtatacggacggaagacgtgacatagtttccaacccatcctagccatagacaagagtaccgaccaaatcccacctacggccggaacccccgggacaggtaggtaggactgagcccctagcagcaggacaccggccctgtgccatgacatctcgactaccgggccgcagctcgtgtagccttcatttgccctagagatgtccatcgacccccgacttcgtccatctccatccgtgtacttttgtttataaccaggctgagccacaaactaagccttacccactagacatgtggaagtacggtagtgctttgcaacagaggcccgaagaccggtccttatatggccgaggtgctactatcaaaaccaggcaccccgagcccagcctaaaaccattttggggattttgaatagagggggcggtgtgaatccaattccacaataatcaaaccattccatagtgtccaggtgatgagaaaattcccaaagtctagagttgtaaaaccacctaatgttgcttaattaaccagcgaagcatctacctaaaatcatactagtggtaccatgagtagagtgtccactagttggggttttgtttattctagggtgaacaaggaaataataacaataacaataataaggtcataacaaaggtaaataggcatggctagataaaacagtgataacgtgggaatttaaataaagcgataatgcaataatttaaatcaaaataattttataaactgggattcaatatgttcaaggatgatgtgacttgccttgctcgctttcccaaacgtcggctttaacttccacgaagagcggatcttccgaagctgcagcgtctacacgaccaacggaaaagaaaaggcttttactctaataaactccatataacaagctgaaacaaagcacaaaaatgggttcttgacttcttaaggaaaaattagagacttgaacggtccaattccgagttcaaatggccaagttatggccatttgaagtttatatgctctttaaatgaatatttgcaaatttcttcatttaaattttaattaaaaaaaaggtttattgcgtcagccgaggggaggggcgcgcggaccgggtccacgggagtggggcccacgcagcagccgcacccgagggcatgggcggctgacggccgggccccacgcggcagccgctcggtgcgcccggaggcggccacgccggcgcagcggcgtgaggctgcgcgcccgcgcccctatggtcgccggcggcggccataggcacggcggagcggcggccgagagaggggagggaaagggggaaacgaagcggcggtccacggctcaccccgggtcgacggcgacgacggaaacggcgaccggagcggaggaaggcggcggcgcggctcgggtggacagggtcgacggtgctccggcggtcggcgaccgaaacggagaggtggacgaggtcggcgaggatgcggcgaaggcgaaggaggcggcgccgaggtgggaggtggtccggggcgacgacggcggcggaccggagctcggcggtgacggcggagagagagagcgacggcgcgagctcgattccggcggggagagagggcggtgagtggcggaaacggtggtggggagctcggggagggtttatatagggttgggagtgagagagggcggccggaagagggggaaatgggcgcgggagacccggccgccattaatggcgccggcgaggttaggggagcggtttctaaacgaatccgagggagagagggagagaaaaatggggggaaagggggaggggatcccggggaataattccccccactttattacgcgcggggacggcgggaggcggcgggattcgcggcggcggcggcgctagggcgcgggggaggcggcgggagcggcgggaggaaggggatgacgggtgggccccacccgtcagcgagggtggtgggcgggcccgcccgtcagcggcgcgcgcgcggggaggaggccgaatgggccgcggggagaggaaagggagggggaaggagatgggccgagccggcccaagggggagaggggggaaaaggacttttttagagcttttctttttataaaaccattttaactttgtttatttcttaatatttattatttgtgctctgaaaattccactaaaatttatttacacattttagacttttaggaaatatacaaaaatcctccaagccttatttgacttttaactttgcacattttaattgttggaggctttcacacggattttaattattctaggcataatttagaggatgtattttagagttgttttgggacgtgacaaaggtcatcgatccggatagattagaagcccttcagaataatgtggtgcaatgtcttgtcagtcttgagttgatattttcactttcatttttcaatataatgatgcatctgctttgtcaccttgtcaaagagatcagtattctcgggcctgtgtacctacacaacatgtttcctttcaagaggtacatgggcgttctgaagaagtatgttcgtaatcgtgctcgtccagaggcaagcatcgccaaggggtatggaacagaggaggtcatcgaattttgcgtagaatttattgaagaccttcgcccaatcggggtacctgaatcacgccatgaagggagactacggggaaagggaactctcggaaggaaagcaataatgacggtagacaacaatttattccataaagcccatttcacggttctgcaacaatcttcattggtagctccttacatcgaggagcacttggctctagttcgcgccagaaacattggtaagtccgatgcatggattacacggcatcacattgatactttccccgcgtggctacgacaacatctcatgggtaacgagacgatcaaccaacaactggccttcctggcgaggggaccatctgggtcgatcgtgacactctagggatatgagatcaatgggtacacattctacacgagagcccaagacatgaagagcacaaaccaaaacaatgttgttcgtatcgatgccatgggacacaatggaacaactggcacgtattacggtgccatcgaggacatatgggaacttgactatggttctctcaaggtccctctgtttcggtgccaatgggttaggttgactggtggagccgaaatgattgatgacagtgggatgacaacggttgaccttaacaaggttggatactcggacgaaccttttgtccttgccaatgatgtaatgcaagtcttttacgtgaaggacttgtctagcaaaggaaagaagggcagagggcctgacgagccgaagcgtcacgtggttctcccaggcaaaagaaaaatcgtcggagttgaggacaagactgacgaggattacgatcagtttgatgggcaaccccctttcatggtgacgattgaccctagcatcctcctatcaaataaagacaccccttactcaagtagcgatcacaaggagggaacaatagtgaggagaaagtacgtgcggtcaaccgtcaccgccgatgtattgctataattattgtgtacacgatgtaaactattttggatgtattgattatccatataaatcaattgttgtatggcatatgttaattacgtacgattattagaggttttaaccattttaaatcatgtaattgctagttatatgcggtaattagaatttttaaaagttttaaatcatgtatgtggcatttacatatgatacttagagtttttaacaattttaaatcatgtatatgctagttatatgcgataattagaatttttaaaagttttaagtcatgcatgtggcatttacatatgttacttagagtttttaacaattttaaatcatgcatatgctagttatatgcgataattaggatttttaaaagttttaaatcatgcatgtggcatttacatatgttaattagagtttttaacaattaatttaatatcattcatatgctaaatatatatggctattagaatttttattaattttaaatcatatatttgcttattacgttttatccacttaatttactacagacaacaataatttttcgaagtaattgtcatttaattttcgactttaaataattttaatgcattattttctattttagaaacacatatgtaatagaaattaatattcagtgcgcttattagcagtcccggttcttacccctaaccgggtttaaagagaatttagaaataacgggaaaatatctttagtcccggttgatgagaataaccgggagtaaagatagaaaatatctttagcgggaaaatatctttagccagctgcctcgttgccgacgccgtcgccgacgtcgtcgcggccgaacatgactctgccgcgccgacgatgccgaccccgacctcgatgcggccggcaccggcgacgacgtcgcactggcagtgccaatgaagccgcgccacgacgccgttgcggcacggcaccgccgccgtgcaacgccgccaccgcgccacaccgatgccgcgcagccacgccgccgccacgcaacgcgccacgccgatgccgcgccgccatgccgccgtcgtgccaagccgcaaccgccccgccatgccgccgctctgctgccgccacaccgccgctccgctgccgccacgtgaatgaatgaacgatcgtgaacgagaacgaacgaacgaacatgaatgagaacgttgtcacaccctgaagttttcccccttttgcttgctttaaaaatttgttaaataaatcgtccggagaaattatcttaattaacctagagctaaatccctagttaataaatgcaattaataatcggaaatagtgtggtggaatttttcttgagttccccatgctccaatgcattaacaagaattttagtggaatttttagagccttggaaataattttaaccaattaaaaatcaccaaagtgcaattttaaatcccaggaaaaatcctttcttccttttctttttcttttccttcttttttctctattgggccgtcggcccactccctcccgcgctcggcctccccttgtgggccggcccgttctccttccccctctctccgggacgttgacaggtagggcccacctgtcaggtcgtccccttcctccagccacccgcctccgacggcaaccgccgccgaatccgccacgccgccgcctcctccgctcttcccgcgcccactccgcgcccgcacccgcgtccacgtcgccgcccacctcccccacctctccccgctctcgcgcccgcccaaaaatgggcgggattcgcattcgaatccacctctctctctctccctccactccccacatcgccggccaaataggggccattcccggccgtttccgcccctccttcgcccataaaaacctgcccccgagtcccctctctcgtttcacccatttgccgtcccctcccgtgccttctaccgagcccgcgccgctcgccgctagcgccgccgcttgccgctgcctccggccgcacgctgtcgtcgctagagccgtcgcctcgccgctcaatcacctccgccagcttcgccgccgcgagagctacctcggccgccgcttcgttgccgcgaatcaccaccggagctccgatttccccgcgtcgccggtgtgctcgccattgtttccatctccggccggccattttggtcgtcgcggtcgtcctctccatccctaactcctctcctcaccttctttaggtgttgccaccgcccatccgccgcccgtgtcgccggtcgtcgccgccgcctttgtttccccgcgccggccgccaccgcctcctcggtgaggaccggtctccctcccttcctctctctctctttgtcgcgacgcccgccgcttagcgccgccgctgtccgccgctcgccgtcgtgcgccgccgctcgccgccggtggccgcgccgagccgccgcgcgccatggccgggccggccatgccgtgcccgagcgccatgcccgggctggcctcggtgccggccgtccccagccgcctgatcggccctcggccgatcgtggccgtccatcccgtggcccgcgtggccagccacgtggtgccacgtggtacaccaccaccccggccccgtggacccggtccacggcagaccacccctttgagccgctgacccgtgggccccgcctgtcggcgccgccccctggatgacgtcagccctgggacttattgcgcaataaatacattaaggcttttcttttatagtaataaacacagtttatcttctaaaattcataagtaattcatccgagctccgtttaagtccattcaagtctcagtaaatcaagaaaaatgcaaagaatccattaaaaatacttttgtttcctgtttcagtagtcttatagcatgttttgcttgtgtgctttgtttgtcgcgtagatttcggccgtttcgtcgatccgcggtttctcgaagacgttgctgaggtctcatcagtgcaagagcaaggcaagtcatgcaatacgtttgatcatattgtacccaatttacaaatatcccgcatttctattaaatgttgcatccttttacaatgtaatgtgggatgggtcctattactcagccatttattgtttaccatatgccattgataacttgggtatttaaaatgactagatgttggcttaggaaatgcttagccatgcttagttcaactagtacacaaatggggatcactttattacatagactctgtctattggcataactttagattggtgccaccgcaatggtgttagttaattaaaatacactgtatggtgggctgtgggtgcatggttttgctggtcgcacccatggcagttaaagaccggttcacgggaaaccctgggagacctaccgtgcttaccacaagcgggagtgggtaactgcttgatctgaagtatagctcgaccctttcctaggcaccggtggcgagggtgggcgtgatggagttgggtcagccggggtgtccggttgtccagctgccggattcaccgcggcgcaagaggggaccgcccactgccttttgaggggtgggggtgaaaccttagcgtggtgtggatggttaggggagggttatgcggagggtcttgtcacgatttccccctttgcagtatcatggtgatactttggagcatggcgacatgtgtgggatcgtgtcttgtgggtacagttgtacacctctggccagagtaaaactattcgaatagccgtgcccgcggttatgggcgatcaaccagattcaccgtgattagtctcacccctagtctagcttaatgaactggtgtagttcaggtggttggttgggcctgttgcaacgtggtgtagcgttggacagtgattggttaatattgattaattactacagctattttactgctttcaactactgctttgaaatgtctgctttatgcaaaagaacccctagcttcctttggttatatcctgcatcatacctcctcttccggtatgacttgctgagtacagtgggtagtactcagtcttgctctcttttcccccacaccagagttgaagtttttctcagttggagatgtcttgaagaggtgggtttcgtcgctgccgtcaagggttgcctatggaatggaatcgcccgctgcaggagtcaagtcttcaggcttagctcgcttttaccttttccgctgcatttgtaatcctttatgtttttgtaagacgtggatctgtatgtcaacaattgtcgtttgtgtaccctggctggtcctggacaggggtttaatacacattcagcttagaaattctggttcgtgaatttctgggcgtgacaaacgtgaatgaacgaacgtgaacgaacgaacgaacgtaaacgagaacgtgaacgtgaacgaacaaacaaacgtgaacgagaatgtgaacgtgaacgaacgaacgaacgtgaacgagaacgtgaacgaacgtgaacgagaacgtgaacgaacgaacgaacgtgaacgaacatgaacatgaacgaacgtgaacttaacgttgtatttgaacgtacataaacgaacgaacgtgcgtgaacgaaaagtgaacttaacaagaacgcgaacattatttaacatacgttaacgtgaacgcacgtgaacgaacgaacgtaggtgaatgaaacgtgaacttaacgagaacgcgaacgtgaacgatcatgaacgaaacatgaacttaacgagaacgcgaacgtgaaatacaatatatgttactttgcgtttatcctaatacatctttttgtatgttgcagaaaagacgttgtcgtcgtcgtccctcaagtcggagtggtagctagccctcgaaggaattcgcgcaggcaagtgatgtaaatatatgattgttagatttttaatgcaattaagactattagatttaatatacgacacttagacttagcattataattagagttttaatacaatattatttgagttttaatataagattattatagttttaatataagattattagatttgtaattagacttagcatataagattgtgtagggttctaatatacgacagttagacttagcatatatgactatttgagttttagtataagattatttgagttttaatataagattattagatttgtaattagacttagcatataagattgtgtagggttctaatatacgacagttaaacttagcatatatgactatttgagttttaatataagattattatagttttaatataagattattagatttgtaattagacttagcatataagattgtgtagggttctaatatacgatagttagacttagcatatatgactatttgagttttagtataagattatttgagttttaatataagattattagatttgtaattagacttagtatataattattgactagggtcctaatatacgtcacttagacttagcatagttgactattacagttttaatacaatattatttgagttttagtataagattattatagttttaatataagattattagatttgtaattagacttagcatatacgacagttagacttagcatatatgacttagcatatatgattgttagcatataagattgttaaagcaaaaatgacctatagacttagcaactatttcttgtatgaacagatggctgatcgcgatgaggaacagatattgtacgatacaatcgcggagggaagcagccagtactggaacgaagaagaggggaacgaggatccaaaccagtacttgaacgaggaagggaacgtggagagggatgcggaggggaaccaggaggggcacgtggagagggatgtggaggggaacctggaggaggaggctagtggaagtcaaccctccgcaggacagaagagggcacgcgggcaacgaggtgccgtgaagaagcttgagggtcggcacatcataacggaagtggacgaagacggccgacctagtgccccggcggaagcagccaagaactacgtacgacacagcggttgggttgtgcgggataacatgcctgttagtacggtgtactagcgcagaacaagggcactcggagatcatgagaactttgtcccagattcggagaaagagatgctgtggacaataatgctcgagacattcacccttcccacgggtacataggacaaagtgaaaaggtggactctaaagaaaatggcagaacagtttcaaagcttcaagggagatctgtaccaaaaatatatcctgaagggacagacaccgaacttcgacacattcccaaagctaagggatcactgggacgagttcgttgcatataagacaagtcaacaagggcaggcgatgttggaaagaaacaaagaaaatgccgctaagaagaagtaccatcaccacttggggtcaggcggctatagcgtcgcgatgccgaagtgggaggagatggaggcaagcttgcttgagaggggtatcaaaccggccactgctaaatggccagatcgatcgaagttctggtactatgctcacggtggaacgctcaacccagttgatggctccctggtcttcagcgatcagatacgcgaggctgcgcgtcgactaacggacgcagtggaagcctcttctcagggcacgttccgacctgacagcgagaaggacgagctgtcactcgccctgcagactccagagcatccaggacgaacacgagggaaaggggtgattccttggaagattgggttcagggaggacatccacacgtacaggattcggatgaggagcaagagagataccgaggcgaagattgtagatcttgagtacagggtatcgagctacgagctcagcatgcaagaggaggtggcaaggaaggttgatgaacgcatggccgcacatcggtcccatgatccccagccgaccattcctcctgcaatggtgagcccttcaggaaatcgtagcagctgcgcctcaacggggcaggtaggatcacagagcatggacgccatgcaaacccaggacgaaaccacctgccccgttgatgacatcactcagcggataccatgtgagctgcatattcccttaaagaacttatcaataaaggtaagctcgtagtttatagattttagatttgtccattctgcaagttgctgcttatatatgttgattactaataaacaacctctcaccacgtgaaggtggcgtcgggcatggccatcccaatggacccttcaggtacttaccactgcaggccgattccagcaggatactccaaggtcgaagttcagttggtcgaaggcgcgtacgaggacctcgagttggattaccctagaggagacggtgagacgcatctacgagacacaagccacgccattatactatggcgcaagtggtacatcatccttcctgggcgacaagcggcgtctcgtgcaccatctcctccggcactgccatctcctcctcatgctcctacaccgtctcctcctcatgctccagcaccgtctccacctcaggctcctgcaccgactcctcctcaggctcctgcaccgactcctccgcaagctcctcgtccgacaccttccaagtcaagggctccccaagctccaccgactgcccccacaagggcaacgaagaaggcgaaagttaacgctgccaagaacaaggacctggggtacgattgcacgcaagattagcttgacgcttatgtggcatcagaagtcaggagacaattgaagcctcgaagtccagaaaagaagattcctatagacccgagtgtcaggaacttcttcaggggtatgtctgcacctgccaaggaggccataaagctatcggactatgagcgaacactcaagaaagcatcttctagaaagtccaaaccagtccctcagcttggagagcaaccaaaccaggagatcgagccgttggtgaccggtgaagattttggaatacaagaatttattaatgacaccaagctaactacggatcaattgctacgaggcgcaccaatcgaaaaggcggaagtgaaatacatgtacgaactcggtaaaccgcttgtcaagcctgagcagttgcagtccctacccacacaaatgtacaagttccatcaactgtacatggagatgagcgccaccggtagagagatgatcggagcgaggatcagggacacagacttcttgcaaggagatgacattctctggatcaatttcaagggtatctacgaactataccagctggacgccctcgacgtctctattatgagttgctggattttgtaagtatcgttcagttagatttcttattacgtttcctttaattaattaggtccttgtatataagtagactatatataatatatacttccttttatcgttgtagaatggagattcaaagggcccgacggtggggggttttcgatactggattcatcgaccctcagaaagtaaacgtcgcaatgctcgaccagtatccgcaagccacagaggaaaatctcatccatctcctgaaggcgcagcattacaagacgttcatactgttgccgtacaacacagagttagtttaattttactgtcttcctataccaaatttcattcccatacgaacatgctaagtgtttcatatgtaatgcatcccacgcacattgcagattccactaggtgctgttactcttcgacctggaggcctgcaccgtcaacatatatgactcaatggataaaaaagagtctacgtttgacaaggttttcgaacttatagacaggtattgtcataagttcctatgttaattaagaatcttgttataattaattgctactaagaatcatagctttaaactccatgtagggcttggtatcggttccgtcatttggtccgcggcaaatggagagaaagacttatgcggaagttcaattttcctgtgagtacacatgctctacatttatattgaatctccaattcaaatacatacaagtgtatattaattagatgtctcgccgtttgtcatttatttatagtgcgcaaagcaaaagcatggaactaacttgtgtggctactacgtgtgcgagtattgccactgccttgcaaaccaaatcatcaccacaagagagctcgatgtacgtacaaataaattcaaattttcattacgtatcgatttgttgtttaattactaattaatttcatacattcatatagtttattcgcatgagggataacctgatcacacacaaggaatttatcgcggcggttcaagaacaactcatgggattcatcaacaaacaaatccttgatcccaagggtgaattctactacgacggaaatacaattcataggtccttagcttctgagataacgactactactacgtcgaaatcgtagctagctaggacatcataatggattgtaattaatacatgtctatttttctatatgcatgtgtacacattttctttaatgtaaatatatattttggtcatatatatatatgcaaaaaaaatgttaagtgctttcacatatatatatatatatatatatatatatatatatatatatatatatatatatatatatatatatatatatacacacacatgcatttgcataacatatatatgtataaatacatatatattatgcatgtatatgtattgaaacatatatatatatatatatatatatatatatatatatatatatatatattatatgcatatatatatatatataatatattatatgcatatatatgtattgaaacatatatatgcatggtatatataaaccatgcagcaacagggccatgcaaaaaaaaaaggtcagctcaatctttagtcccgattgatggctcagccggccacgtggctgagccatctttagtcccggttattttacccgggactaaagatagcgatctttagtcccggattgatagtcctggtttagaaaccgggactaaaggggggttacaaaccgggactacaaacgctttctccaccagtgtagagatcctaccttttaccataaactccctttaaatagcaagttttacggttaggtcctttgccccatctctaccgtttatttttaatccgatggctttgaatcaagtggtgacacgtggcaaatttttagaagggctaaccagatttatagggcgccatgtggctcaataggaagccagaagctataccctgaattcagttttagagattggagttttatatatgtaattatacaagccaagcaacaaccttgccatatgaagtagagtgaaagaagagttggtgtatgttataatttgttaattattaatttttaatttcgaaattaaattaacgaagagccatattgagaaacctaactaatgatgccttcgcttgaaatttattatttaagattgcaaaagaaaatgcatatttaaattaagacaaaaggaagaaaagcacctaacctggtttgctcgctaaatttgtaaattaatcacaactattcctcctgttttgcatccttcattcacccgcctatgaccatattttaaaagaaatcttccacgatcaccttgtcattggtctatgctaatatgctttgtagattgccatggctttgttgcacgggttctgcagcagaactgcatacatgatgcaagcatatacctgtcattagaaccgtcacttaaattatagatggtggaatgattaacgaaacaatacttcactgtgccggcgtagtggcaggagattcgaaccgggggatcacgaacgagatgtggccatctcagcggccgctcgctcctcactgcactgtttctgcagcagatactactactgcaagaattcgccgagtttgacgcccgcgatgatcattgtcaggtagatgcatcgtccatgaagtatcgattttgttcatcaacatgacaacatcttaatggccgcgtgcatgatcatgatgaaaagccactggaaacaattgaaacgaccgtgcggacggactaaagatgatgaaacacgatatggattggtcaacacacttgtatattagatgggtttttggaacacgtatataataaattcgttctaaattaaaacccatatataaatacgtattataatctacggatctttctaattaacgcgtgagagctcctaaaagtgtccaattagtataggtatagatagatagatagatagatagataggttatagatagatagattgtccatatagttgatgagtaaattgtatcgcgaagggcggtagttacacaaggacaaagcgtgattcctacttttatttatggttatcgttcatcactagaaattaattgcaaaaccccggccatctaccgatcatgttctttctatttactcaacctcttcatctttgttcctgttgcaaacgcacaatcaaaaaggctacagtagacggcatggcttcacttttgaccaatcatctactgttggagacatgttacgaggattttcgaccagaactgccaaaacgaatcaacgaccatcggggcgaagcatagccaaggctccgggcaaagccgaagctcttcgctaccgagttggccatcttcgccaagaccttggatgatatgcagattcctcgctccgagctaaaaccaagcaatgcgccttttcatggagtaattccaggattatccgcaactccactcggccagatcaccctcccggtcacttttggcactcgggaaaactttcgcacagagaatatcagctttgaagtcgccgatttcgagacagcataccatgccatactcggacgcccggcgttagccaagttcatggccgtcccgcattacacttacatgatgatgaagatgcctggtccccgaggagtcctatccctacggagtgacatcaagcaagccgtcacatgcgacaaggagagttgcgacatggcccaaacccgcgagatggcgtctgcccgagaggatatccgactggctgcagccacggcgagcgaaggagaagtgcccgctaccaagacttcaaaaagtggagaaagcgaagccaagactaagaagattcccctagatccctctgatcctactaaaactgctgtaataggcgccgagttagattgtaaataggaaagcgcgctcatcacctttcttcagaacaataaagatatctttgcgtggaaaccatctgatatgcccggtattcctagagaggtgattgagcactccttacatgtcaaagaagatgccaagcctatcaaacaacgactccgccgatttgcacaagacaggaaagatgcgatcaaggaggaattaaccaagctgttagcagcaggcttcatcaaagaagtccttcatcccgactggctggcaaacccggttctagttcggaagaaaacagggcaatggcgcatgtgtgtcgactatactgacctcaacaaatcttgccctaaagatccttttgggttgcctcgcattgaccaggtagttgactcgaccgccggctgtgagcttctcagttttttggattgctactcggggtatcatcagatccgactgaaagaatccgactgcttgaagacttcattcatcacgcccttcggggcatactgctatatcaccatgccgttcgggctgaaaaacgcaggagcaacctatcaacgtatgatccagagatgcttctcaacgcagatcggccgcaacgttgaagcctatgtggatgatgtagtcgtcaagaccaagcaaaaggatgatttgatctcggatctggaagaaaccttcgcgagcatccgtgctttcaggatgaaattaaaccctgaaaagtgcaccttcggagtaccgtcagggaagctgcttggttttatggtgtctcatagaggcatccaagccaacccggagaaagttactgctatcctcaacatgaaaccgccaagaacccagaaagatgttcagaagctgactggatgcatggcggcgctcagccgatttgtttcaagacttggcgagcgggggatgcccttctttaagctactaaagaaaacagatgatttccagtggggacctgaagcacagaaggccttcgaagatttcaagaaactcctcaccgagccaccggtcctagcctcaccacacccgcaggagccgttgttgctgtatgtatcagccacctcccaggttgtgagcactgtcttggtcgttgagcgtgaggaagaaggccatgtccagaaagtccagcgaccgatttattttgtcagcgaggtcctagccgacaccaaaacgaggtaccctcaggttcagaagctgttatatggaattttaatcactaccaggaagctatctcactactttcaaggtcacccggtaacggtggtcacatcatttccactcggtgatatactgcacaaccgcgaagcaaacggacggattgcaaagtgggctttggagttgatgtctttggacatatcattcaaaccccgaatttcaatcaagtcccaagcgttagctgattttgtcgccgaatggaccgagtgccaagaggatacccccgcggaaaagatggagcactggaccatgcattttgacgggtcaaaaagactttcgggcactggagcaggagtggttctaatttcaccaactggagaaagattaagctatgtactttggatacatttttcggcgtcccacaacgtcgccgagtatgaggccctccttcatggactgcgaattgcaatttccctagggataaagcgtctaatagttcgaggtgattcacagctagttgtcaaccaggttatgaaagagtggtcctgccttgatgacaatatgatgacatatcgacaagaggtacgcaaattggaagacaagttcgatggactcgagctcagtcacgttcttcgacacaacaatgaagctgccgacagacttgccaactttggatccaagcgcgaggtggcgccctctgatgttttcgttgaacacctttatacgccgacagtacctcacaaagatgctactcaagttgcgggcactcaagacgtagctatggttgaagccgactggcgagagcccctcatacgatttttgacttctcaagaactcccccaagacaaagatgaggccgagcggatttcaaggcggagcaaactttatgttatgcatgaagctgagttgtacaagaaaagcccttcagggattctgcaacgctgcgtatctttagaggaagggagacaattgctgcaagatatacattctgggatatgcggaaaccatgctgctgcacgcaccattgtcggcaaagcttaccggcagggttttttctggcctactgcagtgtccgacgccgacaaaattgtgcggacatgtgaaggttgccaatttttcgccagacaaattcatctaccagctcaagagttgcagactatcccgctgtcttggccgtttgcggtttgggggcttgacatggttggcccgtttaaaaaggcagtcggcggttacacgcatctctttgtggctattgataaattttccaagtggattgaagctaaaccagttgtcacaatcacagcggataacgctcgagacttcttcatcaacattgtgcatagattcggagtgcccaatcgaatcattactgataatggcacacaattcactggcggagtttttaaggacttttgtgaagactttggaattaagatttgctatgcctcagtggcgcatcctatgagcaatggacaggtggagcgagccaatggtatgatacttcaagggattaaagcgcgtgtttttgaccggctaaaaccctatgccggcaaatgggtgcaacagctgccatcagtactttggtctttgcgaactacacccagtcgggccacaggccagtcaccttttttccttgtctatggggcagaagcaatgttgccaagtgaagttgaattcgagtctttgcgctttcgaaatttccgtgaagatcgctacgacgaggaccgagtggatgacttgaaccgattggaagaagttcgtgaagcagctttgattcggtcggctcgatacttacaagggttgcggcgttatcataatcgcaatgttcgatcccgtgcctttttagtcggcgacctggttttgaggaaaattcaaaccacacgagatcggcataagttatctcctttatgggaggggccatttatcatctctgaagtcacccggccaggttcctatcgactcaagcgcgaagacggtactctcgtcgacaactcttggaacattgaacatcttcgtcgtttctatgcttaagcttaccattgtatctccctatcttgactgtcaacaccaagttttcttcttgaagttgtcagtcgggggctattatcataataatggagtgtgatttcttatcaatttaatttgcttacttggtttatcattgccttgtttggttttttctacttagtctgcgaggactgaaagtttttaatagcttctttgggttttaggctcaacaaagcttgacaaaaacttttaagaaatcaaagatttggctagaactatcaagcacagcataaatacaccagtattgtacaaattgagcctccatttgttacattcatattcagtcagaatcagtcctttcatcatcagaattattactacttggctgaaggtcgttgttacggaattgatatacaatgtcacttgcaattttgtcagccgcattctgagcattgctgataagatcaagggcggcctcctcgcttgtcccgtctgcaaagccatcaatggagtcaatttcaattctcgggtacaaggatttggtcattgccaatgccatgctagctcccatacttccagctttcttgatgttcttgaagtacacatccggtgcaactcttagcttgtcaaagatctcggttgcgtcaagtgcactcggaccactgttattaagaaacatagcttggacaagtggtgtagcgacattggcgacttcatctcttgctccttcaagcctcttgatcttaccaaccaggacgtcaaactgagcttgggatttgatcttgcggtctgcaaaacacattcatgataagaatttgttgcattaaaaagagataagttcagatcgtcagctggcagtaccttcaacctccttcaaggccgagtccctttctgcagctagttctgccttgtcttttctcaaggcttcaatttgcttctccatttgagccatcctggcggcttgcgctgtttgagattcaaatggttgaggatacggttatgacggcctgaatcaatgggacagatctagagattaccttttgatgaaccactcagctcgtagtttgaatcctggagctgagcgattcgttcccttaattccttctccgttttcttggcatgctccttggcctcgtgtagctggctcctaacggcttcaagagttcccaaatgaggaaccagcttttctaaggttgtggtcttggcctcattgcgaagatggattctctgcacggtggttcatggattagttttgctaacgagaaaacaaagtcatcaaaggcagtcacctagaagacttacattcacaatgcgagtagcttctccaagtactttcttcagctggcacacttcctcatcttctttttggcgatttatgacaatgccggaaacttgagagttctcgtcccatcatttgagtaagataggaggacgagagtcatcagctgcccttatgcggaggatttcttcttcgtcgccgcctagtggacctgatgtattcccaagacattagacgaacaagctggagttattcagaacggcatcacttgagaagatgagttacctgaggatgtgcctggctgagcgtgaggtgatccttgctctttatctggagacccaatcactgagtcattaccaacttctggtccttgagaagttgtctgcgcttcagcttcaggaatctcttgatttagatctacatccgactggtttccagtcgggggctctcgggttgttgcagtttcagttgctgccgactggtttccagtcggcggctgatcactcggattggccttgtcgtccgaagcttgggcgccagtcggctgactttcggcagtcggttggctttcggcagtcggctggctttcggcagtcggctcagcatctttggataaatttggctctgtggcagctggatcaggttcttttccagttggatctatatcggacggtttcctgcaaagtgtcctttcgatattcagcgtaatttctatgagagaagcatgccgaaataaaatggtaccgagaggtttatacctggaagatgttctaatctttggcatttgacggccagccagttttttcctgggcatggtatgctttgggggtttattgggcgttcctttgtccccagatttgttgctgtcatcgccttcgtcgtcattaagtaccagctttctcttgcgagaacctgtctgcccagccggtttggaggtttgaggttgcgggtctgacctgattgtcggtcctccacttccctgaatggtgtgctggcgaggagatcggcgctgagcaattgggggatcagatttcatcaatacgtgctcctgaatgagatgtttccacggttaattaattcgacatggagacaagattatgttttgatcatgggttgccgatttctgatacgtacctgcggaggtggattgaatgcgttgtatggtacaactggcagttggtgtgagtagctgacgacaatggcgttcgagaatatcttgtacatcctctccttcatgatcttaaagtccagagaatctgggtcttcacggtttggatcatgtttgccgtcaaactcaaatgctgtgcgggatctctctttgattggagctaatcggcacttaatgaaatgccgagtgatttgttctccctgtaagccttgctctttgagcttcagcatgcgttccatcagttctaaggcctgggcagcttcatctcccatgggaagagagttccaggtatcttggtatactgggggaagacaggagcactcaggaagagcgggctcgggattttgaatataaaaccagttggcgtgccatcctttgtttgaagtcttgaaaggcatagagaaatacttctggctcagagtgccccttagttgaaatccagccccaccaactacgcatggtttgtttttgttcggttgaggcttaaggaaaaagattcggcggaacagagcaaaatgaggtctaatgcccaaaaaagcttcacagacatggacgaaatttgcaatatggactatggagttcggattcaaatgatgtacgctgattccatagaaattcagtatcccacggaagaacgttgaggttggaagagcaaatccaccataaaagaaatgagagaagaccacgacctcatgtgtatcgggggtcggaaaagcctcaccgcacgctggccgccacccgatgatctccttggcagggagaacgccgtgcgccaccatctccttcaggttctcctccgtcacgtcggacggcgcccattggccttcgaagttttctttctcttccgccatcgattttccccgaatgcgctgatttgattcgagggatggcttgggagaggtgaggaattgaggcggtggatcacgggaaggattttgatcactttttgaaggtggatttgagtggaatggtgaaccctagtttgccggcgcagctctgtactgtagcaaggagtggggaaaatggcgagagttccggcggggaagacgaagcgtcgtttggatctcgggttttcttgttaagggtatcggaggtgagaatgggcctaggcctgaacagtacctcagcccaatacttttaacagcgtggcccattgtgttccttagggacttaggcattctttgctttggcaatttatgtacacaatagtgttgcccaatgctgataaaatcctttttacgcggtcatataattctttggaattattgcgatgcaaattaaaaggtgcccgacagaaaggcgttatgctgtttttgtacgcttttttaggctacaaaagctgtctgggttaacttggaatgacttgtttttatcatagtcatttcctcggtatgttatatgcctgttttcattatggtaaatagtcatagcctaggctattagacttattcattaccatgatttttatgatatttggtgggtaatctttagagtcttatattcggatgcctgtcaagtgtgttcattcgtgaactttttagagtgttaaccactcggattccttttattgtgactaaaaagcagtcggctagaatgcctctttgggtgccgcgtatgcttttgtcatatgatgcatgattgtgctattattttgttctcaactatatgtttagtttgttgactaatcacatagttgggggctatacctaattaggtgcatctattcgatgcaccatattctttatcttttcgccctttacagtcttcgtcttcactactcggcaggccttggcatgaaaagtttgaagcactcggattattgtctttgagcaggctatgatggttgactgcaaaggtctcgggggctactgtggagattatggatatcccatatctacacggcgatgatatttgggctgaatataggataccgaatatagatagaatattttatgtgtatctcgggtttgtttctcaacttgtgcatcaaggaaataccctgagacttagtcggtcacgactgtatttgatctgtatctgtgtattccgttaaggatatagattatcttttgtaacctggactccttcccatatataaggggggtccgggcgcctctaggggcatatgttgattttcccaaatcatacaatcaataatacactcggcggattcatccccggacaggagtagggtgttacttcttttataagaaggcctgaacctgtataaatcctttgtctccaaacccatacacttttccagcttgatagccacccccttttattattgccgaaatctagtttcgacagttaccgagttggcgctcggtcacttgggggagggggaaaaatcaggcgctccccccctcccgacgcgcacgtacccctgctagcgtgtacatctcagagctcgcctagccgctcagtttcttgaagagcctgacgaccttgtgcttgctagtggccccatcgaaggcaagcccagcgctggaccactcgaatgggaaccacaacatcatgatgttgtggaactgcgcgccgctgaggatcggtagcggtgattccacctccgccgctagcccaatgagagagatgactccgtgtaataatgccgcaacgatgcactgacatgtggggcctgtcgtatgccacgtcagcgaacctagggttaaatttggtctatactgctttaggaccttttttacacggtttgtaatagttgaggggtagggatttctggtattgggaattgggaacctcagacagactaagtgtaaagttcagggatgtcaagtgaacttacatgaaaagggatgacgaattgcattgccacgaagcggacgacacggtgcgtgcgattcatcatcctcgctgctccagtgctttgggagtcgcgctccatcctacaacatcggagtgctaatccgtgcgtgttacccgtgcatgcggtgaaagacgcgatacgaacgattcttcaatttttataatatactccctaataatatttacaacacaccaaattagtttcattaaatctataattgaatgtatttttataatatatttatattgggttaaaaattttattacatttttctacaaacttatcaaacttggagcagtttgacattgaccaaagtcaaaagtatataaacatgtaaagataaagattacccgtatatcgacatcgtatcgaaataagatggcataccaaattttggctagaaatatcttcaatttttctactagcagagattggattgccacgttggcgctaagtgtataccatgccatgtaggacccaaacgttccggattgagtccgggggtaattgtctagtatcaataatttgaggtttaaaatgtccggctttatggtttagggggtaattcatactttttccttaaacaaactatgataatatatgcaacctgtttatttaaaaagaacttactttttttaagtagtactagtcaaaatggcatctgaccgtatcaaacataaaaatgcatttttagacgtattaaaataccaattcacgaaaaacaaatacactactctctccggttgataatacttgtcgttttggacaaggacacggtcttcaaaaaataactttgaccattattttctattataatatgtataaaagtgttgacaaatatatgattttattaaagtactttttaagactactctatacatgtagtcatcatatttgaaagccatatattttaaaaatgattcataatcaaagattctaaaacgacaagtattatcagtccggagggagtactattatctccgtttcatattataagccgttttgatttttttagttaaacttatttagctttgactaagtttataaaaaaatatagtaatatttttaaacacaaaataaatatattatcattaaatattgattttagtgaaactaatttgatgttgtagatattgctaaatttttctataaatttaattaaatttaaagaaaagtttaactataaaaaagtgaaagtgacataatatgaaatatgagagagagagagagagtaggtacttttcgtgtatttttatttccacacgggatgttccgtgtgcgagttaattcaactcttcggaagaccaccctccctcccctcacaaatagacacacacatccacgactcccccgtgcgcacgggcccacctgtcaggagacaacacgtgggcccaccccacgccattgaacccttctattggatgcccggaaaatacgtgcgccccaccaactgactcacatctttccccctccccctcgccccccgcaacgcacgttcctttccgaccgatccaccgatcggaaaccacgccctaaccccagcaaaccccaacgcccccctccgccctgccaccctccgccgccgccgccttcgccggcgaccaccccgccgccctccccggggggacccatctcctccgccgtcccctcgccgcctgcaccccggcggtgcctcggcgtcctgctctgccgcctcctcgccggtgagcgccatcctcctccttcctcatccctctcgcgcgttgcgttaagcctcgtcttctctgggtagatctggaagcttttctcttagtttggcttagccttctctggtaataatggcgatttgtttgttttttcccccaaaaataaggggttccatgcccccacacccgcgttaggtgcgccgctcgattaaatgctgtaatttctgcatcctttcttggttggaatgggtgccctaggaagggtaaattttggtcatgccaaatttgatgattctacaccgagagatgcggaatgcgcatgtggattgcacctgtatggctgtatgcgattgaaatgagaggaattgtgcagctctcaaaatgctataggctagaaaaatcataccataccatgcatacatttgttttaagactacgtgattagcgtggaattgagggtggcggatgtacttgcttactctgggtgaaattggtgttgctcaatcgaaattccacatgttggcattatgatatgcatgctacattgttatttacaatgtaagatggagacatggtcgttattgatacatcgggtttgttttgagatcctgggcaccataaaagcttttgctagccaatccatttagcaccagatgacccatgctctttacttacaaaattactatcactgtgggagtcaccgggtaagcatgacctatggccatgggtttggggaagggaaaaaaattgttttgaaatatatttgatgatgggccttacctgtattttgtcaatctcaaactagaaactaacatcttattagcctgtagcattatcttaaagtaatcccctgtagaattctataaaatataacctagtgtgacgctagacatagggcctgttcactttgatgccactttcaaccttaccaaattttggtaaagttgccaaaaaagtggctacatttagtttgctgtcaaattttggtaactatataagaaatcctaccaaaattttggcatagttgccaaaattttggcaatgcccaaatttggtaaggttttttttggcatcaaagtgaacaggcccataatcaatatacgttttcttagaatgctcgtaaactatatgggagaaacagactggtttcaaggcctattagcacatgttatgcagtttctttcgtaaaactggccatatttataattcatttactgaacatattactacaatcattttctgtaataattgttttgtaactccattaaatcttctgtggcagtgtgcataatacatattcggaaaggcaaatatggctacaaaactccgtcaaccgtcaactgatgcagaaaaaacagaggttggagaaatagacacaagggctccttttgaatccgtcaaagctgcagtaagcttatttggggaagttcgattttcatctgacaaatcagctgcaaggaagccaaagcctcctcaggcagaggtaggtacttatattaaacatttttttcatattagattaataatagtacttcaatgtgtgcatgcatatatctttatgaaggttgaacataccgatttgtgtggaatgttatgcgtgcctactattacatggaatacttataagtacagcaatgttgcagaccttgatgttcttaagccttgttgattccagaactgctaacttcaaatcttacgcaacaaaatgctgtgaccttcaagtgtgttatactgatgccaatatgccataatgttgataaccattttcaaatgtctaagtagtttcatgtagcacttatttgaagctaagtaacacagatcttggaacgatgctgtgttcctcgtccagtgaactttgtcccgaaacaaggaacgggaacaacacaagatgacgtaccgaacgtggatggatcacatcctaacataaggaggtatgaggaaggcaaatctgagaggggttgggtttagggatggggaatgcaccagggtcacagccgcaacgggcgagcactgttattgctccctcgctgcttgctgccatcgcacctgagtgcatggaggaacgccaccgctgttgcgctgaggaggacgggggagtgctgctgctgttgtgccgaagggggttgggggagcgttgtcgccactgacctgagggaggacaggaagcaccgctgtagtcgtgctgcggggcttggggaagtgcggttgccgctgtcgcgccgaggggcatgggggagtgccatctccatcgtcgctatcacgctgagtggctgagaacgatgggatggattctttccatcgatgggataagactgtgagtggataagggattcatcttatttcatttttgctcttggactctgaatattatgaacagttctttattgaattgatttctttcatataagccataaaatttcatatatattcatttaagcttattgtatgcataacaatggaatgctcatatttataagcccttggcttctaatttctgatattgttccggactatcatcccggaaactaatggaacgcattccatactttgaacaaacgttttgaagaggtatttcccccttcataccatatttttcaaaatccctgttccgggatctttttatgacttaggtttgaagccacgcctttgttttttttaatgaaatttgtcatatcagcaaactatttcctgcatgttccagtgaataccacaagatacttgttttttatatgctctaactcttttcatttgcatttactttcctgttcattcctatttcttttttgcaagaaataggtgtgttcccactgttagaaatttcaggctgttccccagcctatttgctgtctttaattaaacagattattattaaattaatgcacattctccatttatgagtcttttcacagcagaaatttgatttgcatttctgaaagaatagtagttttgccttctacttttactttgattatttgtcttggtagttgttgtacctggtccacatctgatgaactacactttagaagagagcataattgagtgacttgttggcagaaacagagaaagaattagcgatgattcaccatatgatactactagaagtctaagtttttgtttgtattttttttttggggggggggggggtgtggggactgacatgcattcataccattaaaaaagttcagtcctgtaagctcaagttttgctggatttaattttcaccttcgttttcgactccaaatagtgccactcctggagattggttgtcccatgcttccttccatgtgcctatttgaatattgcatcatagttgccatggccataatcacataaacgcaatgcagaaacattagttccagcttaagacaggagtatcaaatttgttatatggtataagctttgaacgtaaacccagatacaaatctttcactcactgaaaagttaaaacatcaggtactgggttttttctggattggaattgtatcaagataggactaatttgatcaaagtatcaccccagtctcactcctacaagtagtgatgtccttgagccaacttaggggcctgcgaggcaccatgatactgggatctgacgtgcaatcctttgctcatacccattcattgtctgttgccttggtccactggtcttcatcttctctgagcctggcatggttgccagtatctccaagacctactgttgccatggaaataggggcagcggtgagctggttagaccgttagagcaacagtttggtagaggaaggtggcagctgctggtacttgggactgttaattggatggaaaggtggcagtggcatgatggtggaaagcactgttgcctatgacacttggtgtttacgcagcaggcaagcgagccaatgtgtcctagatggtgcataggcaagcacatttttagggattgcggcaagcaacaatagcatgttatagcatatcagcttcacatgtggacccagtcagtgttgagtgttgggtggacaccaaaatctgatgtcatccaaacaagccttagtgttttacttactaagagtatgttttatttgatgatatatataatttttttatcaacaattacatgcatatcaggcgaatccctgaatcatctttttttagctcaactcagacactcaaatctgagttggactctgacatcagtgtcccagtaagactggacccagttagcaatcttaggctcttagtaagtaataatggtggtagcggcaagtaggcagttagccatgcagcaacagccaagaccacccaagcagcagaaaagagaaaacaaagaaggctaggagtgggctgcctggaagagatggtttggagcttgcaagcggtggctctgtttcaggtgttttaatgacattagtggtgacatcactagtttcagtatggcagtcgaattagcactgaatcatgtcttagtgaactatacacacatcttttgtgacttacatgattggctgatttgtaggtcacttcagcatagctaagcttactaggacaccatgtaactgaaaacaagccaaaaaactatagcggttttgggcgagtgggtgattcttctgcttttatggttgaaaggtgcctaatggtttgtttgtgattgggatttcatttgtagacctaggcaatagtttttttctttaggtgagagtgagtcccatggtcacgacagggagtccacagaagcacctctcacatatgtgtatctagtacatgtgggaggatgctttgttaagcttaaattttatttgatttgttttggattggcatggtcaacataacaaaagaacagttagagacagtgattgaaaattttttttggatgttgtaaatgtacatgcgcagatagttcacaatgcctaatgttgggatgctgtctaatatagatcaactaaaattgtcaactgcctccatcatccagacatgtagtatctcaggatctttcttagttgtttttactttttccaattttatagttttttaatgcgattgtattatcttttgaggatgcatttttgtgcttatatttaacatgttttttcatgcatttaaatttcttcattttaatcgcatggacctcatatttttacatcatagagtataactgtataagtaataactgaacactcatatggtttaactgagtctataacttcattatccatggaatggcatttcactttatctattttgtatttggttatccaaatatactctgatgcttgcaatatcaaaatcctatcctgtggcagagggtgttagctaaggagacagaactgcacttggcccagaaagagttaaataaatacaaggatcagctcaacaatgctgagacaaccagagtgcaagcgttatctgagctggagaaagctaagaaaactgttgaggacctgaccaataagctggatgctatcaacaagtccaaagagctggctattcaagcaacagaggatgcaaaaactcgaacaaagcagcttgaaggtggagactcgcttgaggctgttggaaaagatggccctttaaagcaggaattggatgttgcaagggaacagtatgttgttgctttggcagatcttgatgcagcaaaacaggagcttagaaagctcaagaaggattttgaagcttcattggatatgaggttggctgcagcacagcaggaagaggaatcattgcacttagctgaaacaaacaagcaaaaggctgatcagcttcgcaaggagattgctacaattcaagagtctcttacgcatgtgaaggcagccactgaacaagcacatgaagaagaggctcaaatccttgctgagaaagatgttactaggaaaacatacaaacaagctttggaagaagccgagaagaaattatcctctttgaaaaaggattttgatcctgctgtttataaaagcctcaaagaaaagctagatgagaccaatttggagatttcatctatgcagaaaaagattgaagatgctcgagctcaagatttggagtctattgctactgtcagcacagagttggatgatgctaaggaaatgttacagaaagtggcagaggaggaaagttctcttcggagtttagtagaatcacttaaacaagagttagaagctgttaaggaggagcatgatcaattgaaacagaaggatacagaaactgaatccatagttggagacctacatgtgaagcttcagaaatgcaaatctgagcttgaggcagccgtagctgctgaatcaaaagcaacgtcagcttctgatgacttgatgttggccctccaacagttgtcttccgagtcaaaaaatgccctgcaggaagctgaagtaatgcaaaagagtgctgcagatttaagggatgaagctgaagctgcacgagtagcattagcagaagctgaacaaaagttgcaatctgctttaaaagaagcagaagaggcaaaatcagctgaagcaaaggcccttgatcagatcaagcaactatcagaaagagcaagcgctgctcgggcctcaacatctgaatcaggtgcgaagataacaatatcaaaagaagagtttgaatctcttagccgaaaggtggaggagtcagagaaattgagtgagatgaaagttgctgccgctatggctcaagtggaggctgtcagagccagtgagaatgaggcgattaagaaattggaggcggctcggaaagagatggaagacatggaattggcaacagaggaagcactaaagagggcagagatggctgaagcagcaaagagagctgtagaaggtgagctcagaggtggcgcgagaaggagcagaagaaagctgctgaagctcagcctgctccagaagcgcaagcacatggaactgcatcttcccctgtacagaaagcttctgctggaaaagccaatgagaagaatgatggacctcacaagaacagcagaacactattgaaaaagagctttatgctaccaaatattacaagcatgttccataagaagaagaatcatgccgacggcagttctccttcacatcttcctggggacaaatctgtataatctatctgaagctcacgtctgaatgatgtgattccaaacttggaatcatggctttatgtatgatattatatttgtagttgcttgtaatatataatgttatcctggtctatatctatgacttgcctgttcctgactatttgggctcctgtgataagtttttttcttttttgtacctctgaaattcgctgtggttatattgatctgagcagtttgtctgctatcaacagaaataaccacgttttattcatgtcgtgcattactttcagatataatgcaacgttgaagtgttaaattctggattattgaattgtgatttatagactgtcacagttgccaatgaacatgaagatctagatgtgttttgctggagtatcatatattcatctttgaagattagaaagtgttgcctcatcattggcataatcatgtgatcttaggggctaccttgaattttatttgggaggtaatttccccaattaaattatctttagtttcattttggggatagtttctacagttaaattcatatccaatatgtagttcagtattgtctaattcagccatacatcacattagtagtaatttaattggtaacatcatatctcagcagcacagaatacacaaatgttgtgagagcctgtcaggtgaggtgcccatacaagtacacacaacgtgttttctatatgcatgtgaaaattgcaaaactaaagaatgctaatgtcaatatacttcttttatttacaagacgtgcaaaaataaaatgctaggatacatgtaggcgcaaggtgggaggaacctggcaaggtcgctgctttccgatgattttgtcctgcatcattcatctcacataaccaaatggtctgtttcgtgagaattccacaggatcattttgtaagaaaataatgtcattttcccttattttccattggcaatccactgatccaaacagggcccaaaaccttaaaaagtttgcctttttggggagctactgtaagctcacaaaggaggttctgtatccgattgtgaaataagtaaagctgcctaatcaatcctttctagattatatttcaccatgttctcaagagtgcttctgaactcactccttggaagacactgcagactttggatagctatttcacccttctctcttgcaagctcatgagccctctttattccaccacttctatgaactagctctattgcagtagccaaggaatttgtttcactgaactcggaatcaatgatctccctgagctgtggttcatcttgcaaagcgaaaatgaccggggctgttagattaccctttgccaggtcacttcctgcaggtttcccaagttgttcagctgattgggtgaagtcaagaatgtcatcgactacctggaaggagagaccgagattccttccgtattcatacatttgttcacatatagcagtgctgacaccactaaatatggcagctgaccttgtgcttgctgcaatcagagaagcagtcttgtagtagctcttgagcaggtaatcatcaagggtgatgtcacagtcaaaaagtgttgatgcttgttttatttcaccactggcaaaatccttgattacctgttaaagaagcacctttctggatgcaaatcatgcatagttttaaataaggcacaaaaacttgctcaaactcttcattacctgactgatgagctttataacttcaatattttcaaggtttgcaagaaaccaagaagattgtgcaaacataaaatcaccagcaagtacagccacccgtgttccatatagctgatgaatagtttccttccctaaaaataataaatgtacctcagattaaacaggtaaatttcttgagtcccctatttcacaatgacaatagaaaggagttaagtaaaatcaaacaggattgccatataaataacgaaaacaaataacaaaacagtttcgtttttttcttttagagcgaaacagaacagtttctgtaatgcaacgacagcattttttgttttcaaactagatgaatgcatggaggcaaaattcagacaatgtatttctaagaatatgcaggagagtattctaagaagaataaacggtaggcacatgtgtcacaaaaatgaaataacaaagatcggtttttgttgacagttctgttggctaagagagaatggttattactgccagtactgctggccttccataaaaacaacataatacgtacctcttcgcatcccactatcatctatgacgtcgtcatgtattaaacttgcagtgtggatcatctctatgatctctgccaaacgttggtgttctgtagttagttccctgtaatccaaaaatcaaagatcttgagggaataattttaaaagactaaagtatatgataggtgtctaaacttgtgtggtgtcacctaggtgcttgaacttgagaactgcacattcatgtcctgggatttgtataaatgggttaacaaagtaccatatgccattttatggtaattagaaatgacatgtgacacccttagtccaaatcatagttttgttttccaattgaaatcaatagatattaatattttgcaattcgaaggaaaatttcacacgtcactaagatttttatttactttggtagaaattctttagtcaaacttgatttagcagggttaaagtgctgcctgaacattggtaacttattaagtttgggttggatagaagccaatttgcatttctgtaattcggtgacttaaataacacacatgttatggtttagggacctatgagatagtgcactctattccaaactgtcacaccctgattttcgtttcaggatttataaattatttaataaattattaatagaatttatattaaatgttcattaatttacaagtgaagttaaatgtggaaaataaaatttcctaaatacaaagcatggatggatttaatttttattaaattctccatggttaattatactctctggaattttctcggatttttcggagctcaattgttaattttaatcatacaaagagaagttcagcaattatttaaatattaaaataatcattaaatgatctaattataatttttaagagtttttcttgtttaaaaatccttaaattataaattgttgtttaaaaggaattattagaaataattttaaaagtttaaaagagaagatcttttttttaatttgctaaatctcaatataaaattgaactagataaaattttattaaatactatgcttgctcctctattttctagatttttctgggaattatttgagcaagggaagtatttttaataaatgaaacatcatttcacgaattattttaattgaaaaagttttaaaaatcccttcctaagccgttgggccgttttcggcccaactcttctcttccccgcgcggccgaaccggcccaagccggcccagccgacgccgcccgccctctcctcccctcagccgccgacaggtgggacccacctgtcgggtgtgtcttccacctccggccgagcccaagccggccgagatgccgagcccgagccgccttcttctcctctcaaatctgctccaatccgactctttttcttcgggatttttgaggggattttatcctcacatactcctctatcttttccctcaagaatcggagcaaatggttgagtatcttgcccgaatcaaattcgttttcgagtttatctccaaaaccgagttttgattatcttggatcgattcctctcgtttggagtccgatctctctaatccaatgctataaatagcatcccctagtcgtcctctaccgtttgccccaagtcccgagctctctcgtcgcccgtagcgttgccgccacgttgccctagccgctgccgtcgccggcgaccttccagccgcgtcgcgccgccacggtagtcgtcgccgttgccatccgtcgccgccgttaggtgcgcaaggaggtgaggaacctcggccgcccgtcccccttcgctgccgaccaccggagttcgccgtcgccgtccaacccgagccgccgccgcctcttgcgtcgtcgccggccgtcgtcggttgtcgttgggcgctttggtgagtaccatcgggttcgtctcgatgccctctacgcgtaggtgccctccttttccccggccaaggcccctatctccggcgagcttgctaaccctaatcggccgatcgtgggtgacgtcatgctgacgtcatcgtccctttttccttttccttttttcttttttttctaatagtttaaatctttggaaaatcataactaaataaccgtagatccgttttaggtggttcaagttgccaaatttttctaaaataaagatctacatattaaaattgtccataaattgaattaaatttatttagttttttttaaatgggctttaattagatttgatcttgtaaaattcataataaattcatttgaagtcagaatgaggccgttcaagtctcataattcatctaaaattatgatctacatgtttgtttactttttatgtactgtttatttggtttttattagtctttttcttcgttttgcgtgttagcttgtcgtttccgtcgttgcgaaggttcgtgagtgcgtcggaagtgatcaagaagattaattgaagactgattattgcaaggcaagtcacacagatcctaaacacaatcctttgagcatgttgatcctatatttaaattctctatttatttcaactgtgcatttattttcgaatgtcatcgggtggtgtgaacctattcctttgttatggccaatttgcattgaatgccctattccttgataccttgggtaataaattgattagcttgaaccttatatattggattggttcagctaaatgctatatgtaagtttgcttagctatgcttagaaacattagcctaactaaagggattaattataaactatgttacattattcttattaattatggttacatttaatggtagctcacgatggttaatcgtgtgatgataattaattgataattaaaacctggttaaggtgggttgtgagcatatggttttgatggttgtgctcatgacaattaaggaccggttcgcgagctactgttgtgaaacattttccgtgccaaccacaagccagcgtgggcaccggctttatctcttgtatagcatgatttattatagtgtgccagactgtgaagtggcgagaagtccatgggggtcgctggggagtccatgcctctggttgtagagggggtgattatgatccaggaatggtgcaccgtggtgagttgtgttatgcaggggataatgtcacagcctctattcgggtactttccagtatcgcgacgcatggtagacatgatgttgaggttgtgtcttgtgggtacagtggtacacctctggccagagtaaaactattcgaatagccgtgcccgcggttatgggcgagttgagcaatgtttttcgtgattagtctcacacctctcacaataattatggatgtaataactggtaataatttgcttagctcctggtttggagttagatctgtacagccgggtatggttgttcaggatggttgggcctgtgcagcatgggtgtgctgttcagtgttgattaaaatttctgattaattactccactgttttgtttctcttaaatgttttgctaaatgctgcttttgcaaatgagcctatattatgccatcctttggtatccttgtgcacttgcatatttgctgtgtggcttgttgagtatgtcatatgctcattcttgcaataatcaatcaaacctcagttgaagaaaaaggatccagaaggagaagacgtttggcttatacccagttgagctgcctgtgggagtggagtcggagcttcgctagattttatttttccgctgcagctttcttcatgatgaggactaagtgcctcttaagtaagtatttatttgctttagttgttgatgaatctgtatattaaattgtcagtttgtgtacctcggctgattcctggacgaggattttatgcacaaataagttcggaaattactagtgaatttccgggcgtgacacaaacctactcacatcaatgataatgcagccaaaaggaacttacaataaaccagccaattcagcagttgctctggataccagaaaaactagtgccggtcttaatctttttccaccggcaccaaatatttgttcagccgcagaaactaaaactggattttctgcaccaacaagctattaaaattatgtcagctagttattgtaacaagaacgtacataagtacaatttcctcttgaaaaaagtttaggtactagtatttgatatgtcattctgtgatgtttgatgtcttgcttaagcagacattgatgatctatagaggaaggattggaaaaatgatagtattgtgcaatgtcactactcaagagcagaaaacatgtcaaagctcagcaattatagagaagttgcataaaatagcaaacatggaagaagttattgagtgtgcaaaagcactacataagagctactataaggcatttgctcattcagtctacttctgactcccaacttcccaagcctctttggctgtgtatatcccagggtttacaatttcgatttcggtgatttcggtaggaccgaaatttaatttcgtgattttcggcactttccagaaattttgaaagattttgactggatttgaaaaaactttgaccaaattccacaaaaaattgagaaaacccgaaaatttcggtcagtatattgattgccggtggggtccgaaatttcgaaccgaattgtaaacactggtatatccatttagagatatagaggccagatttctatccattatccaaaaaaacttcccaagcctccattcctcgataactggggtcattagttagttcaaaaggaatggaccattatgcgactctgcactgtttactcgctcctgcagtatattccagtaacactgcaaatgatgggcatatttctttccctttcaaccttcgttgcacattaatttccctcgacgaacgcaaggaactaagaatacattttatttttccagaagttacaaccattaacatattgttcaaccagccaaccaaccaagtacttaaattgtccacaactttatcactaagtgcaaattttttttattctaaaatttatggactaaaaactgtcacagttcgatacatttccaagcaaaatcagtgcaactttttttttttttgtattggactatgtcgtagcaaccgtgagccttgtaccaaatgtgctaggagaaagagaagctattcaatcatacttgtatcatgaacaagctgaacagaatgatgcaaactttgggaggaaaaggtgaagctcaccgatttgaggttgttgttaagcttgagcaagtcgtccgccacaacctccagcagcgacgacaccgaaatgcgctcggcgacgccgacgccggtcgccgccgcgtcaggaatcgtcgcggccggcacgtcaacagcagcaacacctacaccaaagcacacccaactgctcagcctcacccgcccaacaccgccgccgccgagagcaaggcaaaccagcagaggagccgcagagagagaacctggcttgctgggcgagaccacggagcaaacacctggcgcgcgccgcgtcggcggcgccgcgcgtccgacccagccgcaccggagccgctgcggaggaggagggggagaaggaggagggatcgacggcgacgccgcggcggtggcgcggcgggacaggtgcgaggacgacgcgagggaggacggcgccgccatggcttcgtggccgcttgctttgcttgcttgcttgctagcttccgctcccgctccgccgtgcgtcctcttctgggatctcgtgagcgcgacgcggcgggcaacgagaggcgaggggtggtgggtgggcgtgggcgtgggcgggggtgccctggcgtgcgcgcgcggcgacggctcgttttttgtatggcgccgcgtgcacctgccttatcggcgcgcacgagagattgggatagggggccaagcctcgtgctgcggattcgcccacgtcggcgcggcctaccacagcgtggcacatctcgactcttgctttgcggggggaaatatgtagtagtagtaaaaaaaattgcaaattataaatatataggaaaaagtctaaataaccccttaaactttgaatgtaagtccgtttagcaccctgaactttgaaacaggacattcaatcccctaaattttgtaaaaccatttatacaaccccctgaggtggttttgtatagtggtttttatctaatttatatataagttgtatgagtttgatcacatgtcatacactttatatatatatatatatatatatatatatatatatatatatatatatttatatatatatatatatatatatatatatatatttgacttaaatcattttctttgcttcttattagctctcacttacaaacaagtaccaacataataatggtatgatatgatatcactgtataaggataaactaatgacttataactggtgatatgcaaatatattatattagttattcaaaatttttcgtttaagcttccaaaatatgcaaaactatcatccaaaaccaccttaggatgtaatatagatggtatggcaaagttcaggggattggatgtccggttttaaagtttagggtgctagacggatttccatataaagtttaggggtttatttatacttcttccaaatatataaaacggtcaagatttgttcatgtcattataggtaaaacaaatttaatcatgactaaaaggtttacttatagcatagacgaatctcatacgttcatttttttttaattctgcgatagttttcaggttttcattgtatattttccgtctttccttgactagttattttaaacggctgtgcaaaaacacttgcaactttaacaatgaagtggtctgtgtgtgtgagaaaacatggaagcgtagtctattttggtggacctcatgaaattgggaaatttaactatttgccacccttataaatggcaactctccaaatgccatccttatggtggttcttacacaatttctcaaatgccatccaaatgccatccattttctcttattttttccttttcctgatttgtggggcctacaaggggtaaaatggatattttatatggcacatccaagctgacagcatgaggtggcatgccacattagcaaaagtggcaaattattaagaacttttctctctccgatggcaattgtgtacgaaccaccataaggatggcatatggagagtagccattcataagagtggcaaatagttaaattttccgacccatgaaattggtgaaactgtttcttgtttatctttccccgggtcttatgtggcatagttctacatcagtgaaatgttttaaatgcacataaacatttttgtgatatcaaagtaagggaacgcacaccatttttgtcttatatggttgttttttacaaaattattgtgggagcatatgcctgtagtttagagaaatctcccatgttatttgagcattaatctctacgctaagtaatgtaatactgtataatactagaggttggactttgaattgtcgttgtttaaattaaagataataactggaacaacattacaaactggttttcatgtcataaagtatttatatgtaccttacatgtcaaaaaatgattattttaagatattggattaaaccggcctctaaaaagaattatttatatgtatcttacgtatcagaaaataataactgtgtagtaccttgtttatgttccatatcataaaatatttatattacaaattggttttcatgtgacttagaaaaaaagatctactgaaatttactcattcttcattattgtccttagcttgactagcgcaggtgaaaatgtaagaaataaagagaaccagtgcaaagtgcaaaccaggttcttgttgaatccctgtgtcggcacagaagaagctaaaaacaatgagctacaaacattattgcaactgaaaattgtactagcaccgctgactctgttctggtttggacaaggctgtgtggctcaattctcatgttgttcttcacacactcttcattctccactctccagtgttacaatgccagcaattgccacaaattttgacaattttactctctgcaaaaactaattatacaaatgaacggtgcccaaaacttattttaaaaatgacccttttgtttagcgtcaaatcgtgtgccgctgaatttagacacctcagcgctaaatagcgtggcactgaatacacgttgggatgctgactcagactcccatccgcggtggcacgtcattcaacgctagttgacgtggcgttgaggtgtctaaggtcagcgccatacgatttggcgctgaacaaaagggttatttttaaaataagttttaggcacagttcatttatataattagtttttgcaaagggtcaaattgccaaaatttatgagcaattgctatgtaatctttgttttttttttgccaattataatcgatgcaacgatggaacaacatttccttctctcggatgagaagctaaataattgtagaagagatcaatcatggttttctgactttcaagtaaagtgcaactgaagagaggttctggcaggatcacaggctgtccacatctgaaaccttaaagcccattgcttttaataaatcagcagcttaaattcttgtatctgcccacgttctgttatgcatcacggccagtaagtacaaaagttaaatgattaaggttccgaattgaaatttcagacagtatggtacagttcaataacgaacgattacggccagcatttcagtttcagtttcagtcaataatcagcctagattcacactagaattttgtcaggagttttactgatagaatggtattgagaaatgcaactgcagttgttcaaaaataacaaaaagaaaatccatacctttgcagctcttcaggattctgcagaagtgaacctctgtagcggttatcattccacttgaacgatttcctcatgatcatccttatcctttatcatgtcgcgttcccaccttctgctgatctcaagcgcagggcgtccagggtgaatgctggctgcatccctcatagcagcttccgcagcctccaccctctgcctcgtggctcctcggcaatcgaccgtgacactaagttgctggaggcttgcgaggtgctcgaatccgaactcaaaaccgatcttggaccctgtttcctctgctctaatgtagaaacgcagccgtcggagatccggcattgctcacagcatctcaagcccgccaccgtgataatagcttccaaattcaaaccccttcaggcaccggatttgttgactgctgatgataagcctctcctcgggggcatgctgtgaattcaacttgatcaagagttcctcctgtttaatgctacaaacccatagcgaaagatgagtgagattagcaagacacgccatctgctctgggatatgactaatacgcactctgtatatgaccatcttccggagtgtcggaatagtgtgttgagttgtgatccaaattcatttgcacttaataaaggccaacttctgccgtgcacctgggtacgcccgggggtgcgggggcggagcccccgtgaaacggatcgtcattccttctagggttccaccatatatatacctcttgtaagccgccgtgcggcgttgtaacctcaccccagatatagtgaagatattttgctggctagtgcccgtggttttttctcttctgttttgggagggttttccacgctaaaatctcgtgtcttctgtgattgatctattgttttttatcgtttgtttgcctatcgtttcctaacacagtgcagcacaatatgtccatcagttttcctatcaggaatccattgcagccaatgtgtagtgactgaagcgcatgctcacccatcatagcgagagatgacttcaaagattcttcgtaattttcggtgttgtgatcaccaagtttgttgctgtcatgcagcattatgcgaagcacacttagcctggtcaaccgcctcaactcttgcacaaattttatggagtcatattttccagcatccgatagctcctgtaaggcttgtagatccccaatctcatttggcaattctacatcattgccaacaagtagacgcgctaaattttgcaaacgacctatggtcggtggcaattttttaattccactatggcgtatatctagtgtctgcaaatacttcaggtccccaatttgctctggaagctcagtaataccatcagaactaatgctcaaatatgccagccggaagaagctctcaagatgtttaatgtgttgtgtaccgataccatggcaattttcaaataccagtactctcaaacaatgaagtgtttgcagatcaggtcccacatcttgtacaccatagtagttcagtgaacgaagctgtgaacacttacccataatctcctgcatcgctttattgcccagacagttggattggacagatcagggtttacgattccgacaggccctttcgtttcgggcactggcggaattcggaatttcgcgaaattcgatggaaaaccggtaaattctgaacaaatttcataaaccaaaatttaaatacaaattccctgagtttgccgacaagttctcgaaaaccggtcggttttagcgaaattccgatcgaaatcattgaaatttcgatcagtaatcttgcccatgtaagtgctttccttttttaaattctttattattttctttcctatgtaagtttcagtaaatacacacaatacatcatttttttcaaaaatttatatcccaataggttgtatgaatatcatagtatttataagattttatttgattttttttctttttttatcaattcaaatttgaatttggatgaaactcctcgaaatctcatacggtttctactttcgagccttgttgaaacgtcgaaatttcgcgaaatctgaccggatttcatcggaatcgtaaaccctgggacagatagcctacgaatcttgttagaacaattgtacccttccccttgcattagagtggtaaaattctcctccttcgacagggatacgataagatcaaggatcatgtcatgcactcgacaagcactcgctctgccatcatactggatgtcaattggttggatcatgcttctgtttacgagatcattgaagtagttctcagcaacttgatccaatgttagtcccttcactttactaatgaacccttcagctatccatctccatattagcacttctctttcaatcatgtaatcctctggaaacatactaagatatagcaagcaagtttttagataatgtgggagatcataatagctaagcaggagtatatccactacaacaaaaccattgttttaagacgttttacttaagtcattctataagtcgtctcttttttataagtgaaattgaaatagggacgatgtttgagacgctttattagttgaggacatagtttaagacgctttatatgttagcacaaaattaaatcgtttagagacgaatattgagacgtttttggaacgtctcatgtgtaagaaatgagttttgagacgtttttattatatccgtgtcatcgttattagataatatataattatttatatagaaaaagaagaaaataaacacactgttcctaatcgtcatcatcaaataccattataataatattataattatttggaaaaaaataaatatttaatattcagtcttagattaaaaaagaagagtaccgctacaggacgcatgtttgcagagttgcaatataaaaaaaactatctatttaccttcaagattgtcacgttaatgacttggttagtgcatgaactttgcaacctgcaggtgctgtgttcgagcccagatgaaagcattaatatcaaatatattaagatgtgcgtgcctatataaaagtgtctctatattttatagagatgcaatttacacgtctctagcaacgtcttaaataatataggtacgctttaaaaagcgtctccataattctgagacggtgcaaacagagacgatcctacgacgctttataaaagcgtctcagttatctgtgcgagacaaaataaaacgtctctatcttacaaataagatgtctcctttggtttattttgttgtagtgatctgtcattccttgttgagtaaatgctgaaccaatagagttgtacacttcctcccattgctccacaatatttggttttccaacaagcaggctagctacactgataatagctaacggcaagccatggcactttctaattattccacaagagacttcctccaaataaggagggcatgcagacacatcacgaaaaaccctcttcaaaaatagctcccgagagtcctgttcacttagaggttgaatattgtgaatatgtcctgctacagtgtagcagcatgatgtggctacattagtatctcttgtcgttgtaattattctactgcataaattgttgtcaggtagagcagacttgacaaattcccatgcttttgtgctccaaatatcatcaacaatgatgaggtacctacaaatataagtctagcattaaaatttgtggaatatgatgattttatttggcactaaatatggtatttttttatttacttttttatttttttttatatccaaccggatatatgcaaccttttaaattgggaacttagccccctcaaacaacccaatatgaagttcgctcatatggagatttgaactcaagaccttcaggtgttactcaggtcactgccaccactaagactatatgccctttcacatatatggtacaactatttgagatgaacatgctattgtatggacatagtgtgtctaaagccacaatgctttgctcaatgccatcatgccattgcatctttctttatctatactaattaaacactcttgaaggatctttggtcaccgtaaccctgaaaggataaaaactagaaatgtctcatgttttcttttatacttttatgagaaaatttcgtataactacagatttaaacctcaaataaataaactatactttcaatactaactttatcacaaaactacacatttagtcaatcgtaaactatagaattagaatttatcagaaaattatagtttttaaatgttatccaaaatgcaagttgttcttggctaaatattgtcttcattacaaacatctctactactaatcagaggcttttccattccaaaaagacacctattgatcatatacttaaaaaaatccaagaaatgataagtatcataagatacaaaagaaaatagtagaatttatcatatatatctctatatcatatagcccaaaaatccatctactttagtggccgaacaaggattgtgctaagccccgggccaagaccaatggaggtatcaccagcaaaggatacccacaacactaagacatgaccaaaatagaaacataaattcattgtggtgtactggtgtgatatagacgtaaaacaccaaatcggtaataacattttcagtttttcaccagacgtagctgtagatcttcattccatcagtctgttcctgcaagactttttttttttttttttttttttttttttttgcgaattgggttgcggtgttggtgcataaaaagatggcaatgtcttgaccttcttcattttctctcccttacgaatttaacacaaattgaatggaatcaattcatttcttccttctctatcccgtacgaatttaacacaaactgactcttccttctctcccctttacgaatttaacacaaattgaatgtaatcgattcaagtcttccttctctctctctctcacgaatttaacacaacttggatggaatcaatccttctctaagcagctaacatttttgtctttggtttatggacttcgttagggagtcgattatgcatgattaatggtaatcctgtggtgttgaactaatttagctccaatatatattccgtaaaaaataattctaacttattaatagataggatagttgtaatataatagcgactgctatatgttcactgcagttaattttttttttaacatagctagtgttaaccacagtatttttactaaatatatactgcattgtactatctccgtttcattcatattataagtcactttaacttttttaatgcataaaaaatatatacacacatacacaaagtttgtatacgtgtatagaaagtttgtatatgacgcgtatagaaagtttgtatacacgcatagaaagtttatatgcgcgtatagaaagttctatacgtacgaatacaaactttgtatttatacatcttaaaaaaaagggaaaaaatcgaacagaagataaaccggaaaaaaaaccgaacaggaaaaaccggagaaaaaaataaccaaacagaaacgaaaaaaccggagaaaaaacctcgaacagaaacggaaaaaagggggaaaaacgaaaaactcgctccctcgcggcgtgttcgccgccccctctccgcgtgcgacacgtgtccagtcacgtggggagggaggcgcgcgactgatcgcccagtagcaatctcggggttttcgttgttttaagaaaggctctcggtgagaaaaaagagtccgaaaggctctccttgtttaatggaatttaaacatggattacgtttaaattataatatttcgttaaactaaaattgaacagttatattaacatgaacataattggataatatgttttatttttaaataactccaaatttgtttttaaaatagaagtggttaaagtttaaatatgtatactgtctgatgatgtatacaggaacggagggaggaaattttttaaagatcataattttacactccttgttacacgttgaacagctttcagtaagattgactttgacagccccctaggacccaaaagaaccctactgagataagtaatactgcaaaagggaatttcaattatcatttttgtctctgttgaatgactacaaaaggaacatgcaacaggtggcgcaccaattaaaagtagaaagcactaaattaaaccttggtctagtttaacgtgacttgtaccatacacataagaaacaaaaacattgagcaacaatatataatcaaaactgaatactgagataacacacccatgacgctccatttgcaggcaagatcttcattctgccttgataatcgacagtgttatacataatgcagtgttaccaactgctccagtgttccatggcaagctctaagatatcttttctttttttgtcggttacaattgttgcagcaataaatcgtagacgtagtacacgttttcttatcttggtacatttaaacaagtttagaaattgtagaagtgattaataatatcttgcagactttccgtgcacctcgactcgttgagtaaagtgcaacgcaagcaaccctagcctccgcctccgtgagcgcctcggcctcggcctcccccgccaaaccctagctgtcgccgcctccgtctccgactccgtccccaaattctagcctggctgaggaatcagagtagaggtgggatctgtgacatcacagagagggttggaagagacctaggttttcttctataaaatctccagatctgctctgtcaacatggtttgtggtgctcgggctgtggaagaacctgtgttggaggaggtgcagccttgggaaattgcagttgaggagctcagggtgcacctgtaggatattcaacggaaggtggatgaagatgggaagttgtttcaagaacaactgtagaactaggccatacaagctcaagtccacaaagatgaggtaatgcagaatctgaaggtaatccaagatatgctcagtacttcatctagctgcaatggacaagaggttaagggaacacccagaactcctggagtagctcagtctgtaatggaggaaaaaaacctgaaacttttgctgctggtcctagtaaacacccactgtttgatttcagaaatatgtccaattcaccaaatcaggagaatattgagatgaccatgacacccagtttagttactacactacccttaccaccacctccaccaaaccacattcctacaacagaaagaaatacctcagtttttttcaacacaagcaccataccgccgccaccaccaccacactttccccaaccacctcagtacactccacttaaccaattctttccctatcagccacaatatccctatcaaccacatactccctttccggttccttgggactaccactactacccaaacccaccacctcatgtacctcctatatcatctacacctactcacttctgggaaggaggacatggtgctcatcctgaaccataccaccaaccatacaatccatattaccaccaagaaccattccacccaccccaccaccaccagtacaatcctgaaccacaccaccctcactatgaacatcggccacactatgcagaccctgcaaaacgctctcgaaatgtcgattttcctacctttgagggtgactatctggagtcttggatacgcaaggccgaaaaatatttctctttgtatcaaactcctgaggaagacaaagttttgctagctgaagtgcacatttcaggaagagctgatcagtggattgaaagtttagctattgccactgcttctctttcttggcctgaattcaaaaccatgttgtgtcaacgttttgcagccaaatccaagattgaaattactgaaactttcagaaatttgaaacagtatggctctgtcgacagttatattgataaatttgaggacaccatgaccttagttaaacgcagcaatcctacattgactaaggattacttcttggattattttatctctggactcaaggacaatattaaaagacctctgaaatctctctcaatttactccctggtgactgcttatgaacatgctcgcaactatgatgttatccctcgctctgccaacacctcttctgttccttccaacagaaagactcccaaaattccaccaaagcaacctatcaaagacaacaagcagtccgctgtcactcatacaaaattttctggcaagtatttccgttgcaacgaaccctgggtaccaggacatggcagagtctgtaaagctaccaagcaagtctatttggtcacaatggaagatgagtctgaaatcctagatgatgcagcttactctactcctgacagtccacagaagactgatcaacaggatacacatctgttattacactccttggagggcaccactcctgctgctactacctttacactatatgttctattgggtaccacataggccacagccttagttgatagtggtagtaccactacattcatctctccgaagatagcaagtaaagctgggttacatatggctaatcatgcacctataccagtcagagtggctaatggcagtattttgaatacagggaccgtctgctctcaggttccttattctattcataatgtctcttttatctcagatttcagattgttggatcttaagggctttgatatcatctttggctgtgattggatctatcagcatagcccaatcaccattgatctcaagaccagagcatttacaatacatcacaatgggatgcagtcaataacctttcctgatattacttttcctcggtccaatcttcttctcacagctgataacttgcagaagatgttgcacaaagatatattaggtgctgtggtgttccttccttatccacaatgttctgcgcttgctctaactgcaaccccaccagaggtaactcaagttttggacaaattttcagatgtttttgctgagcctactcagttgcctccctctcatgagtgtgatcatactgtaccattactcccaaatgctaaaccagtcaatgtaaggccatatcgtcttcctcaccacaagaaaaatgccttggaagagctagtgcagcaattgttgaattcccaaaccaacagaccaagtatgagtccctactcttcccctgccattctggtaaaaaaaaaaggacggttcatagtgcctttgcattgattaccgtcaacttaatgctaccacggttaaaaacaagtatcccattccagtcattgaggatctcatagatgaattacatggggctcaatacttttctaagattgatttgcactcaggttatcaccaaatcaaaatgcacccagctcacatatataagatagcctttagcacacatatgggccactttgagtacttggtgatgccttttggactaacaaatgcaccaaccaccttccaagctctgatgaacagcattctggccccttatttgtgcaaatttgttttggttttctttgatgacattctcatatacaatccatccctatctatccctatctgaccatgtaactcatgtcgaattggttttgcaacttttgagacagcatcatctttcaaccaaaccaagcaagtgtgttttcggccagtcacaagtggaatatctcggctatattatcagtaatgaaggggtagcaattgatcctaccaaagtgcaagctgtgaaagattggcatgtatctaaatctgtcactgatctcagaggattcctaggtttggctggttactattgtcagagttatggataccacatacctaatagtaattgactaaatcttggcaggacccaccacataccatgtcttatacgggaacaacctcagatataggaggagttccgcataaggaaagacaaccagagttctacatagaaacgacaaggactactcggattgtatccatattggttttcctagttctacttggacaaggggacacctatgggtataaatacaaggccccctaggaggggaggggacatggaacaatagatcaacatacaaacctacatacgccaagacaaactaccagatatcgacatcagagataagcctaggaaaaccccatatggtacctaccaaaaccaaagagaggaatctagcgctatctctgacttcgtcggatgcggattcgaggaggaaggctaccatgttgtcggctacgagttagcacttcagaccgccaagtcgacaacagatagataggctaccccaaatattgtactggtgtgattatggtgaataagagcaacgaccggcttcggccaacaggagtagggttattacctgataattcaggggcccgaacctgtatcaaaatccctgtctccatctcttgtaccttgatctcgcatataccctggtaccaacgatccccctactatgcaaataccggaatcgcgatatcaaacgtcgacagtggcgcgccaggtaggaggattttggtgcttcaagatttcgacgagatgggttcaagaaatggattcttcaacaacaaactactcaacaacttcgtatgttgggtgatatgacccgaacgaagtacattctccgacggatcgggatcttcgtcaagcttcgccaagtcatcgtcactatggattttttgatgagggatacttcaactactttggatctaggaagtttaacctagccagagatacgcgccccgacaagatcggaaccatcatcgtcaacaatttggactatcgagatcacccaagcctcaagatacgcagtataccaaaagacgtcagatcatatgatgtcgaacgagtacgcagtaaggtaattggtggatggattttttaaatcaatctactaattttgtagatacatccggcatgtatctacaaaggtatgtaatattttatatataatttaccgtacctattttcagattatacaatattgtcagatcaataattattatgtttacctagagcatgttttttatacaatatctattgtgcgagtatttccgatgctaggccgactacggtttaatgctgggggctcgctctattttcttatgcataaatcatgcttgtttgcggtttacataatgcctgatatttaatttgctcgttatattgtcgggtcccaaaactaatgattcggtaactgacttattaaaactgtatcaagccctggatcagtagattgatacaggttcaacaatctggatcttcatagcatacattttgagatgttattataaaataataggatatttacaagtttgtggctaactattacagtagaagctgtaggatgacccaattctaatgttttgctatagacttaaactatctatctaatatatgcttgagaactaagttagaatgagactaacttatacgattgaactcccagcttcggcaagactccaaattgactctgaaaagggggttgaggcaagggtgagtacaacgtacttagcaagctatattatattaatcaacaatgaatgcatgaaatggtaatatttgagtagagctaagtttacttgcagaaggctgagaatatagaggaagaaagcctgtaatgttttagatgcaacagtatttaataaagtttggaattaagtttctaaccaaataccatatgagtcccaaatgcttaaatccgtgagcacggctattcgaatagattcatttatactttactgcagtaaatgtacgctttacccatagcccacgacgtgccgataatcatcagctttagtcatggcccagcattaggttactaacaatagtggcacctgttccatgaactctagtccccatacgctctgaacataacgttaacagcaccgagaggagttctggcgttcccggggtatttagagaggactgattgtatgacaccatgtcatcgcaatcagggtttacaaaatcacatggccataatatagtcccctggactatcactcaaagtatatttacctgcgcctcggtaaatatcataactgccctgctcagcataagttttcctcctgcgcgaggacttaaaaagaaccactgtacataggtaccaccttgttaaataacataataactaggtctgttcccattctagaactgtggtcgtactcgtttgttcttcacaagtatttgggcagtcttatgtcggttggaacaatactagccacccagaaattaaccattttctaccgtactgttccaatcgtttgttcttcacaagtatttgggtagtcttatgtcggttggaacaatactagccacccggaaatcaaccattttctaccgtactgttccaatctaagttcgttatattttatgcaatctaactaggcagggctaagcaaaagctagcatatctggtttgctatattcagtttatacaattgaaatcatgtatgactaatgcatagaatagagatataagaatatatgatcattatgctcaaaggggaggaataataacttgccttgctccaacgcaaataaatccaagataagcaacctgattatccgctgctcgaaataccacgggttgtcatccaaatataatagactctactgaaaaagaggaagaaccaaattcaataaacgccataaaatagcaagaaagagataaacggttaggagggctagggtttaagatatagccgatctcctttatagagcattgggattattggactagtatttcatgtatgggttctaaagggttgaaggttaaggtggagagtggatcaagcaaactaaggttgctcataatttatgtgaaggctttgactggtgaggggataggatgtatattggatatttgaactggtttagatggtatatggctagtggtaggtttaggtagtataatacctaaggtttggttatatggaagttgaatgtggagtaggataacatatcggctaactctatattttatgtgcggggttctaagtggatggagaatatatgatgggggtgaggaaagtggcatataggtaattataactggtgtggagtatggatagtaggctggctaaggtttcatttgtttaagccgatatcgaggtaggataaatatcggctagggtttgggtgtttgctgggctttacaaccaactgttcgacgtcggggccagtagatcgcacgaacgtccacatagaaggtgtaaagttctaaccgacagcttttatggctaaagggtcttttgaaaataaaaggaaatatttggaaggtataagtttcaattataagtttaaatcaaatatttattcaaatggtatttgaataaattaaggaaattcaaataaaatcttaaaatagcaaatttggtatcaaaaggtatattttgaatttagatgaatttagatccaagtttcatcggaatcggatctacggtttgggagatatgggcttctaaagattggattttgaattaaatctagaaaaatgcgaaaatgtactgttggggggcccacctgtcaggcaatctcctttttctttttatttttctttctcttcttcttcttctttttcttcttccttctttcttctcttctcctgtttcttcctcccgagcaacaagagagagggagagagagggggcgccggtgctttggtggtggaacggcctcgacggcggcggcaaagcgtgttcccagatgtttcatacctaggtaaggtggtggccggcagagagagtgagaagaatggttggaacgccggccgcaagagcttggttgaagtggccaaaaggagaggcgatggtggcctagctaggggtggagggagaggggaaagtggtgaaatggattcccctcgttgagacgaagctattggcgcaagggtttggccggtattgcttcggtgagggagatcgggcaatggccggcatgggaggagagagagagagagagctcggggctcggcttggtggggaggaaaggagaagtgctcgccggctatatatagacggcgaggggcggtgatcaatggcggttcaggaggcggacgacggcttggccacgacgacagtagcttggaggagaagaagacggcgccggcctcgttttccaattggtcgacgacggcggcgcgtgcacgtggcggccgcggcagggctgggcggcggcagtggacaggcacggcacggcgacggtggcggcgcgacttggcggcctcggcaaggtggcggcgacggcgcacaaagccgtgggcggcgacgccatggctgtgggcgacggtggcggcgccttgcgcgcccacagagaaggggaaggaggcggctcggctgggtgttgggccggcttgggctgaggaaagctaaaggaggaaaaggggaattcggcccaaacatagaaggaagaaagtctaatatttcatggagactaaataatttgatttagaggagaatttgtatttggaaggaatttgactagaaagttttgaaagaaaaatatatttggagataatttgaatagggaaggttgaaaggaaattatatttggatctaatttccaaaagagatattttctagtttgagtgcaatatttttagaagtggaatatggtggaatttaatgcactcaaatgagaggggaattaacaatctaattcctcaatatatatatgtttggaggggaatggttggaggtaaaataaataggatttgaatcctaaatttgatagtaggagtatttgaagaattatttgtggctaatagagaatcaatttggaagaggggaataaaataaaaatctattcttcttagcacaagagcaattattcacaatgtttataataatattattcttgtgctgagaagaaaatcaagtcacagaaattaaattggtagcttgatcaaaaagaggaatttggatattttgatcgagaatcaaaggatgggttaacacttaattctaatggaatcagaatttcggtggtttaggttcaagggtaatatgggaaggtttcttggaccataattcttaagagagtttttaaaggaattttgcaaaagaaggtttaaggtgcaaaatcaaatcaaagtaaataccttggtttaataagatcaattttagaataaaaaccacgaaagactttaaatagcaaagagagattctacgcaagttaatttttcgaggtctctctaattatattttcctaggtttaaaaagttaataagaacataagaatcagcatgatgcaagattagaaaatagtaaattttcaggatgttacatatatcatgataatactagaagatttatgcaagtttttgagtacatactcgatattctctgctatataacttgtcttctagaaaatatttttttcaggaacaattgagcactcgagtaggttatggtcgagcacaccccattatcgagaacgttctcgacaaatgcagagttgtcgcacccaacctaccaacgaagaccgacgacctatctcatagcgccaactatggctgggctattcgagaaaagggttgttaacggataattgcttgcgaacgatgtcggcttgatcactcgacatgattgcaggtggacatccggatatgctacgagttgggtatgtgagtcatgctagtcacatgagatgcacatgtaataaaccaactctagcgtccccatcggtgttcgagagataattctacttgctggttctcgaaccagtgaatcgtagcaatctctcacaccgcaacttccatcggtgttcgagagataattctacttgctggttctcgaaccagtgaatcgtagcaatctcccgcaccgcaacttccatcggcgttcgagagataattctactcgttggttctcgaaccagtgaatcgtagcaatctcccgcaccgcaacttccattggcgttcgagagataatcgagaactagtaaattgtagcaatctctcgcgccttaatttcagatggtcgaggtacgactacggcaatagcgtagcggtcctcgcaccacgacttcagatggttgaggtacgactacgactggtcttcaaccaacagcgtagtggtcctcgcaccacgacttcaatcggtcgagagataaggctactcctggttctcggaccagtaggccatagcgatctctcgtacatcgacatcaatcggccgagagatgagactactcatggttctcggaccagtaagctgtagcgatctctcgcacctctatttctagtggttgagttaaggctacacctggttttcgaccagcggtgtagcgatactcccactagctttacttctcgtggtcgagttaaggctacacctggtttttgaccaagtggtgtagcgatactcccactagctttacttctcgtgaacgttgtcggcttgatcacccgacatgattgcgagcaaacatccggatatgctataagttgggtatgtgagtcaggctggccacatgagatgcacatgtaacaaaccaacttaggcacccctataggtgattgagagactccttctcctggttctcaaaccagtaggacgtagcgacctctcgtgacttaacttctgatggtcgaggtacgactatggcaatagcgtagcggtcctcgtaccacgacttcagatggttgagggataactacgactggtcttcgactggcagcgtagcggccctcgaaccaactttaaatggtcgagagacacctactcactggttctcaaccagtcaatcgtagcgatctctcgtacatttacttctaatggccgagataaggctacacctggttctcgaccagcggtgtagcgattcttccactacttccacttcaggtggtcgagttaaggctacacttggttctcaaccagcggtgtagcgattctcccattatttccactttaagtggtcgagttgcgactactacctggttctccaccagcagtgtagcaattcctccgactacatccacttctagtggttgagttacgactactatatggtcctcgaccagaggtgcagtgattctcccactacctctactccaacaaagttgatatcaggtacacgatattgccaagtgttttacccagagatcccttgccacgacgacacctagagttgaaaccaatcctactgtccctttatgccgtcctggcaaggcctctgaggaacctaagggaacttcggctggggacgtccagagcggataaggccttgtcggatcatgcagagacaaactaccatgtaagatctggtcatgtaagagttctcaccgtgcgtattaaccaagccgtttaatcggaaattgggtttttcaacttcacggctgggggctagggtaagcgttttttcaaccaaggcaggtcaagggtccaagagccttatcctccgagaacgattctccgacgacaaggctgggggctagggagagtgtatgactatattgtctccatctcttttacctcaatctcgcatatactctggtatcaacgatccccatactatgcaaatactgaaatcacgatatcaaacgtcgacaagtatcgaaagttcaataaagattttggtcttattggcaaaccactatttactgccttgaagaaaactggattcacttggcaagatgagcagcaacaagcctttgcaacaatcaaggataaattggctcatgcgccagtccttgcaatgcctaattacactcagccttttatactgctagcagatgctagtggtaccggcctgggtgctgtcttgatgcagaacaacagacctttggcatattttagtaaagcaattggtcctaaagcagctggactctctacttatgacaaagaagcattggctatattggaagcagaaaaagtggaagcactatttcttgggcacttctctgattattcgaacagaccaagcaagcctcaaatacattaatgagcaacgccttacaaaagggattcaacataaattgctaatcaagctcctcaactacaattacaaaatagagtacaagaaaggcaaagaaaacaaggctgctgatgccttatctcgcataccttttgttgctcagtggttttctaccactattattgttcctacttggatcattgagatcctggcaagttatgcaacagacccgaaatgcacagcattggaatctcagttgagaatcactcctcagggccatccttcttatactctgactggtggcatcttgcgatataagaatcgtctctatgtgggtgctggtactgatttgagagcaaagttacaacaatctttccacgattctgctctggggggtcactcaggtgaaagagcaacctatcaacgtgctaagttacttttctattggccaggcatgaagaaggatattgcctcatatgtcaaactctgcccagtttgtcagaaaaacaagtctgaacataatctgcagcctgggttacttcaccctctgccagtccctgagatggcttggacacacatttctatggacttcattgaaggcctccctaaatctgataacaaggatgtcatttgggtcattgtggacaggtttaccaaatatgcccattttgttgcccttagccatccattcacagctgaccagatagttactcaatttgtggaaaattattacaagcaccatggtcttccggcagttattgtcagtgacagagatataattttcactagtcaaacttggaaggatgtttttgagaaagccggggtaaaactacattttagtagtggctatcacctccaaacagatggacagaccgaaagggtcaaccagtgcctggagaattatctttgttgtatgacattcactaaacccaagaagtggaaatcactgctggcctacgctgaatggtggtacaatacatccttccacactgccttgggcatgactccttaccaggcaatacatggggtcccacctcccttgctagctgaatctttgctatctccatctcttttcactgatgctcgtaacaaggaagaagcaaaatctgtaggatcgaatcacaagaactaaaccaaccagaggggggtgaatggttggtatacccaaaaaccgaaaacttttagcggaaataaaagttaccctcgaattcaacggagatcggtctgaccgagattgatttgtcggtctgaccgtgtggatgccgccagtctgaccggtatagatcacccggtctgaccgccgatgtcgcctgccgcgcctgtcgccgccgccggtctgaccgcccgtatgccgccagtctgaccgccgcttgccgccggtctgaccgccagtatattgccggttggaccgccgaaatccggtgaaacacaaatcgaagaactcttaaagtagataacgactttattacttctctctgtatttacaaagtgcaccaacagcactccttacaaaaatttcgactaaactcgaaaccctaactcaaaactcaactcaattgctctcaaaagcgataccgggaagcctcacgctccccctctatttatacatgaggtaggcagcctaaagccacgaatcaaactcatactaggaatcctaaacactttaggaaaccctctagtacaagaaagaaactttacataaccaatcgtaccaaatttggactccttccaaattcgactctgcaacccatacgcacacaatacctccatcgtatgctatatggaatctccatcaaccacgtgcatcaactctagcctaaatatcccgcatgatctctgaccaccacggacgtcgtcttatccccaagccgactcccggtccatcaccgcaaatactctctcgaggcatcgagtcacctacacatgcatgaaataaacaaagaaaccatattccgagaccaagctatctccaacttgactcattagtagcaaacaacagtattacatacgtatagtatccatctagaagccataatcatgaaacaatcacggatatccaaataaacaacccgaaaccgaaactgacacagagtcggtcggtcagaccgcgggctggccggtccaaccgctcgatcaccgccggtctgaccggcatacacagcccggtctgaccggtcacatgaaataacagcagtatcctgtagattcacctgtaaaatccaatcatctccaaaatccacttcgaaaataaattccaaataacaaaaccaataatctccaatgccaattgtttatcacagaataataataaaaaacacctttgattttacaaaatctgttattactgctgatatcaagtctagcctcctcaaagcacaagcacgtatgaagcactttgctgatatgaatcgtagtgaacgagtactgactgtcggcgatatggtttatctcaaaatgcagccttagtgtcacaattccttggggttacattcttccttgaaattgcattctaaatactatggcccgtttcgtgtcttggaacgcattggctcagtggcttacaaattgctgttaccggcatcttctcaaatccatccagtctttcatgtgagccaactgaagaaacacatcggtccaaaagtggttcctgaacctggcctccctctcactgatgatgacggtaacattctttctcagccaacggccgttttggaacgcaggctgattcctagaaacaatgcacctgtggttcaatggaaagtccaatgggggaatctacctccgtctgctgcaacttgggaagatgctgctttcatctccaaagtgtttcctgcttttaacccatgaggacatgggtgcttggggggggggggggcaatgtgagaactctgacgaagtgaagtcatgtttgaacgctggaagagaaggcaagttcagttatccaatggctgggattattcgataacgcttggggctggagattatgaagatcggacgatggagatgcgcctggaccgtctacagcacgcccctgttgccgtactgttgacatcatctcttttgtctcgttgtattagcgaccccctttataagctagcaccgccgcaatgtctgtatcgaacaattgaaccctaaattactttactcttgtcttgcggtgcccatctatttccttatactgtttactcttcaattcagtgcaaatccttcaatttaatcccactagggtagctacttagcctcttttctctgaaattgttcttgtcaagctctgaatctggctggggcttgacatctcacgctccgccgatgccgccaggtgccgtcgttcaagatcataccggcgaagtcccacgctgagtcaccgcgacgtgctcgatgtgcgccgtgatgtacctgccaaggtcgtcctcggcgattgatctgcagcagcaacctcatctccaccgcacagtcaggcatccacacaatcctcgccatgcgcgtcctctctgcgtcccgccctgtcctcacagtgccgttcagacgccgaaccaggttagttcatcactaattcatgcttcgatcccatgccattccatcgaaacattgatcaattggcttctcagataactgacttctcatataattgatgcaaaacaaatttcttgtttagatattacttgcctcgcctaaatgtagatcaaacgcaggatgctcaacaccgcaattgtccgccgggacaggtaaatactcaccaatattccttttgtagtgctaatacaaattcatatatagtgctaatacaactgcctttctattatactgctaatacaaattctgaagcaatcatgtagaacagaaaacacattttcgtatgcctctcactttttcccaaatcaatattttttttattactccaaattcatgatttgtcgcctattagagcatttcaatttattctctgaacagttaaaagattgcttatttactgcaaaaaattgggaaagctgaaaaggtctgcttggtgacattactatcatttaaaggcacaggaattaagaagaggaaaaaggattgggatcggcacttcgctcagctgagcagaaggcctctgtcctctctgaccgtgccacagcgtttgggcccttttgttgtgccgttttcctgctctcttgaacgtatgcaagctgttcgctgatttgcctacaccaggtcagctaaactgcaagtaacccacttattatgttatttggtactctcagaccacatatacattcttccatctatgtcggttcagccactgcttcatacttgctttgctttgagttttgtttgctctgatctgactttcacattgtttttgtgcattgaagactggggcttgcttctgtagctcaacttgattaagccacaaaattatgcgctttgtatggcaaaagcaaagcactttgttgtcaggggttgttttaaataataatggatctcctttttttccagccttgaatattgtcatgttgctggaattgtaaccggactcacaaattctccgctaatgaggtaatcatgcacttctcccccctattaatattttttaatcatttcaggaagagaaatagataattgttgcatgcatcctcagatatcaaagatcaggatcaaattttcatcctgctaacttaataacccttgtcctatcaatgggctatctttattgcaggaacgttggttgtgtttcagtcaaattttatagctcaccaagcaatccagatttctttaaagctcgtaatatattcaaaaatttataacttcttttcctgccgccgaacaggtgctttcctttatgcctaattgttcacttccgcgttatatatctctaggtattctgtgttcttacttgaacaagtaagttatgctgcagaatatttgggaatttgtggtacttgttatacctgaagtgacccttattatatagcttatcttcaggccacatcacattaagttcagccaaatatgagcataggtctaactttgtgccgccaccaccatctccaagccggcggcaaggtctcaatatcgggacgagtgcggcctttatgcaggtcacaagcagtgtagtaccgcctcggcggcagtcctatgcccgtcgggactggcatcttcccgattccgacgccaatggatgcgtccctgctcgcgattcgtcgctgacgttacgcacggattccacgccgccggccactgcatcggtacccccgagaccctgacactatccttccatattgcaattgcccaactatgcttctttctgcaactttgttatttttccttataatgtcatatacatatactccatgtcaattaccttgtgcaaaactatttcgtcccaatagtgtttttttcctgtgtatcattgatttcagttgattgtgatatcatgaggacacagccatgaaattcagctcacttggtataagtattcattcctgtttcttagagaaaatcaaatgtacatttattaaaaattgaaagctgggggcgagcaagccctacatttttagcttttaaccttatggctccagcaatttcgattgactgtaattttgtttagtttggtatatgtcctgattggatagcctctgccagctgagtacttctgacagaatcaaacattgatgcctgcaatttttgtggcttttgtcattccttgcatggttgacactcttccagtcagatggtaccgtggcttttctgtattttgtgatggtgaaagccccagtgggaatgtgggatgttcagtactagcattgtgtgtagtttgtattcatgctacaaaatgcctctcaaggttctatctgaaatttagatggagaaaatttatactggttacatttcctataggagtttcaaaaactgatatttgaccattgggcatattaattctctgtaggaatataaaatatctatctatatgaattttgattccagcggatccttgaatttgttgttttgcaatgtggagagtagataacagacttaataatcattggttgtacatcatagatcccaggaaatattggatcaattgtgaggacatgtgtgcagcattagcagttgggctgcatcttgtcggggtaaggttagtttatattgatagaacattgaattatatttcttcattttcctttttatgttattcatctggtacacatgttgtcttccagttagaacttacaagtgactgaatgtattttcggcacacgtgatctagctaggtgatactgggatgtgttttgccaactgatcatgtatgagttcaaagagtaaggtggatttgttaatcacaaatgaaaatttagggtgcatctcaagcattggcgtgataaaaaattcagagaagagtaaaactgatggtgagataggtaattttggttccctgtattgatctttcattactcaccgtaaaagacatgatggtaaaaatatagtttactcctaatggttcaaaaaagttctggatgcattgcatggcgcacaatcctttgattcggcctaataattgtcataggagttgactaatagtaatataacctaattttgcattatttgtactattattttagttttttaaataaatgttttcctttgatgggtctatttctaaatgcagagagtgcatgcttatccacagtcaatatatgcagagaacaggttgattatatatgaaattccagtggaaatttctcgagggaaatttgacaggccagaactatttgtatgcaaattgcgtggcgaaatttgaaagatgttatatacatgtggaattgttaaattaatttttattttgttaagcaacgtgagatttgttagatttatactactccctttggcaaaatcaatctactatattgggcaaaaattttgtgacgtttgaattattttgtcttcggggtgcaagtttaagcataatttttttatgctaaaattttacggtataatgaatttatttggtaaatcatttagcattcacacaaatacatataatatctttgcttgattatttggttttcaaatacatataatatttatttgattattcggttttcaaagaaatctgaacacttgtattgccaatgttatcttttttgggtcatttagtttgcaatacaaaatatcatcgtagcgttagtacggacacattactagtcattagtaaggaatccaaggcacttaatcaccattaggtggtagttgtgcatttatcatatgcagcacttttgctgtgaattacattctggactatatctcatgagttttttttttaccgtccttcgtatctactgatacctctcggtgcctgttatctcgtccgtccgttcagctggatccaagagcctaggatgcaaggtacctgtcggcacagctcctaacaggtacctataggacccacgtagtgctgtcatgtggcggcgcggcgctgctttcccgctttccccttctttttatgtatttttcctaattttgttcttcttttttttttatttttgttcctctcgtggtgcggtgtggcacagagaggcacgcattggcggccaaccattctggaaatccctaaggccagtcacaatggctagtgtcattgcacggctacccaaaatattataccatcttctctcaaatgaaatcttttatgaaacaatccccacagtggaggggtttcactttgacgtttccaagactaagcaaagcatttaattgatacaagttgctgggatcatttgtacccaaaatccggcgcggcgcgggagaatgcggaggtcgcacggcggaggcggacgcaagagatccggtgaatgaaacgaatcggcctcaacgggggtttcactctgttaccgaggacttggaaacgacgctgacgagtttcaccaggatgaaactctttccttctctctcatccccatttcatgcaaataatcattttttattcagtcttacccctattaaatgtgcatgacacaccagtgaaacccccattgtgactggcctaatgggcattcgccggcgataccaagtcagctttggtggatttctccgggaatagtaaaaatggaacaagggttgggagcagagttcattttcgcgattatatcagcgagatgctaaaaaaaatctacaaattcttactcttcttctactttggtctacagtaacgtattatgcaacccctcctgctataaagtagtcttaaagctgtgttcgctagttgaagttgggaacacttctctcattgcacgcaaaatgaaatgatggtttagcgcatgattaattagtattagctaaaaaatcttgaaaaatagaatgatatgatttttaaggtagcttttgtatacaaaacttttgaaagaaatgacaaaatttgctacaagacactcaaagaatatagtctttgttgcgggacaccttaagaatgtgaatttgctcaaggacactaaaaaaatatggtaatttgctggtagacactatacacattattttataatttcctgctatttaggagagaattttcacaaaatggcacctttgcccctgagacaaatcttcgctgacaggatcaaatccggtcgacttagcacaaaatatggcctcaccgcccgtcgctgtgcccatatccgtcatctgccacaaccgtttgtcgcggtgtgttctcgccgaggacggcaactccgtccattcgaggatggaggtctgtgttgacggttgttatcaaccaattttgaccgtcaatattattcaatcaaagaagaatagctatgtttgtaatgcataatttccaaataaaatatctacttccactatgtgctatgctactaacatatgtgcaggagaagcattcataaatggaggagaatcgacggaacataaccgaataattaatcgaaatccgtcagaggcagacttatgggtggatgggcctccaaacctattaagataacttcaattgggccaaaccaccgcaccacttgactgaggagtcattaggagacgcacctgccgtactataggccaattgggcaagtccaggtttcggccgaaccctgatctcagccgttggctctcccctttggcttggatgctccagatgcctccccaatgacggttgcagggtatttccgacatttccaaaccgctgtaaccgtcaatgggagtctataaaaggacctcacctcctcacttcatccacacactcaagaagaagatcaaagagctctctctcaagtttagttagtgctctagtgctagtggagtagaaatagaatagttttcttagtcctcgagtcttttggagaatccggatatggctctagaagcttctctctcttcttttgtaagacttatcaaattaatagaatattcttctttatacatctttggtattttattttctttatattatctgagtatcgattttattttatacttgtatcgatatagttgtgtagcatggatacagagtagtatttaataatgtaagcatggtgcttagatcattaagtatcattatctggatatatatgctgcgggacagtagaggtgggccactgatggtgacagctcagtacgagtattcctccacgttagtatatattcctaagaaactttcctaggaagggtactcctccgtatttaaccccggttggatagccatgacaggttatcataaggaactcgacaatcaggggtggcttctcaaaacactaggagggcactgttaggggtattggctgcatgactgtatactaggaagtgtaaactaaaaatgattgtatattagaagtacatgaataaattattttcttattctttctccacttagtttagattatattttagtgagagtatcttagttcttttttctgtgtgtcacctttatcctaccttttgaattatttaacccctgcatagtccttgatgtatacaagtaatatatataaattattagcatagttctctcttatcatatcttcccttgggattaaataaatacgataccttggaatacttctgggtgaaatgatacaatgttatatccgtgcgcttgcggatcatatctgtagccataaatataccaataatattttgacgtcattactgggaattatatttctactaatgtcgttaagaaatatcaacagtctggtcgagcggggagggggcatcgagcgcactgacgacagaaacgaggaacacatcgaagaggcacgtgggggtggcgggagatgcagacggcgatgaaggtggtacggtcgaaggtgacgcggagggggcgcactagcgcgcgtgacgtccggtcccaatggttgggcgcaatcatgaataacccgtggctgcacaccgccgcctttaggtcgaacgatgtgacattgggggagatcacgccgcccagcgagagctccagctccacggccgcgtgacgctacagtcgcgcagtcgctgccttctagagacggcatggtcggcgacggcagggatgccccctccccatgcgtgggcggtgtatggcggcgaagcggtgtaaaatggacaatttatgtggtttctttatcctcagctaactgaatattatattttaatgctcatggtgtactctggtaaattaccatgtttttcgagtgtcttcagacaaattcgcgtttttacgatgtctctcagcaaataccacatttttttagtgttctataacaaattctgccttgaaaaaaatatcgtttagcggtttgaaaaacgtgcgcgtgaaaaaaggaggtgagttgcgaagtaggggggaagaatacagcctaagagggattgcataattctacaagaattggagacacaagatgtgagagtgtgacaatattctcattcattctcttctctagcggggctacaatagtgactcgtcgaggaaagggggacagcggatccatcctcgtcgaagctcttgccgtcggcgaggagaggaggaggacgtggggaaggcgacagtgactgggtgggcagtggtgatgtgggtgcaggaagggcggctgcgacgtgggtgcgggacttgctcgtcgccactgcagtttggggagctcgaggacgggcgttcagcttcaatgacaggacaggatcctcccacaactatgcgctctcccatctatcgtgcgctcaaggagctatacctcattgatgctgttggttggcgccgatgctcgagttggagatggcgacagcattcacgaggcgtgggccacaaatggaagagaagatatggatctaactgcaatgattgaaaactgaacggcgatgatatggataaaattttgagtaaatttcacaaaactacatgagccaaagagcgttaaagggtgctaagcgtatccaattgctgtccagggacctcacctctactcttcatcccctccatccagggaaacaagaaatagagacgcagaagattgatgatctatcgatcgaaaggaatatgcctcggttagcaaggataaatcctgaacgacttgttctagccattggccggctctagtcaacttgaactagcaaagagaagctcatgtcgacccgtggcccagcgctacccaatggagacaaggcatggcccgaactatctttcgttttgttattcaataggcaagggcaagagtagtatgattgacgcagttacctagtgccatgaactcctcggttccttcctacccttaaggtaacagcggcatcccacctcttttgagggttcggcaatgattgaccaaactatcacaaaactacagatttaacaccaaatttatcacaaaactacagatttaaggccaaatatcacaaagctacatatttaatattgaatttaacataaaactacgtatttcagagtttgaatccctatcactattgttatgttggagctataaacattgtagttttgtcactaaattggttccagttttgtgttaattttattactaattatatagttttgtgacactccatcttaaatgtgtagttttctgataagtttgatgttaaatctatagttttattatacaacgagttaaatctgtagttttgtgataatttggtcatagtatgtgtagttttgtgaaatttactctaaaagtttagaaaatttcagtggtacccagccaaaattgcgtatactaatggtattttccaacatgacaaattcgcaatggttccaattaaacaaaaaaagtcttgctcaccttatggtgcacttcaattcttttaaatttcattgtaaccaaatttttaggtaacaaactaaaaattattaccatatcaaaatttagcatttcagaagcttccgctcacaaatactactgaagtttgaaaaggcatcaaactaatacacatccaaagctatcaaaatttgacaacgccaaaatgtgccaaaatttggcattaccaaattttactaaggttgattttggcaacaaagtgaaagagcccaaaagttcaacttttaaaccaactgagtgttgtggtgttttctgtttttcctgaaccagaaaaactcaatgagattaaactgtttatatttttgctttaattttatactataaatatgtttgtgtgttgcaatgggtaaaagtgttttttacagtgatacaatagctattaggtgatgagtaataaattaaaatattaggatcgctatatattataattgaaaaggtgtttgtctcctacctatctccctttgttcggccgatctctcttaacatccagaagacagtttgtgactgtacgatgcaggagccgatcatccccatcaaatctaggatcttccaaaatagattgagggattttgatccactcgatcttctctttccgttttcccaaaatcgaagtgaacccacaaaactcgggataaaaatggctgaggcaagatctttggccaaccatcattggcaactgttaaaaggagcttaaatctggcgaattaaagctgaattgaaaaagaaaatcatggggaaaaggatgagggggagtggagaatcgctttttgcaattaattagagaagaaaacacatgggaaggcaaatcaatatggtggcggcattaggtgcccgtgtggagccatggacgactcgagcacgagaaggagtcggaccacgaggaccaacggacgaacgagtttttttttgttggaagcaaattttgttttttactaggaaaagtgcccgtgcgttgcaccggatgattacggagtgtgtatagtgacaaaaaagtgttgctgagggacctagaacagactttttctcggcctggccggtcggcccacgacattttatgtacatgtgcgggcgcttcccacctccccaggctgcaacctgggcctgggccggggaagcagccccacgtgcgcctccacttgggccggattcagtccagccaatgccggccgtccgatcttagggtttcgatcggacgatcgggcggtgacgtcagagggacaaaccccatccctcccagccgctggtgaaaaccctagcctcttcaccccctcgccccctcgccagaaaagcgaaaaccgacgacgccggcgcatgccctctcgctagtgtgcgcactcgcccgtgggtgagtgcgccgccgtcgagtggccttgccccggcacccctccccgtcgtctccccttcgtgacctcgtcttccgcgcggcggcggcgctggactccccctgcccatcagcaacgaccggcggcgggaggtggcgtgcaggggcgattcctgccctccaccagatctagtgggagagaaggagaggcggtggcggcctggcggcccagcggcggcggcgtcctcccctccgccggatccagtgggaggggaggcagcggcgacctagcggaccaaatctggcgtcccagatgcgtctcggatccagcgagaggggagggaggcgatggcggcacggcctcccctccgtcggatccagcgggaggggagccggcggcggaccggcgtccctgcgacggcagcgacgacggcaccctctctttccgttatcaatttttcttcttgtgttcttgtgctcttgtctccgattcatacttcagttttatttgtgctctttcaattagttaagattgaaaggaccttaatgtcgcctagaggggggtgaataggcattcctaaaaattatcacaactccatagcatattagaatgatgagaacttttggttcaaataggaacttccgatatgagattggaagtttcggtctcaactgaaaagttaggcggataatggaataaaacactagctatgaacttgtagctcaaataaacaaaatatatatgaatcaaaaggtgacaaataaggtatctaaacaagatataaggtcaccaactaaatcaattaagcaagcaagtagatcgggtaaaaacaaactcaagcataatatgagagaatgcacaaatgggcaaaccaagagaggagacgcgtgatttgtttcccgaagttcagatccacggatcctatgtctccgttgaggagccacaagggccaggcctatttcaaccctattccaaactttgaactagagaaaagtttggaatgacgaatcctcaaacttttatattagaatctttttcaaaaatgcaatagatttttatttagggagatagatcattttgagcaaaagcaagatcataaaagataatattgagaccattttggctattttgtttcacaaatggaaatttttacttcaaaagccttgcaaaacatttgaaatgcatattgaagcacttttgagaggattttcacaaaatttggtctcttaaatgagttttttgaattttgaccaaagaggctatttgaaattgctataaatccaactttttgaaatctttcatattttgaaagcatgggatataaaaatatgattaagaccactcccaattgatgtatttaacacattaactccatgaggtcaaggtttggaagaaaagaccaagtttgagcaaaaaactacacaagcttctattttaaacatttttcttccaaaatgcaaacacaaataaatgagatggttttggagtgaaatgaatatgaatgaaagttatgtactcatttgagctagtatgatgcatttatgcaacccctacaatgagaagtcatctaagtgctaataggtggacatttatggtctagatagtattttggtcaagattggaatctaaatttcttttgattggttggccttttagagaaactttgaataccaaaaatgtttgaaatgaccaacactatcattttacttttaaaatcactttaaaattccttttagaattaattgtacaaaattttgaagttaaaagccaaaacaagatacttagaactacattttgggttgaaattcattttctttgaaacttagttcttctttgaaatacaaaagtattaagagacatttcaaacatactttaaaatcatttccaattagattctcatagaaaggctatacttttcaaaattttcacttttggctaaaaaggatattttgaaatttccaactagcacttagtcaacttgagcacatatgatggatgtgatatgcatgaatatgaatgagcactaaacactcacaccataacctatcttgctcaagaatgcataaatgaggtctttctcatatgcaaggaatacaattttttaaattctatgagaatgtaatgcagcctacacaaggttatataaaagataattcaatgtagatacatgttaccgagataacattgattcttgatgtgaattttgcaatggttggctccaaattccgaacttggtgagatccaccttttcttgcatgagccatacctccaatgcctctccatgtacctatattctcattttagcacattttagtccctaacaacattgggtccataaaggtaagtcacacgagacttaggcacccaaatggattttgtgctagtatgtggtgaactaatcagcctagtagcacaaatgtcctttttggccttcctaagcaaagcataatcaaatgaggagtttggcttaagaatgttaaccatgggacaatttgtaccaatatgtccctttgcacggcaattgtagcaaagtcgattcttgtctttacatggtgccttcttcaccacatcttgcatcttacttgctaccctgctattaagcttcttccttgatgacacaaagtcatccttcatgtggaagcatgatgcaacttcatgacccttctcattgcatccataacacttcctattgcttcttcttgttctcctctttggaagtgtggcttgctcatcaatcttgttggaacacatcaaggcatagtgtcccactttcttgcacatgaagcaagtaatgagatttttgattctactttgaatttgccccttactcttgttattggacttgttttcttgatagaacttagtgcaagctacggttgatcccttctcaagcttcttcaccatgctctcatggttatcttgagaaggttgagcattgcccataagtccatgatccatgtgcttctccctttttcctacacaatccaagtcacatgtagtgctcggggaaatgtttgctttggagcaacaagtgttagcacaagtaagatcaacttgaacataggctcataagattttaccgttgcaaacatcaccttattagctatctctaacctggcatgagaatctacaaggttcatcgtgtgtttcttgtaaatccacatacttgctagtgatctcctcaagttgagatttaagctcttgattttccttcttcaaagatgctacacaagcaatagaattagtggcacaagcaaattcattttccaattgttcatacctcataatcaatgaagaattatatcccttgagtttcttgtgttcatcggctagatccttgatttcttcattcttcttaatgaggcatgcttgttgcttctcaataaccctcatgagcttgatgaccattgttgtgtccttgttcaagtgatcaaccacggagtcgtcatcatcatcatcacccataaagacatgatcttcagcaatggaagatgaacaaatggatgatgtagattcttcatttaactattgatgttcattcacttcctccttcaaaaggttagtttcacaagtactataggaagtagtgcatccatccatatcatccacacgcacacatttaatgctaggtgatatgcatgagtcaacaacacaatcaaatatagcaatttcattatcggtgttgttggagtccaaagggagagttggaagatcatcaaccttattcaccaatttattaccttgctcatacttgcatgttggtgagatgaataatgaggtgataccttcttggtcggaggagataatcacttgggacttgtcatgatgagacgataaagtagagcaatcaccaaatgatgtttccctaagagcatcctctccatcacatttggacttgtcatatctttcctttaatgttgtccaaattagataagcatcttcaagtggcatgatggttttgaacacatcttcactcaaagcactaaacaaaacattagtagcttgagcattgagatgtgtgcatttctcttcctcttcaaatgatagctccatatcattaggaggagaaatactcacatctacaactcgctctatattaggacccatggccctaaacatattaagcacatgagtactccaagatatataatttgaaccatctagtaaaagaagttctaggaacatttcacctcttgtcgacatcttctctcaagacggtgaagcccggaatgagagaccttgctctgataccaattgaaaggaccttaatgtcgtctagagggagggatgaataggcgttcctaaaaattatcagaacttcatagcatattagaatgatgagaacttttggttcaaataggaacttccgatatgagattggaaattccggtctcaaccgaaaagttcggcggataatggaataaaacactagctatgaacttgtagctcaaataaacaaaatatatatgaatcaaaaggtgacaaataaggtatctaaacaagatataaggtcaccaactaaatcaattaagcaagcaagtagatcgggtaaaaacaagctcaagcacaatatgagagaatgcacaaataggcaaaccaagagaggagacgcgtgatttgtttcccgaagttcggatacacggatcctacgtctccggtgaggagccacaagggccgggcctatttcaaccctttcctcatgaggttacacaaatgcactcctcggttttactcttgatttcttcccttgcggaggcgaaatcgaagcctttacaaactttccgtggcacaccacaaccttgggtgctcaccggcgatgcctagccgtctaggagaccttagtccccaaaagtaacaaacacaatcgaagatttgcttgctatgaactcgagtgctcaaagtatggagtgaagctcactagctctcaacttctcaatcactcaatccaactctttccccttctcaaatccctctcacaaaaaggcaccacaaaggatggagtgaagctcactagctctcaactccttactctctcaatccaactctctccccttctcaaatccccctcacaaagaggcaccataaaggtagggaaatggggatggctatttggctttggatgtgtctaatactccccaagagcagcagccactcaaaggaggggtggaggagtttatatacccgagcccctcaaaaactagccattggaggccaagactgtaattttcggagtttccgaaaagcattttcggacaagttcgaaaacttatagaagcaaatctcagattcgtagccattttcggaatgtccgaaaatttttcggattttcggagtttccggtaatttttcggactttccaaaaagcacagagtaaaacgactataacttttcgctcgggagtccgttttttatgaacttggactctatggaaagctcactcagaggactacccaactcaatcaaaaacaaggtctaaaaccactcaaaggataggttaaagcttgggtttctctcaaggtagcactatgataggtcactttgagcaccgagacatacagaaacacctcgatgttgcatccctcttaatagtacggcattcctaaactcaaatgtaaataagaagataattataccatcaggaatgcatttttttcatctttctttcattgtcttgaggggcgccaatgccgataccgtttcaccatatattcttcaaatgattgatgcggttacttgtagcttcaaatggtctcgcacggtccatcatgacaaagccgtcactcgctcttcaccaccggatttggttcttcggcgccaagctccttgcttgcccttcaccgccgcatggtccatcgtgaccgagcatatcttgcccttcaccgtcttgtcataacagccacttcgtatcacacatcttcaatatcttcactttgtcattcttggtattgttaggtgtaatgatatcacttgagcatcaacacctttgtaatacttgggacctatttctttcattcaactcaataaaattattagtcccaatgatccggttgtcaacctccacatgttgaccaaccgatcgcatgtataaaaggatatgaataaatgatgagtattaatcaacaccacaagtgtcatgtactcaaatatatgttcaaatgtaaagatcccaattaaatgaaggtgaataacttggatcgattacatgcataactaaagtataggatttgctccccctaaatgtatgcatacaaaatatttgtgtgaagcaagagtatgcataacaagatattaaacattgagagcttatcctatataagaatagaaggcatttctcaaatatagatattaaagtaaaaacataccttcatcatctccacgttctcaatgtaaatagactaaataagagataatactcaaacaaaacattagtctcacatgcatatgccaatcacttggaaatattatatacgaacatatcaatatgtacatgaagagaaagagtgatacatatagtttgatctccatgcattttatccttgtgatttaggtccaccaacactccactttcatatccacatgagactaggcaaagaaatgcttataaaaacattagtctcacataattggatttgttattaatcatcaaaatcaaatcaatggcacttgaactttcaaagatgtgttcttgtgctcttgtctccgacggacaaaaaatcaccgcacggacgatgtgacaaaaggaaaaatacaaatattttaattagccaaaaaaaagaaaaaaagcggtgtaacctatatttgagactttttctagcgagcaaaagtaacaaaacagtgtgaaaataacttcggttaaaaacaaatatttttagttttgatacaccgtagcgaagcatgagcattttgctagaaataaacttcttttcttcggcccccccgagggacctaaactggacttccttcggccggcccatagcctctaagcgcgcgagcgcaccacctccccctttcccactcctcaacttgggcttgggccgggaaagtgggtgccgcgcgcctccctcttgggccgaattcggcccgaccaacaccggtcgtctgatctctagggcttcgatcggacggccagacatcgagatcggagggacaacccaccccacccccaccccggccgccgacaaaaaccctaggttttctcctcccttccctctctcacggcggagctgtggcgctcatcggcggcgccggcgcatgccctctcgccggtgcacgcactcgcccaagggggagtgcgccgccgtcgagtggccttgccccggcgcccctcccccgtcgtctccccgcggcggcatcggctacggccggcggaggcagagtactacccgctcgcgtcggcaacggccggcggcagcggtagatcttcccgcgcgcgccggcgacggccagcggcgacggcggactcctgcgcttgtcggcgatggcggtggactcccgcgcgcgtcggcgttggcctgcggcggtggtagatcttcccgcgcgcgtcggcgacggccggcggcggcggcggactcccgcgcggtgtctgtgacaaccagctgtggggaggttaggaattttcgcccctttttttgtttcattctctgtgaagcgtaaaattttcttttttcctttttccccttctatttgggttctctaagtaggacaatcgcaattggattttgtatcggtttcgattttaatctcaaatcgcgcggacggacgaacccgtgggcgaagaaaattcacgcggatggacgaacagacggaagaaacggattgtgacgaaaggaaaaatactaatcttttaattagttaagaagtagataaagacatgaggaaatgtctttcaagtatagaaatataggtagtataaacgtgcacgcaaaagcttcggtgatcatcacataatttatccctctgttttttaatatatgacgctgttgacatcatattttgaccattcgtcttattcaaaaattttacgtaaatattaaaaatactagttagctgcccgtgcgttgcagcgggaatcatttcaataatacactaagagctagattattacatgactgataaagccaccaaccatagtctacgcacaaacatgctttaaaaaacaatccatatcaaagtattgttaaaatggtgaagtatttattagaaaataagaattcacaacaatggttctcaaatgcattgaaacatatttatattaatttatagacagtaaaattgcattcgctatgtttataggaggccaaggcgatagaccaattttcagagaatctgacaagttaaaatcttaaagaaatgaaagctcagagttcgaacttcatttaaacaagcattcaacttccttcttcattagagcggacagaagaaacccctctacagagaactctgctcttgctatagagtttacagtcaaaacaggctgacaggctcacaaagggagtcaagctttcatgtatgtagtttcagtttattacacttggtcgaccatgaaaaatagaaatatcacttctggcaaacaaagattggcctaacaacaagaattcatggagagtttttgttccccttgtattatttttcgctctgaataattaagaaagcagaaatgttacctaaaacaacaggatgctaattgtactctactctggaatcttgccaaatgtcgcttttgctctcctctttacgaaggacctgatcggttagtcccatcaatatgggtttttacttttttttttcattgaagacaaactctttaactccttttgaaacaattcccccggagagacttgatcagcaacttgatattcagtcttgtcatctcatcaccagcgaaacatactcctgtctgagactctcagctgatactctgcggtaaccaataattccaaaggcaccttgtcagcctgtcatccagttttttgaaataacagcagcgataaaagaatagtatgactaacaaacctcaatattatgagcaaacaagagtaaaccaacaagtacattgcatctcagctattagttgatggagactttggtcagttcaacatcgttttctctattgccacatgtatatatcaaaaactaatttcttggtggtcaaaaaaagtacactattttgctctgacataatgaaaatattttcctgttgcaatgtaggtgaactgcaatgggacatcattagtgcagagataaacaatgcatgaaaatataaataatttcggttgcagacgtaactttcaaaagtaaacaagatttctaaatgattcggatttctctcatcctaaggcttagtccagaatagcggctaagaaagtccataacacctgtttatagatcacactatttgctctggtagagtgctaggtgctaaagactattccattggcaggccttcagcttctaagccatagctaaatttgaattttggaattaatttagaggttttctcgttgctttccctccttaaattttagattgcaagggtataactataaaagtctaatcctatgacaatgctagtttacttcactcagcttataagccgccagagtttaactaacgagacattaaattttgttcagagcaactatcttcgaagttttggacaaaattaaaaaaaaatgaattataacactcactgtcagtttagggatctttccgtttctgaaaaagagatgtgcttaagatttgaatggttggaaagatggggattaatcaagagacgcttgcataactcttaatttctataaataaaatagtggaaaactctaggtttccaggtttatgtaagggatgctaggtggaggaatacatgtggataaaaataggcaggaaatgtgcaggacaaaattaacacagcaagaagagaactttcatgtcttctcaaaagcccgtaagggtgttatcccttccttgcaatagagattttagattgcattgcattgaaacgagcacataacagtactccatggattttttgtaaactgagaaaaccagtaactaaaagcatgcttcgtcaagcatttcaattggatggcaagcatgtaagatgattttaaccaaagaaaaggcatatggagtggcttatttacagaaagttaaggaaaatgacttcatattggctgttctgtcctgtcagcaaatttaagtcatgtataataaaaactacccacaaaaacatcttgaaagcaaagtatatagacacaccttttgcttgctctatcacttcagattagcagtttctttcccttttccatattccacaccagatcacagcaaaaaatgaaacacatttcacaaacaactcagggacatcgctttggtgcaatcaaagcataacaaagcattatttgacctgtacagactcaataacacaagcaatacaaaaacacaaatttgtttggtcagcgtactggagattaattagtaacctgatttcagtccgagattgcaacaattggatcacatcgatccccagcaccactgcacccaccacgaatggcatgtatccaattaaccctatattctatagcactcaagagttaagattctcacctagagataatagcacgtgggttcacaaaatctgaataattggagttacaatccttaaagcatcaatctgagcacagaaaaaagcaaaagaagaattcgtaaggtgaaagcatgtgggtttgcagaagttgaaaatagaaaatatatacatcaatagaacaattctcaccggacactatgcacctgggacagtttcctgtcagccagcttgtaaactctgaaactcgaatcagaagaaattcattgtttgcagatacctgtggtcgtcgcgatgcaagatggatgggattgatgaatccacaatattgacatagcgttctcaaaatttggcatcacacattcaagaaaaacaggggaaaaagtagggtatcggtggaccagatgtaccaggatatgggcacaggaggtcaccgtcggcaccgtaaaagcggcaggattggtggggttgctgagcgtgagaaagatcgctgcaaaggcagcggagcggaaatgctgagggggacgtctgcctgccgccgagctcgcctcctcccaccgtcgccccagagtcgtgcgacggccagcggaggggttcgacggcgggagggcgacggatgagcagccgacagacatgccaccgtcggggtggagtgcgggtgatggcgtgcggcagatcgcacaggcggcggcggcccgtccgttgcggggtagtgcgggcagcgggcggatgcgggagtggaggtgggggtgggagcgcgtgc

SEQ ID NO: 7794 - DNA, 23830 bp, Oryza sativa
ggttcggccgaacctccctcacggccgttcgatccaagtggacggcttggatcactccccaatgacggttagagggcaatcctgacaattccaactgccataaccgtcattggcagcctatttaaggcattcactccctccatttcttcacacactccaagcatcgaagctctcactctctctcaagtttagtttagtgttcttaagctagtggagtaggaatagaatgtagtcggagtctggaagtctttggaagagttcgggtatggcctctagtagctttcctttcttcttttgcaagactagtatttaatttagaatattcctctatatacgactctagtattgtaatattttccgaatatatgaataccagctttacaatatgtccgagatattatgattatactgctagcttttctaggagatgcattggtacgggtataatgtttgcatatgcaattactctatgtcatgacgatgatattagagtagtatctggtagtttagacgtggtgtctagattactaggtatcattatttggggttatatgctgcggatgagaggtgggccgctgatggtgacagctcgctacgggtattcctccttgcgtgtatataatcctaagttaattccctggggagggtactcctccgtatttagccctggttgtatggtcatgacgggctgtcgtaaggaactcggcggtcaggggtggcttctcgaagtaccaggagggcatcagaaagggggtaatagctagttaatcatatatttaggatgtatgtacactatgtatactagaagtataggaatagattcttttctatattctttccacttagcttagagatttaatataggaatgagtagcttgagcttgtgtgtcattctaccctggaattatctttaccccttcttaggcacgactagtacaagtaacatataaatattagtttagttctctctattataatcttcccacgggataaacaaatacgatacccttggaaaactctcaggtgaaatgctacaatggtatatccgtgcgcttgcggataatctctgtaaccataatataccttgactatttctggcgccactgctgggaattatatttctagtaatgtcgttaggaaataccaacaagcatttctggcgccgttgctggggaagatttataagaagagattcctaaaactaatatcttatatttacctctgtatagtcaatatcctttgcaggttaaccttgttgttttcaccctttgttgtgaaaatagggtagtgtataattgtttttgacctgccggaaaacttccaggaaaatccataagtcttcttctgaagcataaaactgcgggttgttcccccgcagaagactcttccgacaaagaagccaaacgtactagcgccaccaactttcaagaccatggctgacaagactcttcgcgagttcgctgctccctcctctaagaatgtggccactgggccgcagctcaatttgggagacatggactttgatctgaagtccagcctcattacgatggcgcaggctagcccattctgtcgcaagccgaacgaggatgctaatgcacacctgcaacaatttctggagatttgcagcacgtacactgtgaagggcgtcagtcctgatatcgtcaggctgaggctgttcccattttccctcctcgggaaagcgaagaagtgattctatgccaatcgtgctgtgataaactcttgggaaaaatgttcgacagcattcttgtcaaagttcttcccgatgggcaagattaatgcccttcgtgggtgaatttcgggcttctagcagatgcgggatgagtccattccggaagcatgggaacgtttgcaggaatacgtggccgtctgtcctcatcatggaatgtacgactggctgatcctgcaaaagttttacaatggactcactcccacgtcccgcaaccacctggatgcggcagctggaggagctttcttctctaagatggtcagaggagccatcgacctcatagagaagatagtctctaacatgggttggagcgaggaacggctccaatcccgtcagcgaggaatgcacactgccaaggagacggaaatactcgctgcaaaactcgacctcctaatgaaacgacttgacgaacacgacaagaagccccaatgcaccgtcaaggccttggactcgcacatcacgtgctaagtctgtggcaacacgggacattctgggaatgactgcccagagacccatgaagaggcgatgtacatgggtaacaacaacaacaacgggtaccacccgcaaggaggtcaggggtggaaccagccccgtccgtatttccaagaaggcaataaccaagctaactactgacgcacttaataaaaagatggttgctaatgacaagatcttagaaaatataaatgtgaaactagatggctttgcttccgcattccaaaaccagctaagtttcaatgaaatgattgaaacccagttggcacaattagctgctctagttcctacaaatgaatctgggaggattccggggcaacccgaaccctccatagaaaatgttaaggcgatcacgacgaggggaggtaagtccacttgcgatccgccataccctaacaatgcaggtactagcagcaacagcagggaaacaccgtctgacgcagcggctgaagaagaaattcagccagaaaagaccgtgccgcagcattactgcgacacgaggttgctgccattcccccagaggatgaggaagccgtcagtggacgagcagttcgctcgtttcattgaggtgatctagaagattcacatcaacgtccgttgttggacgctatgcaagtgccaacatatgcacgttatctcaaagacatcctcaacaacaagtgaccactaccgacgaccgaggtggtcaagctgacagaggaatgcagcaacgcgatcctccacaaactcccggagaagaagaaagattcggggtgtcccacaatcacttgctcaatctagacacaaaaattcgaccaggcactctgcgaccttggggcaagtgtaagcgtcatgcccaaggacgtcttcgacaaactcaactttacggtgttggcaccaacaccgatgcgccttcagctggctgactcgtcggtccgctacctagccgggatagcagaagacgtgccggtaaagatacgggattgctttatcccggtcgatttcgtggtgctggacatggacaccggtaaggagactccgctcatcctgggcgtccattcctgagtaccgcagaggcaaacattgatgtcggaacaagaagcatccgtttccacatcaatggaaaggaggagaagttcgagttccagccgaggacgaaacaatgctccatggtccggttaaagtacgggccagccccgtagaatattcagacggtcgaagtggagccacccaaaatggacagcctcatcgctttcatgaagaaatctctggagatacaaccttccaggatgaggtcccgttattggaagacaccggcctagaaggaagagaaaccggctcaaaagaagccgccgcccataccaaggacaaataaggtatggtggctgaaacagaagacgcccgctccatcacctccggagacgggtgaaaaatccatgaaatgaacgccggaggtacggtcttgcacgtcggacttgaaatgacgccgccctcgccaataggtaaattggtatgtatcctcatatttattttcaccaatttgatttctgcatcatcaaagcatgtttgaatttctcaaaatttgcatttaggtttgaattttgaggcaaatattcaaaatgaatttttcagagcaaaattttcaatcaaaatttagtttgccacgaccacactggccgttggaacccaacggttaaaagtggggccggttgggcccactaggggttcggccgaaccggccaggcaacggtcggccgccacttttggcagaccaacggctagtgggacccacatgacagtttcgaccgttgttggtgccctatataagccaaccggtcgagagagaggaatccaccccatttcaactcattttcatttcctctccaactttgctctcaaaatccatttcaagttttgcaagcttgtctcaaaatcaaacactttagttgcatacacaagttgtttcgttgaagctaaccggtgggtagaacttcttgctatcctaacccccgccgagttagtccattcttatttgtgcagaacgaggcgatggttgtcccgtctgttcaagaagggatctggctcttcatcgggaacgaccaccgacatatcgatggaagacaccgacataccgacaagcctcttgaccgacaccaacctcaaccttatcggtgatcaggaattacaagcctaccatatgctgaaggaccggaagttcagccacactcgggcgtacgatccggaacttctgaggaaaacaggtatggatagtgattttcatgccatttggaatgctgtaatttggcagagatttgcagtagtagatgaaccaggttctcatttgcttaatatacaatttctgtgcactttgaaagaatcagaagatggcatatcctttcttttttccgtaaagagtatacgctttcatggaaaggattaagtacacttcttggttttcacgataactgtaaaaccgatcttcagaaaggaattcccgggttcaagaaaaacagattttgggaagacatttctggtgctccaacttgcagacgtcctaggacaaatgacatccataatcctacacttagacttatgcacaaatggattgctatgactttgtgtagacccccatttttataacaggaatcaatcgtgtaaatagtaccatttccctggatcaagtagtctggtacacacgaattcatagctaaaataccaagtgcacatacacgagtgtctaatacgaattattacatcataagcccgcaggcatagtcttaaatcatcggaccgagcggtccggaatacatccaaaagcagaaatagataaggcagcggaattcaggcagcggcatgccattgccacaggcaacaaccgtactaagacctactgagcgccatcgtcttcatctccctcctggtagtaggcatagggatcctccgaggcttcatctcccgcttctgattaattttatatttgcaagggtgagtaccaaccgtactcagcaagccatcatagcaatgatgcacatgacagaggaattcaaaggatggctatggttctttttgcacaaagcaagttttgtaattcttttcacaagcctaagacctagcatagactgttcaagttttaataccagtgttcatattaaataatgacggttctgtccaccatccattgtgatcccaaggatagcttcccgccattgagtcgttatggttttctgaggacgtccacattcccgcctcttaggaagtggctccatcagcataaaaattcatcatgcaatatcccatcccacacaagttaagaatttagagtctagccaagtgtaatacatgtcccggtgctcaataaccgcgagcacggctattcgaatagatttggtttactcacactgcagtggatgtacactttacccgcactccgcgactacccaacacatgagcctcgtcccaacacatgagacacgtcacggcaaagcttttcgataacctcgcattggcagtacccgctccatgaacttaaatcctcatgcactctaggcgtccatgtttctagcagtgagaggagttctggcgctcccggggaaagagaagtctcacacgcatattaaattatggttcaagttaagttctctctctcacacactcatggcagtcctaccaatggcaacaccgatatagggcacgcctctcggccctacctcaacggctgtcccatcgtagcgcacctgcctcaatcaggggtgaaccatctatgcagggatactgcctccacttggctatctaatctgctaggtctatacccattcgagaagtacggttgtacggggggtcgtttcatgcttaacttcatggctcggtccttaattgactagggacggtactagccttttccagataccacccaaatcctccgtccgccccagtcgaaaacagttgttttaattttatttctcctttcacaaatcatgtcatcaacatcatggcaatgtggcgctcatgtctccacatgccgcatctcaattaccttcccgaaggtaattgcccaagcatatagcatttgataaatatgagtatgcatgattctacaatagcatttctaagcaattgtcatagttgactagggactcatacgtaagcatggttacaaagatttaagggtaaacaataatcaaggcatggcataatcacaagtaggatgttcattatttcatgcaatttttatttgtaaacaaaacaatttcgtaattaggatcaacatgttcgaggaatagtgatgacttgccttgctcagagtcttgcaggtctcggccttcgcttggatccgcaactccctcgggctctatagttacgtgcaaaaattgatttgaattcggttagaattcaaataaaaatccaaataaatccaaatgaaagtcgaatgtgaaagtcgattcctttttattaactttactatctgcgaactacggcaaacccaatttcgacttaaactattttgcgggcataaatattttgttgtcataagtttttaatttactcttcccgagcattatatccatataataggttagaaatttctattaagagctaaatatcggaggaaatcctagaaatattatacaatttaatttattctatgactaaacgattaaatataatatgcggctaagattcttagtaattaaattcgaatttctaccgtgaaccgatgacttatagagattaccaaaaataatctataataatctataagaattcatctaattgtttagttattaattatatctaaattactaccaattttaatctaatctgatcaagaaacatattttataattaactcggaatttcgatcgaaatactattacgctcgaggaatttccaaaaataatctatgattaaccccgaccatttttatttcctaaatcctcctaatttctcccccaatttcccttctattttctccttttcttcttttctattttcccaatttttctctcctctttttctttttctctcttttctctccctctctttctttttctctcttttctctccctctctttctttttctctgccggcctctcttttctttttcttttctttttttttccttctcttctctcctcccggctcctttctttcttcccttctcttcctctatcctctttcggctccttctcctcctctctctcgtcctgcctaccgcgaccggctgaggaaaggaaaaaggcggcggcggcatggcttaccggcggcaacggcaatggcggcggcgcacggtggctgcgacggcggcggcgcacggcgactgcgacggcggcggggaacgcggcacggccaaggcgcggcgcggcagctctatgcgacgacgcggcggcgtggaggcggcgtggtggggtgggtagaggagaggaggtgaggatggagggaaagagtgggagtagggggggattatataagggaaggggaaagagataatagggaagagggaagaggggcggcggcctcatggtgtcggcggggtggcagggcgcgggacgcgaggagcggcagcggcgacgcgacggccgaacggcgacggcgcgaggcgatggaacgggcggcgcggcgcggtagcagcggcggcacggggctcggggaagcagcgcggcacggggcgcgaggcggcgggctcgcggcgcgaggcgacgagacggcacgcagcgcggcaatggcacggctcgaggcggcgatggaacgcgcacgcggcgacgggatggcgacggcgacggcgcggcaaaggtggcgcgcggcacgaggcggcgatgggatgcacgcgcagcgcggggcgggacgcgacggcgacggcgcggccgcggcgatgagatggcgatggcgacggtggcgcggcggcaggcgacgagggcgacggcgcgcggcggctagcgacgatggcgacggtgcgcggcggctcggggcgcgaggcggcaacgcgcggtgacggtggcgacagagacagggggaaaaaggaggagctgggttaggggaccccgtcgaacactttaggtgcaatgaacagtgccgttttctaattaacccgattttagtgtaatttccgtataaatttgattccacaattcttaattttgcatatatgcattttactcaatatttgtgttatcttaactaatgaattcaccctagattaatattactcatattttatttttatgtaatttatttgagttttaattagggttaattcttattccatcgtatttaaatttaattgatccaaatatggtcgcgataatattttatttatttctatcccacctaatctttattttgtatttattttaccaatttgtttttaaggtttattcctaattaactattctttactcacgattaataatcttcgatatcaaattcagataaaatagacgaataagatcggcatgatgtaattagtttaaaaagtttttgaaaatccgtatttttagagttttgattttgtcggtcgaattttcagggtgttacactttgtttcctagaggtgatctttgacccattcaaggagatgaattgattatcatgtttgccatggttagaaaaattaaaattgctcctgttaaatgtatgattaggcaatggttagtgtcgcgaccgagaaaattgcattttcccgaacgctagtgtattaatccccgtcccaggaaaagccggggtacaccatacaaacatgatataaaagacacatctgtattatatcgataatatttacattattacaaaggcacttaaggcctgacaatcaaaaataaacagcagcggactagcgggcctactgctccatcttcacaggcgctcaactggggtataagccaggactccacctaagacttcttctccaaagcttctcttactgaagaggggaaagattgagcaagaatgagtacaaccacagtactcagcaagtcacaccggcagatgcatgattaatgcaagggggtacaaggggataataataggggttaagttttgcagtaaacagcatttaaaagtcacttagttgcccaaagccattttataaagacgatcctagagttacacagtgttattaatcaaggccgtgaacccacacgaacctgccttaacccaaggcctacgatgattcagaccgaactagcaacccgaccctgggtcccagctcgtcccaagccaacccaggccaaccattccatattttagttgttaagcaaattttaggaattaaaacgctaacttgggtacattgctcggcttgcccataaccgagggcgcggctattcgaatagattatactctgatcagaggtgtacaactttacccacaagacacatcttcctcacgtgcaaccacgtgccacataccaccacggtatacaggcggaagacgcgacatagtttccaacccatcctagccatagagaagagtaccgacccaatcccacctacggccggaacctccgggacaggcaggcaggactgagcccccagcagcagggcaccaaccctgtaccatgacatctcgactaccgggccgcagctcgtgtagccttcatttgccctggagaatgtccatcgacccccgacttcatccacctccaatcttacttttgtttataacttgactgagccacaaactaagccttacccactagacatgtgaaagtacggtagtgctttgcaacagaggcccgaagaccggtccttatatggccgaggtgctactatcaaaaccatgcaccctgagcccagcctaaaaccattttggggattttgaatagagggggcggtgtgaatccaattccacaataaaccaacaattccaaagtgtccaagtgatatgagaattccccaagtctaaagttataaaaccacctaatattgtctaattaaacagcgaagcatctacctaaaatcatactagtggtaccatgagtagagtatccactagttggggttttgtttaatctagggtggacaaggtaataataacaataacaacaataatacggtcataacaaaggtaaataggcatggcttagtaaaaccgtgataacgcgggaatttaaataaagcgataatgcaataatttaaatcaaaataattttataaactgggattcaatatgttcaaggatgatgtgacttgccttgctcactttcccaaacgccggcttcaacttccacgaagagcggatcttccaaagctgcagcgtctacacgaccaacggaaaagaaaaggcttttacgctaataaattccacataacagcagaaacaaagcacaaaaatgggttcttgacttcttaaggaaaaattagagacttgaacggtccaattacgagttcaaatggccaagttatggccatttgaagtttatatgttctttaaatggatatttgcgaatttcttcatttaaattttaatttaaaatcgaattattgcgtcagccgggagagagggcgcgcggaccgggtccacgggagtgggacccacgcggcagcctctcggtccacggtggaccgggtgcacgcggctggcgccgtgggtcccacgcgtcagccgcacccgcgggcgcgagcggctgacggccgggccccacctggcagccgcggggcgcgcccgaaggcggcctcgccggcacggccgacgggaggcggcgcgcccgcgccccgatggtcactgccggcgaccaccggcgcggcggagcggcgcccgagagagaggagagaagagggaagtgaagcggcggtcttcggctcaccccgggtcgacggcggcgacggaaacggcgaccgaagtggaggaaggcggcggcgcggttcgggtcgacgaggacggcggtgctccggcggtcggcgggcgaaacggaggagcggacgaggtcgacgaggacgcggcgaagccaaaggaggagacgccgagacgagaggaggtccggggcgacgacagcggcgaaccggagctcggcggcgacggcggagagagaggacgacggcgcgggctcgattccgaaggggagagtgagcggcgagcggcggaaacggaggagggaggcacggggaacgattaaatagcgtcgggagggggagagagcggccgggcgagggggaaacggccgcgaaagatgcggccgccattgatgccgacgaggtttaggggaaagattccgagcgaatccgagggagagagagagggaaaagtgggggaaaagggagagggaatcacggggaatgattccccccactttattgcgcgcggggacggcgggatgcggcggaatccgcggcggcggcggcggcgctagggcacgggcgggcggcgggagcggcgcgaggatagggatgacaggcgggccccacctgtcagcgagggtggcgggcgggcccgcccgtcagcggcgcgcgcgcggggagaggccgagtgggccgcggggagaggagagggaggggagggagatgggccgagccggcccaagaggggaagggggaaaaagaagactttttaggatttttctttttataaaatcattttaactttgtttatttcttaataattattatttgtgctctgagaattccactaaaatttgagggctccttttagaccaaggagaatttaacaaaaaatctccgggccacatttgaatttttcttatacgtattttagtgtttgccaatttcttttcgaattttaattaattctattattccttttagaaaataatttttatttcgggatgaatttatcaggacgtgacagttagaaagtattaagtatactgcccctgttgagtgtacttctttgatcacccgtatagcgaatggccttggagttattaccaccgatcagatcgagtatatatccactgtccgtccctatgaggatgaaacatacttagtacaagggcatatacttaagcatggagacgatggctcattgatatactttttccccggttgtacaaatgaaatcccattacccaatgcggggtatcatttgtacaactgtcaggaactaaccattcccctacagaccatagaagaatcttgtgcaggtacatcttacaggaagacacgcaacagaccaaggcaagagcatgaggagtcatcctcatcgatacctgtgcagatgtacgaggcggactgggagccaacgggagatgcacccggttggacccaggcaccacggcacagcaccggtggttcttcctggcacagtgccaatgagaatcgctggcaagcaccgcacgacgtacactgggggaacgcgcacacccgttcctctggatcaagtgggatgcctcctgcttccaactggtggcgctcgagttcctctcgggacttgggtttctcacgatgaggctggacaccctttatatgcaggcgggtgagaatggcagcaaaatgctgatgctcagttcgtcaacatcaataacctgatgcaacaatagcaggctgatcttcaagcatactttcgcttccaagggttcaatccctaccagggacctaagtgaagggctcaattcctttccaattgcatatttggatttccacattgcatcctataaactaaaaatgacataaaaaaatttgcaaaatagaaaataccaaaaatataggttagagtttattatgctaggtaagacaactagttctcttgttgagatgatgaatagtttctctgttttatatctcttatatatgggttcacggttaagtacgctctgaaagattgaataaatagtagccacatattatccgggaacctgaggtaagtgggctgcacttgccgaactaagtctaggttgtcgcgagatgatatagtgataagagttgctatgatcctgttctaagtttgacttaaattccggatgttttattttccaaaatgataaacttaaaagttcctcatttgataaaaattcctaccagagccaaaaattttcatatttgataaaccatatatattttgggcgcttgtacttccattgaactttgtcaaaatcttgagacttgtgtagatacttttgatactctatgatcaagatcatacacccacatatatgcacatgcaaacttctgcactagaagttagcattcattcattccatctatatccatcatgctatcacccaaaatcaagctctccaattatatgctttctccttccaatataatatcctttccaaaaagagataaaaagagggaaaggcatggttaggaaaataaagtcttgctcctcaaaatattgagcatgataaaaaaatgagtagccatgccccctccaaaaaaagaaatgaatgatcttgggagaagaaagaaagcacaaaggagaagtatttcctttttttttccacattctatttccaccatatagcacacacactttatgcacgatcttgatcttgagtatgtctagtcatctgctctagtctaaagttttgacttagtaataaatgcaagtatgctatgtttgatacctaccaagctccacatactaaaccttagagtaggaatcaactaggctactttggtgaggaattcatttatatacactctgagtgatcgagagggtcatttgaggaacttggatttcttttgaaagatcatttgaaaacttccggaataaaaggttgaataaataatgggtgactagtgcttgattgctgttctatcttccaaccgcacaagacaaggtaaagcaatgtctcgcgggaatcagttgtaagggtaagacacgtgtcaaaattatttgatttgagagagtatatctaccttgcacttgtacatttgagaatatacagcatagtagcaactcctgatcaacaatcaagttttgtttccttttgtcctttactcgagacgagcaaaggttcaagcttggggggttttgttgacggtcgttatcgatcagttacgtccgtcaatattactagaataaaagaactagttatgcttgcaatgcatatagtgtaataataaaataaaaactactagtacttggttcactaaccctctgcagagaatgggccataaatggagaaaaatcggcatcaaaaccgtacctctggtgtcttagctttatgaggtgcccagtttcaaaggtacaggaacaggtgtcttctctttaacctgccatacctcctttgtttttggtgcggtcaatggcttcttcgaaactgggaacgcaggttgaccgacttgtgttcctggcttcttgggtgccagcctaaggtatcaacggatcctcatttcttcttgatctttaggaaattcatcatgaaattgctgaaactgtcacgcccggaaaatctatccaaaattccgaacgcttacatgtgtgttaaaccctcgtccaggaatcaactgaggcacacaataacaaattgataatagagtacaaataaataactatttaatattcgcaaataataaattattacagaggtagatagttcctctcaaagaataacattctacgcagcggaaaataaaactataacaaactacggaacagctatggcgactccactccacaggcatcctaaccagaacaagcctaatcctccagatcatcaccttcactgagatactcctcttctgatgaatgaatattgcaagaatgagcatatgacatactcaacaagtcacacagcaaatatgcaagtgcacaggataacaaaggatggcataatatagctcatttgcagaaacagcatttaacgaatatttaagagaatagtaaaacagttgtaataattaatcaatattaaataaacaccatacaacacacccatgttgcataggcccaaccacatttgaacaaccaaccccagttgaacaaattaaacctccaaaccaggaattatccattccaaaccaggagtcaaattaattaccacattattaccattaatgagtagtgtgagactaatcacgaaaaacattgctcaactcacccataaccgcgggtacggctattcgaatagtttaaactctgatcagaggtgtaccactgtacccacaagacacaaccccacatcatgtcaccatgtgcctcaataccaccacggtacctcggaaaggagttgtgacaataccccttgcacaacataacccattacagcgcacctttcctggatcataatcaccccccttataaacaaggcatggactccccagcgacccccgtggacttctcgccacttctcagtctgacgcactataatgaatcacgctatacaaaagataaagccgttgcccacgctggcttgtggttggcacgataaatgtttcacaacagtagctcgcgaaccggtccttaattgtcatgagcacaaccatcaaaaccatatgctcacaacccaccttaaccaggttttaattatcaattaattaacatcacacgattaaccatcgtgagctaccatttaatgtaaccataattaaaacattaatataacatagtttataattaatccctttaattagctatgtttctaggcatggctaagcaaacttacatatagcatttagctgaaccaatccaatatataaggttcatgctaatcaaattataacccataggaaaataaagtcatcttcggccattatttaattgggaaaggttcaccacccgatgacattcgaaaacaatgcatagttgaaataaaataatagctttaaacgggttcaacatgctcaaagggttgtttgggatctgtgtgacttgccttgggcttccgcaaacgcttcggaaccttcctcaaaggaaacgctctcctccggaacgtcagaaactaaagcaattaaacaaaaatcaacaaaacagtacaaaaacaagcataaacagtacatgtggatatttttaacatgtaaatcttgattttagaaaaatttaacaacttgaaccacctaaaacggatctacggttatttagttatgattttccgaagatttaatctattagaaaatcgggaaaaagaaaaaccgatgacgtcatgctgacatcacccaaggcggccgaaccacgatggcgacctcgccggagatagagcggccggctgcggaattggagggcaagaacacgtagaggacgacgagacgaacccaacggtactcaccacaacgacaaacgacgtcggacgacttccggcgacgacggggaacgagcggcggctcgggttgaccgacggcggcgagctacggcggccggcgacgaaggggaaagggcggccgagctactccttgctcctatgcacctaatggcggcgagaaaaggcggcggcgatgacgcaagcggcggcgcggcgcggctgagctccggccggcggcggcggcgtcttgtcacgcgcggcggcggcgctacggagcactagagaccacgagagagggggcaaacgaaagagggcgacgaggtggtcctatttatagccttggattgaagagatcggactcctcccgcaagaaatcggtccgagaaatcaaaaactcggttttggagataaactcgaaaacgagtttgattcagataaaatacccaacgatttgctccgattcttgaggggaaagatagaggagaacgagaggatcaaaacccctcaaaaatccggaagaaacggggccggattgggtgcggatttgaggcggcaaggcggcggctcgggcggctcgggctcggcctatgccggccggaggttagggacacacccgacaggtgggtcccacctgtcggcggctgaggggaggaggggcgggcggcgtcggctgggccggcttgggccggttcggccgcgcgggaaagagggagtgttgggccgaaaacggcccaacaacttaaaggaggggtttttgaactttttaaataaaataatttgtgaaatgttgtttcaattattaaaaaaatacttcccttgctcaaataattcccagaaaattctagaaaatagaagagcaagcatagtatttaataaaattttatctagctcacttttatgttgaaaattttcctagataattaggttttagcttgtaggcttttaaaatattttctaaaaatcatttaaacaatgcatttttaatttaggcgatttttagggcgtgacagcccagtttcaaaggtacaggaacaggtgtcttctctttaacctgccatacctcctttgtttttggtgcggtcaatggcttcttcgaaactgggaacgcaggttgaccgacctgtgttcctggcttcttgggtgccagcctaaggtatcgacggatcctcatttcttcttgatctttaggaaattcatcatgaaattgctgaaactgtccgtctttcggggtagaccttgacctccttgtgggtttggtccgtacttgatcttccccatggagcaatgctccatccttgatctccttatggacgatacccgttgttgctctcgtgagcatgagtccttacgggttttcggatgatccatcccagtgtgactggcattgccacggacctcacatgtcatgtgagtccagggccttaacagcaccctgcttggcgtccttctcattgttgtccagtctcttaataagaagatccaactgagtggccagcatttccgtcctcttgacggtgtgcataccgtattgacggattcggagtcgttcctcgctccaacccatatttgagaccatcttctcaatcagctcggtggtacctctgaccgtctttaagaagaatgtctttccaatagcagtgtctaggtgatcccaagatgagggggttaatccattgaaaaaactctacaggatgagccactcgtccatcccatgatgaggatgggcggtgacatattcctgcagcctttcccaagcttcaggagttgtttcatccttcggctgctgaaagctggatattcttccacgaagagcgttggtcttacccatcgggaagaattttgagaggaatgtcgttgagcaattattccggatattcacaattgcacagttggcgtagaaccactgtttcgctttcccgaggagggagaacaggaacagtcggagcctgatagtgtctggagtgactccgtgctacagattttcagcaattcctgcatatgagcacttgcatcctcgttaggattgccacagaaccggtaaacctgcgccatcgtgattaggctggtcttcaaagttaccatctcccatgctgacttagggtccaacgggcacattgtcggcggagggagctgcgaacttgcggaggatcttcccagccatatcgttaaactctagtggcacgaaaatggatggtctggttgctgatagagtaacttgaggagggacaacacggggtcgaggctcgctccacaagtgactcaagattgaaattggttggcagatcagaactagtcttgtactaccctgttttcacataaaagagaaaacatacaaggtttgcctacataggatagtgattatacagaggtaaatataaaattattagcaagtagtaaactctgaatgatttatcttccccgacaacagcgctagaaatgcttgttggtatttcttagcgacagtactggaaatataattctcagcaatagcactagaaataatcccggtatactatggttacagatatgatccgcaagcgcacgaatgtaccattgtagcatttcacccggaagtattctaaggtatcgtatttaatcccaatggaagatatgataagagagaattatactaataatttatatattagttgtgtacatcaaggtctatataggggttaaaataatccaagagtagagtaacacacagcaaaagacctagcattcttaataatcatcaagtatcacattattcacattagtgagtagtgtgggactaatcacgaaaaacattgctcaacccgcccataaccgcgggcacggctattcgaataattttactctggacagagatgtaccaccgtacccaccatgtgcgtcaataccatcatggtacctaggaaaggagctgtgacaatacaccccatacaacacaactcaccacagcgcaccgttcctggatcgtagtcacccctttataaaacaaggcatggactcctcagtgacccccgtgggcttatctccaccacttctcagtctcttgccccgtaataaactatgctatacaaaaggtaaagctgttgcccacgctggcttgtggttggcatggttaatgtttcacaacagtagctcgcgaaccggtccttaattgtcatgagcacgaccaccaaaaccatgtgctcacaacccaccattaatcaagttttaattggcaattaattaattaaccaaacacgattgaccaccgtgtgcaaacattaaatagcaatcattaagtaataatgaagcattagttatccccaatagttaactaatacttctaagcatggctaagcaattatatctaatatctagctgaaccaatatataaggcccaagctagtcaaattataacacaggaaaataaatcttcggccataatatagggaaaaggctcaccacccaatgacattcgaaaataaatgcatatttgaaataaaaagagaatttaattatatgttcaacatgctcaaaggattgtgtttagtatctgtgtgacttgccttgcaataatttcaattagtcttctggatcacttccgatgcactcatgatccttccaaacgacgaaaacgacaaactaatacgcaaaacgaggaaaaaaactaaggaactccaaataaacagtacgtaaaaagtaaataaacatgtagaccatgattttagatgaattatgagacttgaacggcctcattctgacttccaatggattaattatgaattttacaagatttaatacaattaaaacctatttaaaaggattaaacagattaacaacacaatttataagtaattttaatatagatctctattttatacaaatttagcaacttgaaacacattaatccgagttataatgaattagatatgatttttctaagtttaatatgatttttgcctaatacagaaaagactttactaatttattaatgtattaaataaaaggaaaaagaggatgaaggacggtggctcgggaaacgaagttcgccagcgatctagggcataagggcgcgaacggagggcactaatgcgaaaagtacaacgcggcgaactcaccggtggctagaacggccgagattgacgacgaacggcgacggcggcgaggttttggcggcggcggccttcgggtagtcggcggcgatggtgctccggcgggttgcggcacaaacggagggcgggacgatgtcggcgacggtcacgcgaacccgtggacgtgaaccccgtgcgactgcggcgaccgaggctacggcggcgctcagctgaagcagctccggcggcggcggcgcaaaagacgacgcgggaacggcgctagagggggcggcgggcgaaggtggaggtgatgaggggtagaggagtcccagggggtccttttatatgggtcaagaggcaccggggagggctatggcaagccggcggcgacatggaaggattagcgtttgattaggaaagagaaattcgaatccgatttgatttgattaatccatgcaaaattggactccaaatcttggggaatggaaggaggaggatatgggaaatatttcccctcaaccaatttttgaaacaaagcacgggagagatcggatttggcgagggggcggcggctgctcgagctcggctgggcggctggaggttgaagaaggcactgtagcgatagggagtcacactagactttttctgcggtttccttcactaggcccgattgaagaagggacgcgaatcagactacgacagagagagggagagggctgctggatcggcagggctgaaggagagagatcggccagattcagcccaaggcatagaagaggattttgattttttttttcaatttaaataaatactgaaatgatctttcatttattaactatacttccaacgctcacataattccaagaaaaatcctgaaaataattggacactcaaagtattcaacaaaattataatcagaccatttaatgattaaaattaggatttagtatttatataattgctaaaatgctctttgtattattaaaattaggatttgagctccgaaaaatacgagaaaattccagagagtataattaatcgtagagaatttaataaaaattaaatctagccattcttaacatttaggaaattttatttcccacatttaactttacttgtaaattaatgaatatttaatataaattgtagaaataatttattaaataatttataaatcctgaaacgaaaatcagggtgtgtgttgatgcgaaaaacacacaccggcctgagatatgcttaactctagtgcaggtccaaatcttggtttcgagttcgagggtatgccagttggtttgatcctgcaacgaacaagaaataaagaaacacatttaaatccataaacgatagccgatcgggcagtcaccgatgacatatcaattgtaacttagccgatgtaacgtgaattagatcagcaatgaaatataaggtaaaaggaaggttagacctagtcgatcggctatagatatcaacagtatataatatatacctcaagatatatttaaactaagtgattgggatagatcggacagcttgccgagatagtataaatcacttatgtttaaaagtaacttgaatcagatattatatatgttcatagcatagccggtgttttagatctaacatgtattggctaatactccgataccactttatactaagataacaatataaacaaaatatattaaatagagatcaatcaagtgttaagatgacttaacagatcaataacaagcttaatatatttaattacagtgatatcttaatataaagggcatatttagcatatcaagtaaacataaaataaggtaagatcggctgaaaccccgatactaccctaatcggcaaccaattaacaggctagaaattataattctaaacacgacttaaacacgacttaatagatcaaacttaactgatacaacattaagtataaaaagaagaacaatatctagacaatcaagtcattggatgattcatagagtggtggatatgctatataatctaagtcaacattgagatctagcttaatcggccgccttccagtgatagatgttagccgatttgaggttagatagcaatattgatctagattatatagaatatatgataacttgacgattcacataaacaagatttgtggacatccctagtattataccatccagtgtccaacgcgaccaccacatactattggagaagtgggatctatacacgcataaatagccactcatcctcaatgtgtccattatcacagttgacaccttctactataataaccggaatgccgagtagtgactgcgagagataaccataagatagcttgccagtccactccgtcatatgctcgtcaaaccatatgaaggcggcgaccaaaaacataccccagtaactcgatccaaaagcgctatccccaagtatctcaagcgatcaaaacctgttactcatgcttagctagtccccaggaatgcgactagcctcacactttcatcgcaagccattagtaaacatagcaagtaccataatagggtttaagtgcagcaagatacatgacacataatagggtccgaggtcccaacatacaacacataaatatagcagcgaaagtctcaaatagagttcataagcaaaagataaaaccggtggtgccacaaccccactagggcaaaccaaccgggcaagagccaaactgcaagagatcactcatcgccctcgccgccctcggcagagcaatgaccacacaagaagcataactcataaccggtatcctcacctgaaacagcggcgccgggttaagtacaagattgtactcgcaagtcttacccaaaattaaatatacataagggagagagaagtatgcaagctttctagccaacagtgggtctctaggttcaacatttgcataaagctaattttattgagcaattaatgagtaaaataagtaaggacaagtaaatctagcatcatttttatttatggacagcaagtatataattctgagatgtataagcaaatgagcccaaacggcgctctcattatcaaccatggactaccaaagtccataccaacatggcacaacatggcaacaccaccatcaaatagaatcccatccataataatccatatttggtgctaacataactgactaacacatcaagcattgtccataaccgaggacgcggctattcaaatagattatactctgattagaggtgtacaactggacccacatgaaatgaacaaagatcaaatgctacacaccccgtcgagtgtggtacacaagtgattcaagctcattacatgcccatttttagccccaccccaaccacctataacatgctggggttcccgacgacttagtcacgtgcgtgcatgatgtgaccagtggcagtagggtataaggacaggggctgcagg

SEQ ID NO: 7795 - DNA, 3509 bp, Oryza sativa
atactctagtcacagtcacaccaaactccattcacagatcaccaaaatgaatccaacagcctgcaaagaacattgtgtcaggaattaacactagtaagaaatgaacacaagctcaacactctagtagtccctagggcagcaaccttttggaaattatattcaccagtggttttatttattcagtctcatgagtcctggcactataggaagtcattgtagtagagatattgattccaaacagtacctatgttcatttgattccagtatctaactatatcatacaatactactaatagtataaaaaaatgagaggtccaagaacaagaaacagaaactgcattatgtaagaagaggcatatcataagatgaagatgtgtacctaagcgcaaccaagtcaaggaggagtggtctgatgagtgacctgagtctgtccaaatgctatcatctgtcgaatgaggttctgagtatctgctgctgacttctgagtatctgttattgccttctttaggttctcaatctcctcagcttgtttctgagcttttgcctcagattcttctgcctgggcttccaacctctggaccttttggcgaagtcctgcagattcttccttctcagcctccaattgtgcttgtagctcctgcatctgcggtgaaatagattttggagcggcaacaggctgttgaagtcccacattacgaaggaatgtgcttgactttgtcaacacttgggcaacaatatctgtgcaagtcatttcctgctccccttcatgtactggtcttctcaaaatggcttccatatcatcctagcaagacaatgatttgtcaggtttccttcacaatttattttatcagtagtttccttcacaatctctactctagtccactttcactatttatttttttcacattgtaaagttacattgtatagcaggttcttgtgtgaagatgatgattaacgggtgcatgaagatgatgattaacgaaataacagttcaatcaatctggagcaatagagagtatacttcaattagatggagaagtccaagttagtatttgtttatgatattgtagctgaaattgtatattttttttcctgaagttcaccttttcatgtaagatgtaaattaccattcagtgaatgaaatgtgtgatttttcgacaagtccctccctgattttttttatttataatgctaaagtgtgatgcagtctgatgttctccaaataaaattgtggatgccagaattgaggaggtcttctcttgccacgcagtcctacgacctctccgtccaccgctgcggcaccacatataccccttcgcaccctccctcgccgcatcccgcttccacgtcgacgccgggggcctccttttccaccacaacttcactgcttcgtctcccatcgtcaaggagttcatcctctcggtggacgctggtggcaacacttccgactgtctcatcaacgcaacggcagcaacatgtgctctgtccgcgattttggtcgttaccgagcctggctgcccttccccacccccagcgtggcgccatcccccaccctcgatagaggtgaggcgcaacggtggacggcacggcgcccttcccccactccggcgtcctccttcaccgggaacactcaacccgccgagacgctctcccctagcccgagaattgcaaagtgtagttaacaactttttcattaatttaaattcatttagggcctcagtcagttcgaagcactaatatatatatatatatatatatatatatatatatatatatatatatggcaacatatcctatgcacacaagccctcacgtgtacacacgtgtacaccaactaaaaaatgtcaccaaaaaatctaaaaaaaatcatacccatactttcaattgtattacacctagggttaaaatcttaacgtcaaattcattatattttagccgtaacaaaaaaaaacaaaaaatctgacagttttaaggttgtaattttgtcagaattttatcttttttgttattctctatgtagaatgaatttgaagatgcgactttgcacgtagatgtaatactattgaaagtacatgtatgaattttcctaaaattttttgtgaaaatttttagttggtgtacacggtgtgtacacgcgagggcctgtgtgcataggatacgctccctatatatatatatatatatatatatatatatatatatatatatatatatatatatatatatatatatatataaacgtatatgaaattaatagccatcgtagtaaggattaatagccatcgcattaatgacctttaggcactgctgctaataatcctagtacaagaaaatgccatgtcatggatcatccaagaaactagagtaatgatgcctagagtagaaacaaggcaaaagatggcacagatattccagcaactatgctgtcctctcacaatccagaaataaaatgagagcaacaaatgtcagtacaattccaggcaccaagaacagctggaattcgcatatctcaattaaggagtttacacaattgagttcacaattcataattatttcacggctaacacattaggagctgtttaaaaacaacaatttcatcacaactcagattcacatatctcaattactcgacatcactatactcaccatcatcattagggatcataattgtacattcattttcactatcatactgccctaaggtatcatcatcgtcatcatcattgtacaggtcatcttcttcaacttccagatcccgttgcctgcgaatctgatcaactagggactttggtacacttataccatcttcgttgactggttgtttgtcgaccagagatccttccatggtttcaactcgagatatttcctgctcatcatcttggtatgtcagatcaacccctccctcttgcctgtcatcattttcctcctcattcacattccacaagtgccgatgcgaaaatttttgaacaactttccagggttcaccatgcttgttatcatccaagtagaaaacctttgttgcctgtgtggcaagaatgaaagcatcatccttgtaccaacaacttccatggctgatgcttttgaaatatccatcattcttcatcctaaactttttgctacaggtatcaaaccaatcacacttgaataacaccactgtcctttgactgtcagcgtcagagttgtactgcaactgtattacttcttttagctgaccataaagtctatatcttctccattatgtgtgccctcaaccataactccactgttttgtgttcttctactgctctcacgttccacggtgtgatatcggacaccatcaacaatacatcctgaaaatatacgaactctaagaagtggtagacttgccaatgcatatagtcttcatcgatttgttctccattcacaaacctccgagtagcaagctgcagtatatatatatatatatatatatatatatatatatatatatatatatatatatatatatatatatatatatatatatatat

SEQ ID NO: 7796 - DNA, 6941 bp, Oryza sativa
gtttttgaactttttaaataaaataatttgtgaaatgttgtttcaattattaaaaaaatacttcccttgctcaaataattcccagaaaattctagaaaatagaagagcaagcatagtatttaataaattttatctagctcacttttatgttgaaaattttcctagataattaggttttagcttgtaggcttttaaaatattttctaaaaatcatttaaacaatgcatttttaatttaggcgatttttagggcgtgacagcccagtttcaaaggtacaggaacaggtgtcttctctttaacctgccatacctcctttgtttttggtgcggtcaatggcttcttcgaaactgggaacgcaggttgaccgacctgtgttcctggcttcttgggtgccagcctaaggtatcgacggatcctcatttcttcttgatctttaggaaattcatcatgaaattgctgaaactgtccgtctttcggggtagaccttgacctccttgtgggtttggtccgtacttgatcttccccatggagcaatgctccatccttgatctccttatggacgatacccgttgttgctctcgtgagcatgagtccttacgggttttcggatgatccatcccagtgtgactggcattgccacggacctcacatgtcatgtgagtccagggccttaacagcaccctgcttggcgtccttctcattgttgtccagtctcttaataagaagatccaactgagtggccagcatttccgtcctcttgacggtgtgcataccgtattgacggattcggagtcgttcctcgctccaacccatatttgagaccatcttctcaatcagctcggtggtacctctgaccgtctttaagaagaatgtctttccaatagcagtgtctaggtgatcccaagatgagggggttaatccattgaaaaaactctacaggatgagccactcgtccatcccatgatgaggatgggcggtgacatattcctgcagcctttcccaagcttcaggagttgtttcatccttcggctgctgaaagctggatattcttccacgaagagcgttggtctttacccatcgggaagaattttgagaggaatgccgttgagcaattattccggatattcacaattgcatagttggcgtagaaccactgtttcgctttcccgaggagggagaacaggaacagtcggagcctgatagtatctggagtgactccgtgctacagattttcagcaattcctgcatatgagcacttgcatcctcgttaggattgccacagaaccggtaaacctgcgccatcgtgattaggctggtcttcaaagttaccatctcccatgctgacttagggtccaacgggcacattgtcggcggagggagctgcgaacttgcggaggatcttcccagccatatcgttaaactctagtggcacgaaaatggatggtctggttgctgatagagtaacttgaggagggacaacacggggtcgaggctcgctccacaagtgactcaagattgaaattagttggcagatcagaactagtcttgtactaccctgttttcacataaaagagaaaacatacaaggtttgcctacataggatagtgattatacagaggtaaatataaaattattagcaagtagtaaactctgaatgatttatcttccccgacaacagcgctagaaatgcttgttggtatttcttagcgacagtactggaaatataattctcagcaatagcactagaaataatcccggtatactatggttacagatatgatccgcaagcgcacgaatgtaccattgtagcatttcacccggaagtattctaaggtatcgtatttaatcccaatggaagatatgataagagagaattatactaataatttatatattagttgtgtacattaaaataatccaagagtagagtaacacacagcaaaagacctagcattcttaataatcatcaagtatcacattattcacattagtgagtagtgtgggactaatcacgaaaaacattgctcaacccgcccataaccgcgggcacggctattcgaataattttactctggacagagatgtaccaccgtacccaccatgtgcgtcaataccatcatggtacctaggaaaggagctgtgacaatacaccccatacaacacaactcaccacagcgcaccgttcctggatcgtagtcacccctttataaaacaaggcatggactcctcagtgacccccgtgggcttatctccaccacttctcagtctcttgccccgtaataaactatgctatacaaaaggtaaagctgttgcccacgctggcttgtggttggcatggttaatgtttcacaacagtagctcgcgaaccggtccttaattgtcatgagcacgaccaccaaaaccatgtgctcacaacccaccattaatcaagttttaattggcaattaattaattaaccaaacacgattgaccaccgtgtgcaaacattaaatagcaatcattaagtaataatgaagcattagttatccccaatagttaactaatacttctaagcatggctaagcaattatatctaatatctagctgaaccaatatataaggcccaagctagtcaaattataacacataggaaaataaatcttcggccataatatagggaaaaggctcaccacccaatgacattcgaaaataaatgcatatttgaaataaaaagagaatttaattatatgttcaacatgctcaaaggattgtgtttagtatctgtgtgacttgccttgcaataatttcaattagtcttctggatcacttccgatgcactcatgatccttccaaacgacgaaaacgacaaactaatacgcaaaacgaggaaaaaaactaaggaactccaaataaacagtacgtaaaaagtaaataaacatgtagaccatgattttagatgaattatgagacttgaacggcctcattctgacttccaatggattaattatgaattttacaagatttaatacaattaaaacctatttaaaaggattaaacagattaacaacacaatttataagtaattttaatatagatctctattttatacaaatttagcgacttgaaacacattaatccgagttataatgaattagatatgatttttctaagtttaatatgatttttgcctaatacagaaaagactttactaatttattaatgtattaaataaaaggaaaaagaggatgaaggacggtggctcgggaaacgaagttcgccagcgatctagggcataagggcccgaacggagggcactaatgcgaaaagtacaacgcggcgaactcaccggtggctagaacggccgagattgacgacgaacggcgacggcggcgaggttttggcggcggcggccttcgggtagtcggcggcgatggtgctccggcgggttgcggcacaaacggagggcgggacgatgtcggcgacggtcacgcgaacccgtggacgtgaaccccgtgcgactgcggcgaccgaggctacggcggcgctcagctgaagcagctccggcggcggcggcgcaaaagacgacgcgggaacggcgctagagggggcggcgggcgaaggtggaggtgatgaggggtagaggagtcccagggggtccttttatatgggtcaagaggcaccggggagggctatggcaagccggcggcgacatggaaggattagcgtttgattaggaaagagaaattcgaatccgatttgatttgattaatccatgcaaaattggactccaaatcttggggaatgaaggaggaggatatgggaaatatttcccctcaaccaattttggaaacaaagcacgggagagatcggatttggcgagggggcggcggctgctcgagctcggctgggcggctggaggttgaagaaggcactgtagcgatagggagtcacactagactttttctgcggtttccttcactaggcccgattgaagaagggacacgaatcagactacgacagagagagggagagggctgctggatcggcagggctgaaggagagagatcggccagattcagcccaaggcatagaagaggattttgattttttttttcaatttaaataaatgctgaaatgatctttcatttattaactatacttccaacgctcacataattccaagaaaaatcctgaaaataattggacactcaaagtattcaacaaaattataatcagaccatttaatgattaaaattaggatttagtatttatataattgctaaaatgctctttgtattattaaaattaggatttgagctccgaaaaatacgagaaaattccagagagtataattaatcgtagagaatttaataaaaattaaatctagccattcttaacatttaggaaattttatttcccacatttaactttacttgtaaattaatgaatatttaatataaattgtagaaataatttattaaataatttataaatcctgaaacgaaaatcagggtgtgtgttgatgcgaaaaacacacactggcctgagatatgcttaactctagtgcaggtccaaatcttggtttcgagttcgagggtatgccagttggtttgatcctgcaaccaacaagaaataaagaaacacatttaaatccataaacgatagccgatcgggcagtcaccgatgacatatcaattgtaacttagccgatgtaacgtgaattagatcagcaatgaaatataaggtaaaaggaaggttagacctagtcgatcggctatagatatcaacagtatataatatatacctcaagatatatttaaactaagtgattgggatagatcggacagcttgccgagatagtataaatcacttatgtttaaaagtaacttgaatcagatattatatatgttcatagcatagccggtgttttagatctaacatgtatcggctaatactccgataccactttatactaagataacaatataaacaaaatatattaaacagagatcaatcaagtgttaagatgacttaacagatcaataacaagcttaatatatttaattacagtgatatcttaatataaagggcatatttagcatatcaagtaaacataaaataaggtaagatcggctgaaaccccgatactaccctaatcggcaaccaattaacaggctagaaattataattctaaacacgacttaaacacgacttaatagatcaaacttaactgatacagcattaagtataaaaagaagaacaatatctagacaatcaagtcattggatgattcatagagtggtggatatgctatataatctaagtcaacattgagatctagcttaatcggccgccttccagtgatagatgttagccgatttgaggttagatagcaatattgatctagattatatagaatatatgataacttgacgattcacataaacaagatttgtggacatccctagtattataccatccagtgtccaacgcgaccaccacatactattggagaagtgggatctatacacgcataaatagccactcatcctcaatgtgtccattatcacagttgacaccttttactataataaccggaatgccgagtagtgactgtgagagataaccataagatagcttgccagtccaatccgtcatatgctggtcaatccacatgaaggcggcgaccaaaaacataccccagtaactcgatccaaaagcgctatccccaagtatctcaagcgatcaaaacctgttactcatgcttagctagtccccaggaatgcgactagcctcacactttcatcgcaagccattagtaaacatagcaagtaccataatagggtttaagtgcagcgagatacatgacacataatagggtccgaggtcccaacatacaacacataaatatagcagcgaaagtctcaaatagagttcataagcaaaagataaaaccggtggtgccacaaccccactagggcaaaccaaccgggcaagagccaaactgcaagagatcactcatcgccctcgccgccctcggcagagcaatgaccacacaagaagcataactcataaccggtatcctcacctgaaacagcggcgccgggttaagtacaagattgtactcgcaagtcttacccaaaattaaatatacataagggagagagaagtatgcaagctttctagccaacagtgggtctctaggttcaacatttgcataaagctaattttattgagcaattaatgagtaaaataagcaaggacaagtaaatctagcatcatttttatttatggacagcaagtatataattctgagatgtataagcaaatgagcccaaacggcgctctcattatcaaccatggactaccaaagtccataccaacatggcacaacatggcaacaccaccatcaaatataatcccatccataataatccatatttggtgctaacataactgactaacacatcaagcattgtccataaccgaggacgcggctattcaaatagattatactctgattagaggtgtacaactggacccacatgaaatgaacaaagatcaaatgctacacaccccgtcgagtgtggtacacaagtgattcaagctcattacatgcccattcttagccccaccccaaccacctataacatgctggggttcccgacgacttagtcacgtgcgtgcatgatgtgaccagtggcagtagggtataaggacagcaatatcacaagaactaaatgcataaataggttctacccatacaccataaaccgataatattaatatctaggcaatgcatgcatatatatacgtatagattgcaaccaaatcatttttagagaaagtataggttctatatgcttaggtgcttgccttgctgctgagggtagtcactatcatcctctggatatggctcgttactctccagaatctccgaatctatcgaaaagaagcaatat

SEQ ID NO: 7797 - DNA, 5158 bp, Oryza sativa
cccgggccgcatttgaatttttcttatacgtattttagtggtttgccaatttctttttcaatttttaattaattctattattccttttaaaaaatgatttttatttcgggatgaatttatcaggacgtgacagttagaaagtattaagtatactgcccctgttgagtgtactttttgatcacccgtatagcgaacggccttggagttattaccaccgatcagatcgagtatatatccactgtccgtccctatgaggatgaaacatacttagtacaagggcatatacttaagcatggagccgatggctcattgatatactttttccccggttgtacaaatgaaatcccattacccaatgcggggtatcatttgtacaactgtcaggaactaaccattcccctacagaccatagaagaatcttgtgcaggtacatcttacaggaagacacgcaacagaccaaggcaagagcatgaggagtcatcctcatcgatacctgtgcagatgtacgaggcggactgggagccaacgggagatgcacccggttggacccaggcaccacggcacagcaccggtggttcttcctggcacagtgccaatgagaatcgctggcaagcaccgcacgacgtacactgggggaacgcgcacacccgttcctctggatcaagtgggatgcctcctgcttccaactggtggcgctcgagttcctctcgggacttgggttcctcacgatgaggctggacaccctttatatgcaggcgggtgagaatggcagcaaaatgctgatgctcagttcgtcaacatcaataacctgatgcaacaatagcaggctgatcttcaagcatactttcgcttccaagggttcaatccctacagggacctaagtgaagggctcaattcctttccaattgcatatttggatttccacattgcatcctataaactaaaaatgacataaaaaaatttgcaaaatagaaaataccaaaaatataggttagagtttattatgctaggtaagacaactagttctcttgttgagatgatgaatagtttctctgttttatatctcttatatatgggttcacggttaagtacgctctcaaagattgaataaatagtagccacatattatccgggaacctgaggtaagtgggctgcacttgccgaactaagtctaggttgtcgcgagatgatatagtgataagagttgctatgatcctgttctaagtttgacttaaattccggatgttttattttccaaaatgataaacttaaaagttcctcatttgataaaaattcctaccagagccaaaaattttcatatttgataaaccatatatattttgggcgcttgtacttccattgaactttgtcaaaatcttgagacttgtgtagatacttttcatactctatgatcaagatcatacacccacatatatgcacatgcaaacttctgcactagaagttagcattcattcattccatctatatccatcatgctatcacccaaaatcaagctctccaattatatgctttctccttccaatataatatcctttccaaaaagagataaaaagagggaaaggcatggttaggaaaataaagtcttgctcctcaaaatattgagcatgataaaaaaaatgagtagccatgccccttccaaaaaaagaaatgaatgatcttgggagaagaaagaaagcacaaaggagaagtatttcctttttttttccacattctatttccaccatatagcacacacactttatgcacgatcttgatcttgagtatgtctagtcatctgctctagtctaagttttgacttagtaataaatgcaagtatgctatgtttgatacctaccaagctccacatactaaaccttagagtaggaatcaactaggctacttggtgaggaattcatttatatacactctgagtgatcgagagggtcatttgaggaacttggatttcttttgaaagatcatttgaaaacttccggaataaaaggttgaataaataatgggtgactagtgcttgattgctgttctatcttccaaccgcacaagacaaggtaaagcaatgtctcgcgggaatcagttgtaagggtaagacacgtgtcaaaattatttgatttgagagagtatatctaccttgcacttgtacatttgagaatatacagcatagtagcaactcctgatcaacaatcaagttttgtttccttttgtcctttactcgagacgagcaaaggttcaagcttggggggttttgttgacggtcgttatcgatcagttacgtccgtcaatattactagaataaaagaactagttatgcttgcaatgcatatagtgtaataataaaataaaaactactagtacttggttcactaaccctctgcagagaatgggccataaatggagaaaaatcggcatcaaaaccgtacctctggtgtcttagctttatgaggtgcccagtttcaaaggtacaggaacaggtgtcttctctttaacctgccatacctcctttgtttttggtgcggtcaatggcttcttcgaaactgggaacgcaggttgaccgacctgtgttcctggcttcttgggtgccagcctaaggtatcaacggatcctcatttcttcttgatctttaggaaattcatcatgaaattgctgaaactgtcacgcccggaaaatctatctaaaattccgaacgcttacatgtgtgttaaaccctcgtccaggaatcaactgaggcacacaataacaaattgataatagagtacaaataaataactatttaatattcgcaaataataaattattacagaggtagatagttcctctcaaagaataacattctacgcagcggaaaataaaactataacaaactacggaacagctatggcgactccactccacaggcatcctaaccagaacaagcctaatcctccagatcatcaccttcactgagatactcctcttctgatgaatgaatattgcaagaatgagcatatgacatactcaacaagtcacacagcaaatatgcaagtgcacaggataacaaaggatggcataatatagctcatttgcagaaacagcatttaacgaatatttaagagaatagtaaaacagttgtaataattaatcaatattaaataaacaccatacaacacacccatgttgcataggcccaaccacatttgaacaaccaaccccagttgaacaaattaaacctccaaaccaggaattatccattccaaaccaggagtcaaattaattaccacattattaccattaatgagtagtgtgagactaatcacgaaaaacattgctcaactcacccataaccgcgggtacggctattcgaatagtttaaactctgatcagaggtgtaccactgtacccacaagacacaaccccacatcatgtcaccatgtgcctcaataccaccacggtacctcggaaaggagttgtgacaataccccttgcacaacataacccattacagcgcacctttcctggatcataatcaccccccttataaacaaggcatggactccccagcgacccccgtggacttctcgccacttctcagtctgacgcactataatgaatcacgctatacaaaagataaagccgttgcccacgctggcttgtggttggcacgataaatgtttcacaacagtagctcgcgaaccggtccttaattgtcatgagcacaaccatcaaaaccatatgctcacaacccaccttaaccaggttttaattatcaattaattaacatcacacgattaaccatcgtgagctaccatttaatgtaaccataattaaaacattaatataacatagtttataattaatccctttaattagctatgtttctaggcatggctaagcaaacttacatatagcatttagctgaaccaatccaatatataaggttcatgctaatcaaattataacccataggaaaataaagtcatcttcggccattatttaattgggaaaggttcaccacccgatgacattcgaaaacaatgcatagttgaaataaaataatagctttaaacgggttcaacatgctcaaagggttgtttgggatctgtgtgacttgccttgggcttccgcaaacgcttcggaaccttcctcaaaggaaacgctctcctccggaacgtcggaaactaaagcaattaaacaaaaatcaacaaaacagtacaaaaacaagcataaacagtacatgtggatatttttaacatgtaaatcttgattttagaaaaatttaacaacttgaaccacctaaaacggatctacggttatttagttatgattttccgaagatttaatctattagaaaatcgggaaaaagaaaaaccgatgacgtcatgctgacatcacccaaggcggccgaaccacgatggcgacctcgccggagatagagcggccggctgcggaattggagggcaagaacacgtagaggacgacgagacgaacccaacggtactcaccacaacgacaaacgacgtcggacgacttccggcgacgacggggaacgagcggcggctcgggttgaccgacggcggcgagctacggcggccggcgacgaaggggaaagggcggccgagctactccttgctcctatgcacctaatggcggcgagaaaaggcggcggcgatgacgcaagcggcggcgcggcgcggctgagctccggccggcggcggcggcgtcttgtcacgcgcggcggcggcgctacggagcactagagaccacgagagagggggcaaacgaaagagggcgacgaggtggtcctatttatagccttggattgaagagatcggactcctcccgcaagaaatcggtccgagaaatcaaaaactcggttttggagataaactcgaaaacgagtttgattcagataaaatacccaacgatttgctccgattcttgaggggaaagatagaagagaacgagaggatcaaaacccctcaaaaatccggaagaaatggggccggattgggtgcggatttgaggcggcaaggcggcggctcgggcggctcgggctcggcctgtgccggccggaggttagggacacacccgacaggtgggtcccacctgtcggcggctgaggggaggaggggcgggcggcgtcagctgggccggcttgggccggttc

SEQ ID NO: 7798 - DNA, 7795 bp, Oryza sativa
ccccacaggctgttgaagtcccacattacgaaggaatgtgcttgactttgtcaacacttgggcaacaagatctgtgcaagtcatttcctgctccccttcatgtactggtcttctcaaaatggcttccatatcatcctagcaagacaatgatttgtcaggtttccttcacaatttattttcagtagtttccttcacaatctctactctagtccactttcactatttatttttttcacattgtaaagttacattgtatagcaggttcttgtgtgaagatgatgattaacgggtgcatgaagatgatgattaacgaaataacagttcaatcaatctggagcaatagagagtatacttcaattagatggagaagtccaagttatgtatttgtttatgatattgtagctaaaattgtacattttttttcctgaagttcaccttttcatgtaagatgtaaattaccattcagtgaatgaaatgtgtgatttttcgacaagtccctccctgattttttttatttataatgctaaagtgtgatgcagtctgatgttctccaaataaaattgtggatgccagaattgaggaggtcttctcttgccacgcgtcctacgacctctccgtccaccgctgcggcaccacatctaccccttcgcaccctccctcgccgcatcccgcttccacgtcgacgccgggggcctccttttccaccacaacttcactgcctcgtcttccatcgtcaaggagttcatcctctcggtggacgctgctggcaacacttccgactgtctcatcaacgcaacggcagcaacatgtgcactgtccgcgattttggtcgttaccgagcctggctgcccttccccacccccagcgtggcgccatcccccaccctcgatgaggtgaggcgcaacggtggacggcacggcgcccttcccccactccggcgtcctccttcaccgggaacactcaacccgccgcgacgctctcccctagcccgagaattgcaaagtgtagttaacaactttttcattaatttaaattcatttagggcctcagtcagttcgaagcactaatatatatatatatatatatatatatatatatatatatatatatatatatatatggcaacatatcctatgcacacaagccctcacgtgtacacacgtgtacaccaactaaaaaatgtcaccaaaaaatctagaaaaaatcatacccatactttcaattgtattacacctagggttaaaatcttaacgtcaaattcattatattttagccgtaacaaaaaaaacaaaaaatctgacagttttaaggttgtaattttgtcagaattttatcttttttgttattctctatgtagaatgaatttgaagatgcgactttgcacgtagatgtaacactcatcgaaagcacacgtatgagattttccctagaattttctgtgatagatttttagttggtgtacacggtgtgtacacgcgagggcctgtgtgcatagaatacgctccacatatatatatatatatatatatatatatatatatatatatatatatatatatatatatatatatatatatatatatataaacgtatatgaaattaatagccatcgtagtaaggattaatagccatcgcattaatgacctttaggcactgctgctaataatcctagtacaagaaaatgccatgtcatggatcatccaagaaactagagtaatgatgcctagagtagaaacaaggcaaaagatggcacagatattccagcagctatgctgtcctctcacaatccagaaataaagtgagagcaacgaatgtcagtacaattccaggcaccaagaacagctggaattcgcatatctcaattaaggagtttacacaattgagttcacaattcataattatttcacggctaacacattaggagctgtttaaaaacaacaatttcatcacaactcagattcacatatctcaattactcgacatcactatactcaccatcatcattagggatcataattgtacattcattttcactatcatactgccctaaggtatcatcatcgtcatcatcattgtacaggtcatcttcttcaacttccagatcccgttgcctgcgaatctgatcaactagggactttggtacacttataccatcttcgttgactggttgtttgtcgaccagagatccttccatggtttcaactcgagatatttcctgctcatcatcttggtatgtcagatcaacccctccctcttgcctgtcatcattttcctcctcattcacattccacaagtgccgatgcgaaaatttttgaacaacttccagggttcaccatgcttgttatcatccaagtagaaaacctttgttgcctgtgtggcaagaatgaaagcatcatccttgtaccaacaacttccatggctgatgcttttgaaatatccatcattcttcatcctagactttttgctacaggtatcaaaccaatcacacttgaataacaccactgtcctttgactgtcagcgtcagagttgtactgcaactgtattacttcttttagctgaccataaaagtctatatcttctccattatgtgtgccctcaaccataactccactgttttgtgttcttctactgctctcacgttccacggtgtgatatcggacaccatcaacaatacatcctgaaaatatacgaactctaagaagtggtagacttgccaatgcatataggtcttcatcgatttgttctccattcacaaacctccgagtagcaagctgcagtatatatatatatatatatatatatatatatatatatatatatatatatatattagcaaggtacaccagaaataatgcaagtactagcagactacttaactctaaaaatttgtaaatagatttttccttaggtccattttttatgcacaggttcttccatattggtctacttgttttttagggagaaaaagacattttctcaaaatgattcaggtaacactagcatgaacctgatatttcttacaattagagaaaaaaaatggtgtgacttctctacttaatataccgtatttcctcgtgtgatggtcatcactgaaaactgcagcttcctccaactattgcactagcatgtgcatgaaactccacacagcaccatagccctaccagctcttttgacaggaacaaaatgctatgtggatgtagccacacagcctgacaacaccccacagatgaacaaggacgctggactgggaatctccatcaccaatacgcaacaacaatcatcctatcagacttatatacagggagctatcaggaatgtcatcatggcagaagaggcagctgcacttaatttagtcatctaatctcaaaactaaacatgctgctaataaaatcatttgttgtaaaaaaacaaaaaatgcacacgatgctctattcctctcatgtgcttcattctgccaagcaaggttttcaacagtagaagcaatgatgcatgatagcacagctgcattttattcatgtacatatgtaaatttcatttgcattctcacttcagtaaatgagatatgtatgagatatattcatttgcaatatactggaaatacttaaataatgatatattatcacagagtcaaaactgaaaatacttaaataatgactcacatgtttcctaaaccatcctggaaattccttagcaaggttcccctcaacatcatgactgccagcagtttgtaaatccttcatgtaaatcctacaaacaggtgcacaactcccatgtaagagctaaaattttatatgatacacaaataaaaacaggtgcgctattcaaggacatactctataaatggctcgacctccttagtattgttgaggacataccaaaccatcctatcatactccttctactcatatgtaagccttggtgcccccaacagatttgctccatgctggaaaatagataaaccacatctactcataggaacacgctctttgttcctaccctcacgattgtgcctagtgtcaacatcagcaaaataccttgagcaagcagtcaagcactcatttgcgacatatgcctctgcaatggagccctcaggccttgccatgttccttacaaagcgtttcaaggtcagcaacctacgctctacagggtacatccatccatattgaacaggacctcttaggattgcatcatcaattaaatgaatgcataagtgcaccatcacatcaaaaaaggcaggcgggaaaatcttctcaagcttgcacaatattattgggatttcacctctcatcttgttcaaagcatctaacttcaatttcttagcacaaatttgctggaaaaagttacctaattcagcaattgtttcatatatttccttatgcatgattcctcggagaccggctggtaatatcctttgcagaaggatatgacagtcgtgagttttcaatgcctgtactttgcattcatcaacactaacacaccttgctaagttggaggcatatccatctgggaatttgacattttttatgaaagcacagaaagcttttctctgggctttagtcatcacatatggagcatgtggagcagtgcatgttgaattcccatcatccttcaagtgtaaatttttccttatgcccatatcttctaaatcgagcctcgcagtaacagagtcctttgacttgcctgcgatgtcgagaaatgtaccaagaagggcctcacatatatttttctcgatatgcataacatcaagattgtgtcgtagctttaaattagaccaatatggcaaatcccacagagtcgacctgcgcttccagcattgaccttcttctaccctctttctctttttgttattaggatggttcccaggtcttacatgttccaccctcgccaattgctgcatcaactcatcctgagtaaattcttccggttgcgcacgttcttcagtctgaccattaaaatctttctttctcctccaaatatggtccactggaagaaaacggcgatggccaatgtagcaaatcttgttcctaagtcttttgtagcaaggatttttatcacaacaaacgcaagcatagtagcctctagttactctacctgaaagtgtgctcaatgctggataatcatgaatgcaccatatgattgcagcgtgaagatcaaattctttgccggtcaatgcatccaaagtagggacaccactccaaagatttaacaattcttcaaccagtggctgcaggaagagatccatatcctttccagggcatgtcggaccaagaataagtaggcacatcatgaagttggattgctccatacattgccacggaggaaagttgtaagggataagaaatactggccacatgctatatgaggagctcatcttcccaaatggattaaacccatcagtagcgaggccaagtcggacattccgtgcatcatttgcaaaccattcatactttctatcaaaatctttccatgcctcaccatcagcaggatggctaagctcattgtccactggtttcctcttcaacttgtgccattgtgcctcagctgaaagttctttcgatccaaacatcctcttcaaccttggaatcaaaggaaaatgccttagaaccttttctggaatcttccttcggctatctgcatccttccatcttgaagcaccacatattgggcatgcatcctttttagccaactcctttcggaaaagaacacagttattcggacacacatgtattgactcatatccaagtcctaatgcacgaataaaattcttcgcttcagcataggatgcagggagagaacaatttggaaatgctgaacttaaaaggtcaaaaaaagcactgaatgcaacattgctgattctgtaaaatgacttgatgtggagcaacttcaccacaaaagaaaacctagtatagggaccaccggggtgtagcacctgtttcatctcttctaatatggtggcaaactttgactttgttcttggtccatgattttgatctgggtacagatcctgtaccatacggtacatttgatcatcttctgggtcatccggaggctcattcgtctcaaattcaacattgcagctaacatcttcattcaaatgctcaacattgcagccaatatcttcattcaaatgctcaacatttccagtgacaatgaccaatggttctccatgatgtatccaccgagtgtatgtgttagacatcccgtacataagtaagtcatcctccacacgtcctttatattgatgtaaccgattcaaacacttacgacatgggcataatatcttctgactgccactcaaatttttacaaacaaagtccatgaactcagtgaccccctcccgatgctccttgctaaacaacttacaattcatccaagttctttccatctgttacatattgaaataagacaagcattgaatcaatgactgatcattgcccagactgctattttcctatttctatcacttcaaatctatggtttcagttcaaaatttaaaaccaaaacataagttcttctcatatgtacctttccttcctaattgaaggggatggggcagtctctggtcgacctcacccgccgtcggcagtgatcccaggctagagctcttgggggcttcctagcggttgagcccgtgaagcccagcggccaggatctgcagccagccggcccagccgtcgagatcctagaggcgggggcgggctactgtcgtcggcgtcgggctcttgggggcgttcccagcagttgtgcccatgaagcccggcgtcctggagctgcagcaagctggcatcgagctcctggggatggggtggggcttgggatccagccggcggtgccgggctccagaagccgcgttgggcgaagggcgacggcgtcgagctccaacagccgggcgctacgttggggacagggtggggctacagcctgcggcgttgggctccagcgggagcaatgggaaagggcggcggcgtcgggtccagcaggcgcgatggggaaagggcagtggcggcggcgtcgggtccagcagccgcgatggggaaagggcagcggcgttggtctttgctagatgtgcgttgggattcttatgtctcccagcaatagtctacaagatgaaaagaatcaaagattagctcagtggtttgtctgttacctgggatgccagaggtcgtgtgttcgatccctcctcattgcaagaagcgctacatttttagtcttttcaagttaatattctaacttacacatgggtcccacatgtccacctagacatgctcacgtggctgtgccaaggtgttcttttttaaaaaacaaatgatttttaaattatgacaatcatatttattcacttttgtcatgaactattgtcacaaagaatgggaaaggcacatggtgacattttcttatgactaaattacaacttagtcacaaacgcttgtcatccaaagaaaaattgtcataaaggcatcactactgtgactaaaatgtgttttgtcatatgaattttgtcatagaaggccaaatttcttgtagtggcagggggcggcgactccgggttggcgaggctcgcgacgaggccgactttgccaggcgcggcatcgaggtagggcatcgggcagaggcggcctcggctttgtgcagccttgcagcgggatttgcgggcagggtggcgttgtcggcttggaagcgacgacctcggtctcgcatgctaggtacttgttgaaaagtccagaagggagagagaggaagaggagagaaaactgagattttgagggaaaattttggaataattacattgctcca

SEQ ID NO: 7799 - DNA, 28505 bp, Oryza sativa
acggtgccaaacatttcgaaacggagggagtacattacaattaacatgcatttcaaaccaagatttcataataatgattatttttagagtaaagtacatcactcacaggtcctaagaaaaattatttcacaaccataagtgttgtcattatttatttatggattttacaagttaaatcataggaatgctaaataaacttctaagcatgatttaagaggtagttttgtcaagatcttttccacagaagtgaagagtaccattttacaagttcaacaaaattattttatatttttatcatattccaatatttacttatgcattgtccaagatctagactactaaaaggatacctagatctattcacaattttagaggaaaaaccagtacataagttagccatttttattttacaacattgtagatcacgtttttattaatccatagaaatttggttcagctcaaacggagttcagatgaattttctacacatttttgaagttagtacaatttcagcacatgttgaaaacagttttccattaagagtcctcgaacttcctgaatattacagagtggtcaaggctacagtgttatgtgtcttggtctgttttttgggaaaaaaccctcaagtttatctaattcaccgatgaggtccctggctcgagctcacggggaggcagccatggctgggctcagtctagagcttgccgacggcgaacggaggctcggatggggtcgagttcaacagagaaactgtagaggaggaccatgcgaacacgtaggtgtccgcgctgatgaacaagctacagctacagcggtggtctgtagctcgcgaaaaacaagctacagcggcggtggttcttggtatgtgcatgcgtgtcgagctacagctctgaatgggctatatgggtgcatgcatggggtgttcaggggtatgcagtgtctcaccgtgcagctgaaaggggtcggagaggtccaggaagcatcgacggcgttggagatgcccggcaacacaatgaacacgatgaggacccgagaacgactagatctggccataaaaaccccaaataaacgcttgaatgagctagaacattgcatgcagagtctttttggccaaggtaaaggatctggagctcaccggacagggaggaacaaagccaacgtgtctagatcggggctgaggaaagaaggcgagcgttctccacgcctggagctcggcttgggctgattcttgacggtgttacatctgggaggaagatgaattagaatgagcagcaccaccctgtatctcggcctggaacgtcgggaacactggaagcttgggtgacgcgacgacaccggccgcgctccggggctccaaaaagagatgtgcgttcccagagattcactgcatgaaaatcgatgaaattttgaggggagttagggcatgcataggagagcagggaacgagggttggacggcgaagaagacgaccagaaacacggcggcgacgacgaagttctctcggccagcaaggaggaagaaggaagatgggggcgaaatgaggtgctctcaccttgcgtttatttctctggaagggagtgggaggagtggagaaagtggccagaagcttagaggagaagggagagtaaagagagaggtgtcacacttgtctctctcccttgcatggccaaaacgtggcatggctattcttctgcttgtcccctgagtatgagagggttgggccactgccatgtgggccagggactgctggtgggatccacatgtcaaagagagaggggttggagaggaagagacaagaagaaaagacaaaactaagatttattccctcttctcactcatgacctgctaattcgaattgcttaggaggggattcaaattttggcctctggtccagagatgggtcttggaacatgctttctaatccaattggtttcactaaaaaatgttgagttaaataattctagtgaaaaagtgaattcagttaatctgaaagttagtttgaatttttaggaggtctaaaaagagaggaaaaattccacaaaatttatatttgttggtgataaataaactagtatttgaataaattattaaacatgtacacttctgttcaagttattgttcaaatagaagtggtttcaattttaccgattagagttaattttgttatcgcatatgatcaaattgcaatatagtaaatatgcaatctaaaagacaacaaatgcacttctaaatacctggttatgagctagggctattacaagattagagtatcatgaagatagaaccactaatcccgagaacacaaaccgccataacaagttttaccttgtcgtcggagatcaaactgatgcagcccaactcgaaagcaagaactcatcgaaagtaaacgaaagtgaaaggttggcgatgcgtcgaaagtgttattgaactgattgttactttgttacactggttttgggctacttttatacccaaaatacatgatatgcccttgtcggacacgactcctaactctattacaacttaggaaacaaacaagtccttaaggtggactcttaccgactcaaagtacaagaaaattatataaaatatcctaattaatagatacaaattaccttcttaggactcaatccgtgcgtggcaattgatatgaagcatatcaacccaatccgacaatgtttctatcgccatattgtcggaatcgacttcatcggctaccctgtccgacttaaactctaccaatgtagattgtagccgattcggaccccagccgatgtgtactctatttccgaaactgttaattccctttgattctgcttcggttttatctccaattccgatacttgatttaccaaatttggtcgttaacagtgtgacatgagttgccttgggagagtggatatgctccaagcatccaaggagcatattctccttagcttcatctctttgtgacatgtgtccagtgacggtttcttcagtttaaccggtcataaccgccttgggacaaggataactaccagctgatgaagaattgggctaattgggctagctactggttcggccgaaccaggccgaaccctggccaagcccaatcagcccacaactttgtaggtggacttcttgttgattcctcaatccactgatgtgaattattaggcttgtttactcgtgtgaattctgtattattagcccatctgtccacaagtttgcttctcgatggcttccgattgatcgttcgtttgctttccgtcgattctcctccatttatatgtgcttctcctgcatacatgttagtagcatagtacatagtggaaatagacattttaattggaatttatgcattgcaagcatagctagtcttcattaattgggtaatatggacggtcgaaattgttcgataacgactgtcaacagtgcctagtcctcactgtagccgatatgaatagagatgagcctgtgctatcggctgcagcttatttctagtccaatactttgaatgcttttttattcaaccaaggaccaataacatcaactctcctggatatagtcatgatcatggacttagacatcacatcatcggctaacccagttagtatgaataccaagggcaaattctcttacaaaactaggagcatcggaggttggactggcttcatcacccagaacatgggaactggttctgtaacccctaaggaacacacagcctttctaatgatgtggttggaaaagttcttgttctgtggtccaagttgtggccctactaccaactggcagcacatagccaaagcccttgtagacaagaagcaattccccttgggcaaatatctgctaggctcattgtatcaaactctgaattctgcatcggctaagattgctgtagattctgtcattggcactggtggcccttggtggcttttgcaagtatggctcaaccttcataccatcaaggtggctaaatgtcacaccccgaagttctcctcccaagcctaaatttaatttataaatgaccctaagaaaataccggtgcaaagcaagagtaaaccccttttaaatcaatgcaaataataatcggaattggcatgtggaatttttcttgagttctaaatgtcgaaattcactaacaggatttttagtggaattttcagagctcttgaaataattttaaccaattaaaatggagcaagcaatattttaattccagggaaaatccttttctccttttttatttttctttttccctccctttttcgaatgggccgctggcccatcctctcctttcctccccctcctccctgctgggccggccgcaggccgaggcccagccaagccgcccctccctcctctcccggggtcgcgacaggtggggcccacctgtcgggtccttccccaacctcccgccgctcccgccgcgccaccgcgcccacgtctccgcctcctccgggccacgtcgaccacgcccgcgcgtgcgccgcgttccccgcgcccactcccctctctctcccgttcgcgcccgcgcccgagatggccgggattcgattttcgaatcctgcctctctctcctcccccacttcccccacgttggccggcgaaatcccgcctctcccggccacgtccggccccctctctccctatttaagctctgccgtcgccccctctcgctttttccccatttcgccgaactctcccgagcctcccatcgctcccgcgccgtgcaacctcttgccgccgctgtttccgctactccggccgccgctagccgccgctaggctcgccgccgcaccgcgccgtcgccgccgtcgggttcgcgtggccgagatccaccccgtccacccctccttcgtcgaggtccgccgccggagcgccattcccatcgtgcgacggtgagggttgccatgtccgccgccttcggccgacattcccgtctcctatggcccctctcttcctctcttatctctttcctttcgttctttaggtcgtcccggtcgccgtccgccgcgtgtcgacttccctccatcgctcctcgtcgccggtcgccgccgtcccctccggtgaggactccctcccctttcctttccttccccgattccccgtgcgtcgccgccgctcgcgctcgccgtcgccttcggtcgttgccgccgtccgctgccgccgctttcgcatcgcttttgcgccgtcgcctccgccgccggatgccgtcgccggcaacgcgttcgcgcgcgtgtgctgtcgccgctagccctggccggccggtcggctttgatgccgagccgagcccggcggccgcctttatcgccgcccgtccaatcggcctgagggcgatctgggccgtcggtcccgtggaccggcggtggaccacctgcgtggtcccggtccacggtgaaccgcccccctgagccgctgaccagtgggccccgcttgccggcaccacacccccctccgtgctgacgtcagccctgggaattattgcgcaataaatgatttaaggtttttcttttatagtaataaacacagtgattcttctaaaattcataactaattcatccgagctccgtttaagcccattcaagtctcagtaaatcaagaaaaatgtgtagaatccattaaaaatggttttgttccctgtttcagtagtcttatagtctgtttgcaatgtttgccttgtatgtcgctagattccggttcccccgacgcttcggtgtacttcgaaatagtcgccgaggttcctccagcagcagagcaaggcaagtcatgcttgtcacttgaacatgttgatcctatattgcaaatgctctattgttttctttcaaatattgcattgttttataatgttactatgggatgtttacctattgtcatagccatgctattgttgtaccatgtccctttgtcagcttggggttataacatgactagagattggactagggattgcttagccatgcttagttcaactagttcacaaatggggaagatcctattaatgtttagactgtcggttctaatggtattgttggattagtgccaccgctttggtgttggttaattaaaataaatcacatggtgggctgtgggtgcatggttttgctggtcgcacccatggcagctaaggaccggttcgcgggatgccctggaagaacttatcgtacttactacaagccagcgtgggcaacggctgggcttgtagcgtagctttcctctagccgacgcatccaggcaagggtgggcgtgatggagtttggatgggccctgcgacggcctatgcggcttccggattcacctaggcacgagaggggactgcccgctgccttgcgaggagtgggggtgaaacctgaggtgtggtgtgcttggttagagggggttatgctaatggtcctgtcacgacctctttccggtatgtcatggtggcatgtcagcgcacggaaacgtgtcgtggggctgtgtcttgtgggtacagttgtacacctctgatcagagtaaaactattcaaatagccgtgcccgcggttatgggcggtcaaccagattcaccgtgattagtctcaccctagtgtaatcttttgaatttggatagcttaggtggatggttgggcctgttgcaacatgggatagcgttggacagtggatagttaatattaattaattattacaactgtttaatctttcaacttctgtttataaatgctcactttatgcaaataaaccactttagctcttctttgatgattccctgcatcatgcctctattccagtatgacttgctgagtacagtgggtagtactcagtcttgctctaatttttcccaaccccagagcacgagtatgtgtcagatgaaggtttctccgaggagtaggcttcgtccgtgccgtcgaggatgcctgtggagtggtgttcccgctgcagttctagtcaaggcttagctcctgttgtctttctttctttccgctgcatttatgtaagactttcatgatgtttgtaagacgtggatctgaatgtcaacattgtcgtttgtgtaccccggccggtcctggacggggattttaatgcacattctgcttggaattctattcgcgaatttctgggcgtgacactaaaagaccaactttatctgaagccgatttcccatctatcaatgagccaactgtagttggcgagggtaatgagatcacaagccgtcgatgcatgtcttttggagaagcaacatctacctacaatggatcagagctgtcggctgaactcttcttaaattggtatggcaacttttatgatggatttccaaaggattccaaaatttggtttgcttatgaacatgctgaaaattttgaactcccagccaatttcagatttgatgagatcagccatgaaagatttgaaaaatccagagaagtatttacagctgccatatccccttgcatacttcctgtcggcatccaccaagacagaaatattcaagtttcatatgagttttaccatccgatgagcacggctagacaacttgaaataggtcagctatcaatcggcttatatttcgtggacaagatccagaccaggggagaaatcacatcagccctcatgatggatagactcctgaacatcccagggcccccactaggcagtatggataatattgtgctagccttgatgaggagttcaacttttaaccgatggtgggcagagtggaaaaaacatctttttcaccaatcagcttccatatacctgactaacatgttctgagagatggttccgcaagtaagtattcttccttttgtcaaattctttattgctaaccgatatctcttgatatttggccacttcaattgtttgcagaccacggaatcttcacctcctcatactagccaaagtggagaaaccatctgctatgtcgttattccaattttaagctcattcaacctaagtcattttgtgatttagaagtatcttctttaaaattcaatgaagaatacaattcttagtaattaaatccgattatttaccgcgaattaattacttatagagattacccaaaataatctataattatataaaattttgcaattctacaactaaaagaaatctacaactaaccccaattattttaattttctaaacctccttaatctctccctaatttcaatttacctttcctttttcttttttctctcttcatttctttctttttctctctttttctctctctcccggcttcttcttccctctcggccctctgcctacccgggcggcgacgacgaccgaacaaggggagggggcggcggcttaccgacgacggcggcggcgacggcggcggcgacggcggcgcaaggcggggtgacacatggcgcggcggcacgaagggcggcggcgcggtggagaggaagagaggagaaaagaggggaaaaggggctggggtggtgtgggatggaagggcgaccgggggggagggttatagcgcgcggggaggggcggccggcttaatggcgacgcgacggcgcggcacgtggggctcgagacgacggcgacgggcgagcggcgcgtgacgtgacaggcggggcgactcgacgcgcgcggcggcaaggggctcggcgcgatgggacgggcggcgcggcagtggcgcagggcgacagcgacgagacggccgcgcggcggggcgcaggcgcgaaggcgacgggcggcgatgcgacggcgcgcggcgcgcgggacgcgaggtggcgggcgcgcggcgcgaggcgtgacggcgacgggcgcgcggcgatgggacgtcgacggcgatggacagcgaaggcggctcggggcgcgaggccggctagggcggcgcagcaacgatggcgacggcgcgcggcgcggcagcggcgatgggacacgacggcgatggcgcgcggcgtagcagcggcgacgggacgcgacggcgacgggggcgtggcgctcggggcggctaggcgcacacggcagaggagggggcagggctagggaacctcatcgagcacctactgcacaatgaacagtgctagtcctatttatccctaatttagcctatttcctatataaatttcattctataaatcctaatttttgcacaaatggagtttactcaatatttgtgctattttaaccaaaagattcaccctagattaattttacccatattttatttttatataatttatttgaatttttaattagggccaattcttattccatcgcacttaaatttaattgttaccaatatggttgcgataatattttatttatttctatcctcacctaatctttatttaaaattatatttcaattatttattttgacaatttatttttagggtttattcctaattaattattccttactcacgattaatgaactccgaaatcaaatccaaataaaataggcgaataaaaccggcatgatgcaatttatttaaaaagtttttgaaggtccgtatttttagggttttgattttgttagtcgaattttcagcgtgttaaaataccggggatatataaagaagaatatttcattaattcagaaagtactacagaagagattacaaaagctgctagagccataccgaaactcttccgaagactccgagggactccaaatactattctatttctactccacttagcactaaactattaatactaaagtatgaagaggaaattgcttgcttgagtgtgtgttgaagtgaaatgagctcctctatttatagggccggtatgacggttattgaaaggtgagttgtcggttttgcccctgtaaccgtcattggggatgcatcctggacgtccttgtggagggccgagctgcgccgctgcagccagagttcggttcggccgaaccttggccggcccagcaggcctccaaccttggccagggcactgacaggtgggaccttatgacggttaagcagttaaaaccgtttcccgacggttacacctgacaagtgggccaccatcttatccatggcttgcttgggagtgagttttcctcatttcttttattgtatttggcaattcctgcaaaatgttattttccaagtacaagtggaaatacatattatttagaaataaaatgcattgtaagcatagctaattctccattattttagttaaattgatggtcgaactttgtcggtaacgaccatcaacagagaggattaggtgctaacatttccttggatcaaggcaagttctctcctcccaacctttgaacacattgaatcccatgatttgaggaatgaaaatatttgtttgcaaaagttgcatgtgaacctagactatatcggtatttaaaaatttgaatatggtagctatggccaagttgatgcattccctcctttgaataattgtgttccatgctgtttgtacccttagaaatggttagagtacatcccttgtgctcaaatgagtttatatatgctctatatgcaactacttgcttagccatgcttagaaataagcaaatgcttattccatctacacttcaaatgtgattttaaatatgtggatacttgctggaataaaatgaatgtgatgagtatttgtgaactaaaatgtgtaaaaatgtgattttgacttgggtagcaagtgttgttcatattgtgttagttgcataccgatagggggagtgtttgcccaagtccataaggaccgaacttgtatcaccaacttaaagtaacccgtacgtccacatgtgctagtatgggatggcctaagctaattaatctacttagcatcaagccttgcattctggtaggctagtgtgtatgggttcgaataactcagaggagcttcctatttgccccgacgtggtagtttaggtgactaagcctgttcaatacaacggtattgtgccacgtggtgggttcccatcgtgtccgccaccacggtgttaagtttaaggtgtgggcccaccatttaacggttctaagtattatttccagtatgcctaggatggaggaacacgtatcgtgctggtgcaaagctagatattaagtagtgtaaaggcttcattgtgtcctctagactgtactcaatgtgtagagtatagtggtgtcgacgggtaccggacaaactagagtgattcacatcatgtggataaagctgtacaaactttgcagagtctaaaattaatcgattagccgtgctcacggtcaagagcgatttggtgaagtgtcatgagtatagactctatgttttaaattgtgaacatgtgacatggtttggaaatgatgaaatgtgttgagtagtgtgagtgtggtgatataatgtgacttgttgtcatggatgacaagaagacttcgattatgatggaatttcgatgaactaaatgatgaaaattaaaacttgtttttgttagttgaactgtcaactcttttacaaaagatttgtgaaacaaaacttgctttatgctgaaaatgaactacaaattgccctcctttgaatatatgccttacatgtagtatgttaggattgatttgtgcttgtcagtacattaacttgtttaatgtactgactcttgctgcagatataatctttgcttgcaggtttagacttagcctttaagtgatgcgggttccgattgattcttctaggagttgaacttaatagggtatacccctagtcggtgtgcttgtggattggatagacaagcttccgctattcttatatttatttggccggtcagccattgtttctaatcatagatgtagatgtaattgctttcatctcttatttgtgtttgctatgtatatctatgcttgagatgaaagtgtgaatctagtgcacatcctggggattcacatgagtatgagttaagattatttaagttgttgtagatctttagtcatattgtcaagtctcctgaatgtgtaacacatctggtcgccgccttcgagtggtttgacgagaatatctcaggctgaagttgactggcaggctaaaggcccagcaatgtttcgaataatgttctctcgaggttttaagacgtttcattatgttcattgatgatttgaaatataatcacttcatctttcgaatataatggaaggtcaggacagcctacgacagcattggtatcagagcaagtaccgaccataggaaacccttaagttggtcgtttagaatggattcttaaaattattttgtgggctttgctctcagttacaaattatttgcgaaaaccatattcaaccttatatctcacccttctccagagattactttcccttatgtttctactttgaaattttgaaaattcttatcttgtctttaggatcgaaaccttttaaaagtttgcatctctataaaattgagtttgaaatcacctgttaatctcaactaatcagtcaaaatgtttcgaaaagctttgaaatctatttgcaaactactcctatgtactagcgcggatttgcaaaaaaaattctggaatttgtcaacagttgcattcaacattttgtgtagcccaaaccttaattgataaaatgtgcatcttttcacagtagattgcatatcatggcataaaaattcatatagtaatgcgcagtcccaatatgaaaacagtcggtaacccggttgaaaaatttgtgtagcccaaattataagtgataaaatcttggtttctttaaggtaacttacaatcttgcatacccatcaccccgatttttacccaaagttttgagccttcagaaccttactcaaatattagacgaagacagtaggccgacacattacagcactgcatcattcatccaaaacactgcccgtaagataaaccacctcaccaaaaatcaccatttcttcttgaaccatagacaaatttgttaggatgtcaaaggtaaaatttttcatagcttgtcaaccctaaaacgtagcctttagcttcagcttgcaacactaatctatgaaggactgcatctagcacaaaagttggtttacctcccatctatatgttttgttaataagacctagaacaaacctttattctattttaagggggatagtgtaccttgttcatgtaaacctagaaattaacatgaaaccatttaaaagtaataataggccaggagataaaatcttgaaattggtaaaatgggaatttaattctgactagctagccttaaagaaatggcaaagtatgtaaacacctaggttctttcactaatcctcgttctttatttgttcttgtagatgcctaccatgtatacgccattctactactgcagcgggttcacctggaaactcaacttagcacatgctctggcttatgctgcaatatgcccgtttcacctatccacttgagtaccacatagtactcaacaagtccattggtacctcccaaactgcagtcatggctcgcgtaagcattcggggtagaacacctttagaaagggatcgccaatacactggttatggttgggatagtaagtctgctatgcaaaactgtgcttatgttgctattacccaccttcgctgtgaattatctgagtgggaggaatgaagtcttgtgattttttctctggaagcttcactttctctattgccattctcacttacatatacatgggatgggccctcttcaatagatgggccagcacacaagccacacacacataactagtatatttacgagcccaacactccccctcaagatgggtgatagatatctatcatacccatcttgtcacatgaacaattacactctttaacacttaagccctttgttaaacaatcagcaacttgtccaccagacgttacaaatcctaattccaacactccctagtctagtttttccttgataaagaaacgatctatctccacatgctttgttctatcatattggactggattattagcaatgttaatagctgacttattatcacacaatagcttcatgggagtgttctccaaaattttcagctcaactagaagatttcttaaccacaacaactcacttaaactcactaccattgccctgtattctgcttcagcagttgagcgagacactacggattgtttcttgcttctccaagataccaagttgccaccaacataaacacaatagcctgaagttgaccttctatcatcaagacagctagcccaatctgcatcacaatacccttctatcttaagatgtccatttttcttaaaccataagcctttgcctggacttcccttcagatatctcaagattctatacaccgcctccatatgaccacttcttggatcatgcatatatcgactcaccatactgacagcatatgctatgtcaggtcgtgtatgacatagatatatcagtcttcccaccaatctttggtatcttttcctattcactggatctccagactccgcacataacttatgattttgatcaattggtgtagagactgggcgacatccaagcatacctgtttcactaagcaagtccaatacatattttcgctgtgaaataactatccctctaggagatcttgcaatttcaatacccagaaaatatctcaactggcctaggtccttgacctcaaattctttgcttagattccgtttcaacctagttatctccaagcaatcatttccagtgataaccatatcatcaacatagacagcaagaatggttatatgatctccactatgatgatagaaaactatatgatctccattacattgcttatagtccatagcacacattgcatgcctaaaccgatcaaaccatgctcttggtgactgtttaacaccatacaaagatttcttcaatctcaacacctttcctttagtttgtgaagtggcaaatccaggtgggacatccatatacacctcttcttgaagatctccatgtaagaatgcattcttgacatctaactgatgcaatggccaatcaaaattagctgcacaagatataagagttcttaccatgctcatctttgctactggtgcaaaagtttcatcataatcaattccatatgtttgactatatctcttagccaccaaccttactttgtatctttccacctttccatcaggattttgctttactgtataaacccacttacagttgacaattttcttcccttcaggaaatggtacaagatcccatgttttgttcttttcaggagcctctagttcatctagcatagcttgatgccacctgggatcttgctttgcttctctccaatcctttgggatttgcactgaatctagtgatgctacaaaggccttatatgtggatgacaaggagtcataggaaacatagtggatatattattttcatatcaccctcatcttgagcttcaaaaccataccttagtggaggtttacctgcattgcttctcacactctttctaatggcaattggtaagtcagattcttctctaacttcctcttcttctccccctgactccaaagatccttgctcacggcttacatcttcctctacctgattatcctcttcaacttgttggattactggacaccttgttctccttgtgtatacttgaagatttttctcttcatgtggcttcctccattcttgctcctgtgcaacaggaccacccaagggacatggaattcaaccaaccacaagcttttccttctttggttgttcatctccctttggacccaatatttcatctttcatttagtgaccatcatgaccactagttgaatcatcaagatcaatgaataaagaacttaaatctgtcttctcaccatagaatgggacagattctctaaaagtaacatccatacttacaaaggttcgtcgttctaatggactccaacacttataccccttctggccagatgaatagcctacaaagatgcatttgacagcccgaggatcaagttttccaatggaaggtctatgatctctaacaaaacaagtgcaaccaaacacttttggtggaacaacaaattcattctttccaaatatcatctcacatggtgtcttcattccaagtattcttgatggtgtgcggttgataagataagttgctgtcattactgcctcactccacaagaatttaggtacattcatagtatacatcaatgagcgggctgtctctaagagatgacggtttttcctctcagccaccccattttgtggaggagtatcaggacaagaagtttgatgcaatattccttctgatgaaagaaagctactaaattcattgtttatatactcccctccattatcagttctaataaactggacccgagcattaaaatgatttttaatgtatgcatagaaatttagaaaacatttaagcacctcatccttatgtctcataagatataaccatgtcatgcgagagtagcaatcaataaagttaacaaaatacttcattccactcatagagaccacaggtgaagtccaaacatctgagtgaattagcataaatggtaacatactccggagtcctctactcacatatgatgttcttgtatgttttccatactcacatgcatcacatactaacttatgtttatccactctacttagttctgctgggaacatcttactcatagtttcaaaagatatgtgccccagtcgacaatgcaaaagtaataccttagcctcttcttcacttgtagaagccatcaatgcaagacatacatcttcacttgtcgcctttcgatccaaataccaaagtccatcacgcctgacgtcaatcccaagtttcttccctgtttccctctcctgaattaaacaattctcacgatcaagggagacccgacaattcatatgatcaacaagagaacttatcgaaaccaaattcactggaaaagaagggacatataacactgatgataaagtgattgaaggagtacactgtactgtaccctctcccttaactgggcatgatgtcccatcagcagtttgaattgtttcttttcgtgtaaatgggtatggtttatatgatgcaaattctccacacatacccgtgacatgtctagatgcacccgagtcaagtatccaatttgaatgagaactattgatagacataaatgtttggtttgagttacctgaggaagaatgaacaagattggcaacatcaacatttgtagatccagaacaaccctcttcaagagtgaccacattagctctgtgatcacttctatactcatagcctctacctctattacctctacctgcataacctcttccacctcttgctccacccctatcaccaaatcttcctctcccataactaggcttgcgaggagcgcggcaatcacgtataaggtgccccatttcaccacaattgaagcactccctggtctctttactttgtgcaactacataggtggggcttggtgaagatggtgtggcactaggcaatactttcttcttaagctcctcctgtgccatagctgcaatagcctcatccaaggtaggaagggtggtttgatgaaacattgcatcccttcttccttcaaactccgaatttaagcccttcaagaactcaatgacccttctacgctcaatccattttctcatttttgctatacaatcagggtgctctaacccaagaggatcataatgatccaaatcagaccacaaatgcttcaattcagcaacatattctgcaatagaacgctccccctgtctcaaaacacttatcttctcctgtgcctccaccattaacatcacatttccttctcctgagtagagattagtaagagttttccacatctcacttgcactagagatggtctcaacagttgtagcaatagcagggataagtgaggttaacaaccatgctactactaacgagttggtagtcctccaagtcttccattcaacacttgatatgttctcaggctcctttacctccccagtaacatatgcttctaacccctttgtcttcaaaatcaataaagctcttcttgaccaactcaaataattttttacaccctccaacttaatgtcattttgcatcaactcaattttttgcaccgattcagtatgaggaaccactgcactactcgtagttggagcctcattaaacttctttgtaagcatctctaccaatttacccattacttgttccagtccctgattttcccccattttaatcaagcaatacttgcagtagaaagttccttattctcaccttctataagttgtagcaactccagcaagcagcagctacacaggcaccaaatcctcccttttcctttcaacagcaacagcacaagcacctcacctcctctctgtctcctccctttttttcctttcaacagcacaagcacctccgtcgcacagctcttctctgtctcctctcacagcacaagtaccaaatccaagcagcagcaacagcgccaagcacactaccaacgcacagctcttctctgtctcctctcacagaacaagtaccaaatccaaacagcagcaacagcacaagtacactaccaaatccaagcagcagcaacagcacaagcacacttactcactccttccttcacaagcacaagcacacctagcactgcagccctgctccctccttcacaccggccgcgctgcagcagccgtcgccgtctccggcgtcgacgtggcctctccgcctcaaccgtcgacgctgccgctccacctcagcagtcgacgggtgcagcactcctccgctcacagcgccgccgctacacgtcctccccaacaccagcgtctccctcctcgacgagctccggcgaggctagggtttagccgtcgccagccactagccggttggctctgataccatgaagtcttgtgattttttctctggaagcttcactttctctattgccattctcacttacatatacatgggatgggccctcttcaatagatgggccagcacacaagacacacacagataactagtctatttacagcccaacaaggaattctatacctaccttccatctttagttgagggggctgaacacactacctacccagggctgaatgagataggcataggtctgcacaccccacacctccagctagcaggctttgttcgtgcgctagatatgctttatcgctccacctttgctgagctgcaacgcgtccgcacaagggtagcaactttagaaaggagtatcttgcctaggttttgccagggataccatactccggagttcatgtatggagaagatgctatgcttgctccagcgaggacatacctccacccgtcgggaattacttcgagagaactctacccccccccctccacgttgacgttgttgttatttcttacgatcacagataaatccgcaaacgcacggaatataccgatgtagcacttcacccgggagtattctcatgtatcgatttccacagggaacatgtgtgctatctccggttcaggttcaaccaaggacacgaagctataaataggcaaaggatagagaggtttctccaatgaagaacaatgtccaaggaaatgttagctttaatcataatgcggtacttcgggcactggccagctcgctgctcccagatatcgctctactgcgcacccggacagggaggacttcagtgatcttgaaatgttagctttaatcataatgcggtacttcgggcactagccagctcgctgctcccagatatcgctctactgcgcatccggacagggaggactttagtgatcttgagggctatcatcacctctacacacacctcacacctactgtgggatgcggagaaaacactctgcgtctaagcagattaattacttactttaacgctagctacacactaaagcaaatcactatattttaattgagtataatgaatgatgatcccgtactctaattaggaaataacaagaaataattctcaccgaacaaaactatattactcaaaagatatttctattatagccagagtaataagcagagcagaaagtaaagggacaggattaccgacaactccggaagtcctccaacttcttctactttattctcttcctattctaagtatacaatatagtacaatagagtctcttataattcagctcaagcttagagtatgtgagtgaagtgaagagcagtttacaatttcacatactaaatcgaagagcagtttagtttcgtcacaaccagttttgggcttatgtacatcaccaaactgacaacagcgcatcatagccaacttgaaaatctacgtaagcttgtagcatatattacaaataaaacatgaaatgggttttaaaacttcacatgaaccacacgttttgttctttttatttacgggaaagtgttgcctgaaattctgaaatcacaagcgatgccagcatagcacggtaaaaaaccctaaccactaagtattgcacaagctttaaaatgtaacatcaccttctgcaagcagaaaacctgaaaaggctgaatcttgcttagagattcatgagaaacaatcaattgttttgctttttgcaaggcttgtatctgaacaattcatatcaacactgcaaaatacaaccaaaaattgatgtccttctcacagtgaggatttcaaccagcagcagcactagcccagcagcaggaggccagaacggtagcagcagcagcaaaacggcagaacaaaaagtccagaaatcccaggctcaactgaatttccaatacatcatactattttcagcaggctctggacatgcacaaaaatgacaacggctagtgcatctaaacgaactaagttactgaaataaaaactacagggaacaaaactagtggtagcagcattcgcagctgctgaaggccatctcatccctacagaagaaaatcaggcgatcaataattcaaaatcggttagttgatcaattcgtttgtatataatcatcacttgaacctagccctcatagttttaatgaagcaaataagtaatttaataattaattcacttgccttgcagttagaatataacattccagaaaggaaaatttcattgagttttgcccccaccaccagagcacgctcctgcattacttcctgtgtattaagaagcaaatgttgaataaattgtaaattattattagatcatcatagtacccatattcaattagacatccagaaatataaaatcaagtaatttgaatacctaatagttgcatattaacatcatcgtcctcaaccgtatcagttagaattgaatagggatcaccaaaacctaaaacatcagaattccaaagttcaacataaataagtttatggcccataatataagtagcaatgaacaaggtaggctccataccatctgctcgcatctaatcttgaaggcaaaccaatgcctccacagttccattagccagcctactcctatagtcactaatgattctagatccagtagaaaatgcagaatctgatgcaactgaagatgcagggacagcaagcaaatcaagcgccatgcgtgataatattggatatttgcatgagtttaccctccaccactggagtatgtcaaaatcatcatcagggaaatcattttcttgaggaatatcttcgagatagctagttaactcagtctttctttactcttgctttgatcatgaagatattgcctccagtcagcaaattggctgccaccaacattcactccactagttgatgcttcttgagaattgattgcgcttggaccaccaatttgtgaagaatattcaacaaaccaactgcggactatcctcttaattctagacagatatccatttggaccagttgccttatctccaaaacctgctttcagcctaaactcaaggaatttcaacttaaatctgggataaaaaataacaggaacacaaatctgcaggaactgcagatcccaatatttctgaaattttgtatccattttaaaaaccatgctagcgacaagaacatcctcactgttggactcatttagaagcatcaccttcactttccaaaattcatgaaagtagcgagaaacagtgggatatgatgtcccggaaaccacaacagttgcatcatagaagatcttgagatgtttgcaaagaacttctgcattgtcccaatcaaaaaatagtggagcatcttgaaagtttggatcaaaccgatccaatgaatcaaaagccctcctgaataataaggatgaggaaagcatcaaataggtggaattccaacgagtggacacatcaagtgaaggacgcttctcttcaacaattccgacttgtgcaatgatttcttcaaatttttgctcacatgcttctgatgcttttatatactttacactttcccttatcctagatatggcaccactgacagtactcaatccatcttgaacaataagattaaggatgtgagctgcgcaccggaaatgaaatagctcccctttgcaagacatggcaagcttacccaagagatttcctttcaattccacaaccatagaatcattaacagatgcattgtctactgtaatactgaacaacttactttctatctgccaatcctgaatacactttagaatttcattgaagagagctatactatcatgtgggtacgcacttgagtgaatcttatgatcctcttttgaatattccattcattgtcaatgaagtgacaagttatacacatgtaacctaggttttgattagatgaccacatgtcagccgccagtgaaacccgagaatttgttttcctcagtacctcaaacaaagctaacttttgttcttgataggcagccaagcaatcaccctttatagtaattctggaaagcaccctaaagtacgggttcaagcttgcacaaaatcttctaaaaccagggtgttcaacaaaactgaaaggaagttcttgcaaaacaagcatccttaaaagttctgcacgtgctacatcaggatcaaatttccagtcctttagaacagatgcattaggagatagactggaatgcaaactttcaaccaattgttgcactctaattctcagtggacacttaagtaaatgtctatggcattgacttgtccccgaaccacggttagctttaattaccttactgcaatgaatgcatttcccatagagcacctttccagtagaagaataaaatggtttaaattctttccagattaaagatttgagtgttcttttccctgaatcattaaatcatatctaaaattaatctattgagcacaaacaagaacaggatttgtgctgggactgaactaaaagtttctgctaaaattatactaaaaatttgagctgaaactgaactaagagttgtactgaaactgaactagaaacttatgctgaaaccttaactgaactaaaatgtgttctgaaactgagataaaaatttctgctgaaactgagatgaaaattttcttatgaaactgaaccctaattttctgttgaaactgaactaaaaatctctacagaaactgaactaaacttctactagtaaagattcctgatgaaagtgaactaaaaacttctgctgaaactgaattatcttagctacatgaataaacaggggctaaatgaccaaatctccaaattcagaattagaattgcaggtgcacaaacctactaaaactaaccacagaatgtaagtttaatttgtttgggtggaagataaactacagaattatatatgcaatacatcaagagtaaagaactaaccagaacgatgagtcacaacatgaggtgttgattgagttgactcccttggctgagtttcaacatccagctcaattgggatagcagacggacttgatacgaaccttgccactggagacatagatctagctcttggagactctgcacttggggacatctgaccagcaacttgtgatctctccatgatgacttcattttgggaaataatttgtcgcactcctggagacctgactattggcaatgcaataggtgatcgtcttcgctttgctgttggaggattcgatgctgctaactttcgttttgtagccaataactgtgttgacgatgataggcctcccgaagagccctctgcaatgacctctttgatatgtcctccttgcggaacttcagctaatgatgtcgacatgggagaaaaccaaagtactgcatgtagaacaagatggacaaaattttaaataataaattaccaaaatacttgcataatatatgaacctcagcccatccactcggaaatcaaaaacttcatgacaaactagaatgtgccaaactgaagaccgattataaactaaaagatatgccaaactgtgcgctagtactccctccgtcccaaattataaggccaatatttttttacacggtcttcaatgacatactttgaccattaatttattttatgttatgttcccaacaaatatgaaattagcttcacataaaagtactttaaaagatgaatcttgtaatataacatgcataatacttaacatatatatggttagtacgattattagtcaaaagttaccgagtttgattttccttaaaaagatggcgccctataatttgggacggagggagtaatatttaggacttcacaaaactgaaccgtgcaagcatatatgactacaaaactgaattcattcttcacagactaatgcaatgagtaagaaccaaaaattaacataaccaatagtctcaactcctcaagataaaatcatgtaacatttgcagccaaaacactaatcaaaacacaagaaaaggcaaagactgatacgctctgttaaagctagcagcttgaaatgagatacagatacacgacagcttcagtagcaatcaacttggattgctcatatattctatatatgcctgcggtgtcaaaaaaccatgtagcagtgaaatccaagctttatttctcccagttgcaaatattgcaatcctaaactttagggtacgaagaacaggattaaggatcttttagtttgtaaactgtgtgctatatatctaccaatcatggggacagagatacacatctgtgcatgttcttgaccaggcaccaaaccaagcggatcggataatatccatgagaaatcaaaccaaaaacaaacaagtggattggattgttgccacgagagaatcacacctaaaagttggagatacaaatctcaactatacaaatcacacctaaaatgaagaggcaagaactcacctgagccgagagaggggatagacgaggcgtgccggcgccgcggcggcggaggacgacgagcaaggcagcggcggaggacggcgagcgagcgagcgaggcggcggcagagatggcgagccgctcgatctcgtgtgtggaaacggcgacctagggttggggacatgcagacgagaaatttcagaatattccatccgattcgtagcacgttcaggattaaccatccaattcgcatgtctttcagaatccaccatcacaagagctaatttcttcatttcacgccactccgtccatccgaagcagcaccgtctatccatcagttgccgcgtcctccgtccctcgccattcctcgtcgtcacctccagctccggtcagccaacctcgtcgcacacccgtggtcctgccacataagaggggacggttcctggtgcacatgtcggaggagctcagctatcgccgcgcaggatcgccgccaccgtgtggaccacgcgactagtgcgctatgtcggacgagctctcagtgaggctgagcttgtggatgaccaatagaattgcttcactaatagagcttgtggcagttggggatgacggccgagcatggggatgggcggacggcaccaatggcgatggcggtggacgaactcgggtacgatctagcgacgacggcggacgagctgtcagatcccggggtcaaatgtcaccaaaaatctgcagattcgagcaaatttgggctaagtagctacctaataggattcctaagacagaaattaagctaagaaaattaaaggatgccgcaagataagcaagtaggaactagagtttatatttcttgatccccttttcatccacccagatcgccttttatggagtacggcatctgagtgaggaggctggacaactcagtaggctgtgattacattaagttttggagttttaggacaaagcagtacagacacagtaattactgaaatgaaacagctccctcagatttacatcattgaactggtatcttagcatctgggctgcccattcccgcaactcctatttctctttctgataaacaacttcttcagataagcagggcctgacaatgcctcccccattaagacccaggtcctcatgggttaaaccagggaaaagtcttggatataaaggatgcatcctcccaggtagcagcttctattggtagattctcccaaagtatcttccactgcacaactggagcattgtgtcgagggatcagtcgccgctccaaaacagcaagaggggctgttaatatgttgccatcagaatcaatcagaggaagcccaggttctggaactgccttaggaccaatatggtgtttaagttgactgacatgaaacataggatgtatttgaaaatttggagggagcaataatttataagccacggagccaattttgttcagcactcgaaatggaccataatagcaagagtaaagcttgagagaactatgcaatccaagagcattgtggcgatagggttgcatctttaagtaagccatatcaccaacttgaaatgtcctttcagaacgtttagtatcagcatattgtttcatacgagattgagctttgtccaagcttgccttaacagagtccagcaaagctgcttttgcttgcttcctgtttctgcatccagttaacagtgacgcaggtaaaagagcttcaccaaccataggtggttgctgtccataaagtgcttgataaggagtcatattcagagatgtatggaaattagtattgtaccaccattcagcttgatctagcagagaatgccacttctttggtcgagagaaagtgagacagcgcaagtatgtttccaggcattggttcactcgctcagactgaccatctgactgagggtgatgggttgtgctcaagtgcaactttactccagcatcctcaaagagcttcttccaaacatgtgaagtgaagattctatcacgatcactaactatcacagagggtaatccatggagtcaataaaaatgagtcttaaacaggtcgaccatatgctcggaagtgaaggggtggctcaaagcaacaaagtgagcgtatttagtaatctgtcaacgatcacccatatgacgtccttgttgtcagatttagggagaccctcaatgaaatccatggtaatatgtgtccaggccgtttcaggcaatggaagtggttgcaacaaaccaggaggtaatttgttttcaaacttattcttttggcaggtagggcattctttaacaagggtggcaatgtctgatttcattccaggccagtaaaaaaggagcttgaggcactgataagtagctcgttctccagaatgtccacccaaaggagaagaatgaaatgactctttcaattgttgctgaagaagattggtatccttgcccacatatatcatgtccttataccgcaagattccactgtgcagtgtaaagggaggtcgtgcagtaggatgaatgcttaacttggttatcaatgatttacatttagggtcagctggataagtggccaaaacttgagtgatccattctggaacaatcactattatagcttggagagtctcttgctgtggggctcgagagagggcatcagctgccttgttttctttcccttttttgtactctatcttgtaatcaaaactcatcaatttgatcaataatttgtgttgggtgccatctgtaattttctgttcattaatgtatttgagactggcttgatcagttttgatcagtaaagaggaagccaagaagtaatgcttccacttcttgagtgcttctaatattgcaatggcctctttatcataagtggaaaatccagccgcttttgggcccaaagatttgcttaagtaagcgagaggacggccttgctgcataaggactgccccaatcccatagccactagcatccgtctccaaaatgaaatgaagggaaaagttaggtagtgccaacacaggtgcttgagacaatttatccttaattgtctgaaaggcaagttgctgatcagtctcccattggaactcatttttcttaagagcattgaaaaggggtctgcagataattccaaaatccttgataaatctcctataatatccagccaaaccaagaaagccacgtcgttgagtgacattaaggggtgaaggccactgctgaactgcaactatcttggcaggatcagttgctactccttgttcagaaattatataacccaaatattccacatgttgttggccaaatgtgcacttagagggcttagcaaagaggttgtattttctgagtaactgaaggacgagctggacatgatgagcatggtcctcaatggactgactgaaaatcaggatatcatcaaagaagaccaagacgaatttcctgagataaggactcaatatccggttcataagagcttggaatgtgggtggagcattggtcaaacc

SEQ ID NO: 7800 - DNA, 28358 bp, Oryza sativa
ataaatgcatcgacattcagacagccaacttcagaaattgatacctcctaaaccacttgatataaaatcatgccatctggtcagaagatagatctacacgttatctacaacttttgtatagagacttttcacaggaaaacccattatgttggccggaaaagcagccaaaacagaactgcgcagggggcatatcagcaagaaaaacctggctgaggaataaatcggtggatcccaaacttactcacttccaacacttgatctaaaccctaaaagaaaaccaatacagtgggaaagatcatgtatttgatacctaggcctccttgggaagcggcaatcaaacccctcatttccttcttcacctcgattccctccgcttccttctctccctttcttctccttcccttcttcttcttcccaggtctgcagtagggcaggcatgggggaggtcgaccagagggggaggtgggcgccccagggtaccaaatgacggctagggggaggtgggggggacctcctagggtcttgggggtgtggagggggcagctgggccttgggctggccgaaagctagcccaactagcgtataactattgtttttcttctaattgcaaacaccaaaaaaaaatgtagggaattccaatatatactatacgctattctttttttttctagggcattacacagcatgtcagctctcttgctctcttcctcttctcccatcttttttttctttttttttcgtctctcttttctcctctttttatctttttttatctctttttttagtaaggtgggactaacaccaactttaaaccaagatggccttgattgatggaactcgtcatcacaagctcgtcggcctttccccccacacttggacttttgtgtcgcaagacatcaaaaaccaagtgtgtgatgtcggagtctcctatagagtgttcccataccgaggatcgccaaagtgtaaagttgatgtagctaaccgtgtacttaggcatcgtctgaccctcattcttaatctcaacctgaaatgcttagcgaccaagaatacccgaagatgtatacaatcctaaacataggttcttgcttttattagaaaagaaacttaccgtagtaatctggactatctcctggcagtgctttgattatggtctcaagctcgaccatagggacatcatgctgcaagattagtgccacaaacaaatacaagatttgtagtatttatgataaatataagcatccagaaccacacttctaaacatgttagaaatgaggaccgtaaggtggttgtggtcctcgcacagagaaacgtcactaatcagacaggactctaggaattccttatgtgagaatgaatcctggggaattttgaaagaaaaactttcatgttcatttgtggaatgttttctctcatcctctagagtcaatgtctcaagcttgtctgtggcctgaagatcctcctcctcaagagatgcatcatgcaagaacatagttgtttcttgatgataaacaagaacaatgttctgtaggctagaaggacaaggcttacgcttgatcgacgatgatgagagtcgttcagtttcatgaagatggacaatagattcggaagaaatgaatgaaaaaacaaacatcgcctgctcgaacggctcatacttgggatgaggcttctttttgttgaaataattcagggtgtttccattatcttcataacgattatccctgaattggaatggaatttctggaggatgaatttttttcttcctccggctccagcacctagaatgaggattcggcagttgagtcgggtttcgactccacgtgcagaggtttctcacagataatctagacctcccggatggcttcgcttcggcagaaagaatcgttctctaagatgagatctaagagttctctttgttctgcagttgtcttgtgtgcgaacgatcctccagcggaaatatcgagatttgcaacagactccttgtctaatccatactgaaaatgttgtaacaacaaatggtcaggcaaagacaagtctgggctagactaagttaacaatgacaacctggcccaggctgcactgagagattccttcttgttctatcggaaagaaatgatgtctaatcgaagattaattatacgagttaatggaaagaaagcaaggcaaaatttgcactttagctcctcccattgaccgtggaatttcttgacagacatagtgtaccattgcttcacttcatctctaagagaaaaaggaaacaattttcacttcaaagtttcatgtgccattcctacgatcgataggcatgaacacactagctcaaagtcccgaagatggaggtatgggctttcactaataccaccagagaaggtttgctcttgaatcatggctataaagccaggactgatttcgtagccttatgaaaggattggttttgaagaacgagatggctcacaaagatcagcctgaggagcagaaaggttttgaattgtgggttgctccatcaaggaaagggataaaagaagaagaaataaaaaaagatacgaggatgacctagactcggaaaaattagcaaccgttccccggcaacgacgccagaaatgcttgttggtattccttaagaccatagataaatctgcaagcacacggaataccgctgtagtacttcatcttcgggtgacccctaaaggatatcgaacacagggaacgtgtgtaatctacataaatctaagactatctaaggacaacaactaatggtaagcaagctaggctaggctagagaggactttctaagtgttttagttatctagactgagttgaaggtaatttccaatctattgcttcaggcaccgacccctgctggtctgccagcgtggttctggctatagctctatgatgtatctgaatgtggaagattactaggacgcgattcagggctgtcaccacctgtcgcctacctctgacaaatccatgggatacacaacaaacaaaggtaatatctaaactagacaccacgtctaagttataataaaataaagtccactattgcttggtttactaacctcttgcagagaatgagcaataaatggagaagaatcggcatcaaaaccatcgatcaatcaatcggacgatgccgagaaatagacttatagaaagatgggccatgaaaccataattgacacgatcaaattggaccaaaattcataagtctgggtgaaggagagcaagaggaggccactgaccgagtttgggctgggttcggcagaaccaaccgaagcaccattggatccaggttttggatagacggtgtggatggcttccctatggcggttggaggatattaccgacatttccaaccatcattgttcagctataaaaggccttcactccctccatttccaacacacctcaagcaagcaagcttctcatactctctcaagtttagtttagtgctctcaagctagtggagtaagaacagaatagtagtcggagtccggaagtcttcggaagagttcgggtatggctctagttactttcctttgttcttttgtaagactagtatttaatttagaatattcttctgtatacgactatggaattgtaatactttccgattatataaataccagctttacactatgtccgagatattatgattatactgctagcttatctgggagatgcattggtacgggtataatgtttgcatatgcaaatactctatgtcacgatggtgatattagagtaatatttggtagtttaggcgtggtgcttagattactgggtatcattatttggggttatatgctgcggatgagatgtgggccgctgatggtgacagctcagtgcgggtattcctccgcgcgtgtataaaatcctaagttcattccctggggagggtactcctccgtatttagccccggttgtatggtcatgaggggctgtccaaaggaactcggcagtcaggggtggcttctcgaactaccaggatggcatcggaaagggggtattagctagttaatcatatacttaggatgtatgtacactatgtatactagaagtataggaatagattcttttcaatactctttccacttagcttagagatttaatataagagtgagtagcttccggtcctcatggaaagctacactcgttgaggtagaaatcgaagagagcgccaaacttccaggcacacttgcagagcttccgctcattctctacctattctctaatgtacaaaagatataatagagcctcttgtatttcacctcaaagttgtgtgtgctggaatgaagtgagctcctccttttataggctccaaatgaaggttactgctatgggaaatacccaaactaccctccaaccatcattgggatgaaatcaggagcatcgacaaggaagatggcgatcaacggtgacagacatggattagccaaactggtggttcggttgaagcaaaaaaacccacctcctggactctcctttggccaataggttgcttaatgggctcccaacatcctgtactatgagtttgcccaattctaagtggttttgattgacttatggagcttccaatccatgtaaacgcatcctgattgtccgaaggtgtactttgtcgcatgacgggtatgttttctccttaaaatacctacatacacatatttcaccaacagtagtggaaatgattagtaataaaccctaccactaagttgaataccatattttatttcattatatgcaggtgttgatgatcaaatatgatgatttaaggaccgtcatcaatctgctatttgtatatcttgtcagttgcaggatcaaactgactgcgatgcccgcatatcaccaagatttggaactgcactagagctaagcagatctctcaggcagttgtgttcgtcgacttagttcgcgccaacacagacttggcaccattagcaatacgtaatttgttgtgttttgtggaatttttttaacagtagatatttttttatctgaaataaatattaaagtggttgctccggtcattttgatgtcaacaataaaaatattaataaaagaaaattgcaattaattcaagtgtcaagctatattttggatcgctatgcattatactctttggatttctgccaaaagctcattgctttctttctttttagttccaacccaacccgctacctccctctgcttggcctatctctctttgaacccacaagtgtagctgtagcccagctcgtatagccagctatcattttcaacccctggaaaactgtcccgtgttcgtacgataccagaaccgatcctccccatcaaattcggtcgaatctttctcaatctcctaaaattggttgagggttttgatgcactcgatctcctctttccgtttttatcaaaattggagcgaatctgcaaatctcgggataaaaatgatgacttttaaatggagattaaatctagtgattaaagggaaattgaaagggaaaatgatggagaatagtttgagggagtagtgcagaattgatttttgtaatcaattggagaagggaacgcatggagagacagatcgacatgctagcgatgctagggtttggcccgacgaccaaaaaaccggctagcaacgaaaataacttatggaaaaaacccggaaaaaagaagacaagaaaaaagtggatgggaaaaaaagggaaaacggagaaaaaagatggacggaaaaaaaagggaaaaacgaaaaaaagacggactaaaaaaggcaacgaataaaaagcgggtgaaaaaaaaggaaaataaggggaaaaaagactgacaaaaaacccgaaagccttacctaaatgccagtgcgtcacactgggtaaaattttccctacatgtgcgggatgtgaatgatgcctttgacatgttgtctggatggttgcagcgttggaagaacgttcggaagaacaatgcgattgtgtttgcacagaaggcgacggatggaaattttatgtgatgaacggaaatattgatatcttttaagtaggtaagtctaaaaaaaataaatggaattttgtggtaatttatccactttaactatgagaatatagtatgtgttgatacctgaagaaaatacgtggagttaaaccgacgacacacgtcagaattgtgaaaattggtgttattcgtttgcattttatttttcttttttgaaacctttataactttttttgttaaaatttatggtttttttctcattaaatattgaagttaagaattgatggtttttatgttaatattaaaaaagtaaaatagcaaggagatcataccaaattctgttgcacacagggtttcccaaaccgccggggacggggttaccgtgccccgacggtaagcacggttaccgcgcggtaaccgtggcaaaccatacgaaaccatgcaaaatttatcaaaatttcaaattattttttaaatttatttgaatttaaggagattaccgtggtttttctattaccactgtaaccatggtcactggtggttttgcaaacccttgttgcacactaccagcctgaccaggtgccagctctcattttcttgacagccactctctctttctccatgtcttcctctgtctctctctccctcatctatatctatagagcaaccaaatattcagttagcaatttatgttgagcaaccgaataatcagacattatacccgcaccaatgcaattcccagaagatttagctacacagattatactattcatgaatactataaagtcggtacgcatattctaagattggaataaagcacctgaattatataaagaagattattctattgaaagtagaagtcttacaaaagaagaggaaaagatacaagagactttaccgaactccttctgaaggctccgaggactagcagagctattccaattctactccactagcactatactaacactaaacttgtagagaagctttgatctttgctgggaatgaatgagaggaggagctatttataggccatgagttgcatttgggagagtggagatgctccaagcatccaaggagcatattctccttagcttcatctccttgtgacatgtgtccagcgatggtttcttcagtttaactggtcataaccgtcttgggacatggataactaccagctggtgaagaattaggctaattgggctagctactggttcagccgaactaggcccaatcagcccacaactttgcaggtggacttcttgttgattcatcaatccagtgatgtgaattattgggcttgtttactcgtgcgtattttgtgttattggcccatcttttcacaagtttgcttctcgatagctttcgagtgatcgttcgtttgctttctgtcgattctcctctatttatatgtgcttctcctgcgtatatgttagtagcatagtacatagtggaaatagacattttatttggaatttatgcattgcaagcatagctagtcttcagtaattgggaaatattgacggtcgaaattggttgataacgactgtcaacaaaccccccaagcttaaacctttgctcgtcccgagtaaaggacgaaaggaaacaaagacttggttgttgatcaggagttgctactatggtgtatatctagaatgtagaagtgcacagtttgagtactctctctcatgttaagtaaatatgcatagtggcttacccttatgcctaacatttgtggaacacatgcttctcaccaccttaggcaattgagagacagaacagatcatagagcaccattttctttttccttgctcagttttcatcccggatggttttcaaggatttttgcaaataaaaactatgttcctcaaatgattctcttgatcactcaaagtgtatagatattttattcctcacgaaagataatgccctatttgaatcctactctaaggttgaatatgtggagcttggtagggatcaaatgaggcatacttgtattctcataaattactaagtcaaaaatctagactaaagcagatagcaaatcatacttagatcaagatcatgcaaagtgtgtggaatgtgtggtggaaaataaaatttggataaagaaaatgcttctcctttgtgcttatacttctcctccaaattatcctttgtttttcatggagagggtatggctatatattttcatcacgctccatattttgatagagcaagactttattcatcatttttttatagccacacctttctctccctttttcttttctttttgcaaaagatttttctttggagaagaatgcatgaatggagagctttatttgtcgatgatgacatggatatgagtgagatgaatgctaacttccagtgtagaagcttagcatgtgtgcatatgtgggtgtatgatcttgttcataaagtatgaaagatatctacacaagtcacaaaatttgacaaagttcaatggaactacaagtaaccaaatattatataaggttttcaagtgcaaattatatttggctgtggtaggaataaatatatcaaatgaggaactttgaaatttatcattttgaaaaacaaatcatccaaaatttaaatcaagcttggatcaagatttaagcaactctatttcactatatcatatctcacaacagcttaggcttaaatcacgcagtgtgcaactcacatctcttaggttcccggataatggttggctaatcattatttaaaacttgagagagtacttaactatgtacagatacattagagatataaagcagagcaaatattcatcatttcaatgtggagaactaggttttcttacctagcatggtaaaatctatcctatatttttggtattttctattttgcaaatttttatgtttttgagttataaatgcaaatgcaagaattgaaacatgcaagaaaggaaatatgcaagataaatgcagatacaagtcacctttgcgggggagagacttctccccccaagcttgctccttgctcatggtccagagtaagcattgaatccttgatggcggaagtaggcttgcagatcagcttgttgttgttgcatcatattgttgatatttgagaactgtgcatcaacactttgctgctactcctgcgcctggatcacgtgtccttcgagggactgttgtcccagcgagaggaactcgagcaccaccagctggaggttggaggcacgccacttgagcctgctgagttggtgtgcccccagcgcacctcatgaggcatctgccactaggaactgccggcactcggctaggcagatcctccagtgctatgacgtagggcttgggcccagccggaggcatctctagctgatttccagccactctcataagcatgaccgggtggtgagtacgttgaatcctcctgttcatctgctgccattctgcggttactcctatgtgtcgcacctgcacgggattcctctatcgtctgcaggggaatggttagtgcataacagttatacaaatgataccccgggttaggtaacaggatttcatttctacaaccgggttggaagaatactaaggtcacatctgctccatgtttcaaagtatgaccttgcactagatatgattcatttatataaacacgagagactgagatataagcaatttgatcatttgtaataaccccaagccctcttgctatacaagtgatcaaagaagtgcattttataggagcggagacctctatgctctctacccactgcctaatcatgggttgcacaggagaaactctaatcttatgaaccatggcatatataataatcatctcattatcatgaacaggtctaggatctcctctaggaaacaaagtcatggcaatccatttatgtataagtctaagagttggattatggatgtcattggttctgggtttcaacccattgttttccagataacaccaaaatccacatccatacctgttttccggagtagctcaggatcgtatgctcgggtgtgagcgaacgatcggttcttcaacatctggtaggtttgcttctctcgtctgtcgacgaggtcgaggtcgtcatctgtcaggagctgtggaacatcgtccgtgtcctccatcgacatgtcggcggacgaacgatcactcgcattatcggatcgggagccagatcccttaagcaagcgagagagccgtctcctcatgactgcacaaaagcaaggatacaaagcgaactcgagcgggggttagtacgagataaaatacccgccggttagctttgtaccaacagcgacttgcaaatgtagcgaataaaggattttaaatataagacgagcttgcaccagcctggaatgaatttgagagcaaaatagaaattgagaaggagttaaaaattgagttggcaatgagatgaactccttctaccggccatcccctttttatagtgcacctccaacggctataattgtgacagggacccactaaccattggtgtgcaaaagaagggaggtgactattgcctgttgacggtcgtcatcgatcagttacatccgtcaatattaccggaataaatgaagaactagttatgcttgcaatgcatttagtgtcataataaaataaaaaccactagcacttggttcactaaccctttgcagagaatgagccataaatggagaagaatcggcatcaaaacaagcgaataatcaatcggacgatgtcgagaaacagaattgtgtgtagatgggccagaaactcagaattgacacgatcaatttgggccaaaattcacaagtctacaaagagcagaagcaaaggagcccgccagccgaaaatgggctggtttggcctagcccagggttcggccgaacctccctcacggccgttcgatccaggtggacggcttggatcactccccaatgacggttagagggcaatcctgacaattccaactgccataaccgtcattggcagcctatttaaggcattcactccctccatttcttcacacactccaagcatcgaagctctcactctctctcaagtttagtttagtgctcttaagctagtggagtaggaatagaatagtagtcggagtctggaagtctttggaagagttcgggtatggcctctagtagctttcctttcttcttttgcaagactagtatttaatttagaatattcctctatatacgactctagtattgtaatattttccgaatatatgaataccagctttacaatatgtccgagatattatgattatactgctagcttttctaggagatgcattggtacgggtataatgtttgcatatgcaattactctatgtcatgacgatgatattagagtagtatctggtagtttagacgtggtgtctagattactaggtatcattatttggggttatatgctgcggatgagaggtgggccactgatggtgacagctcggtacgggtattcctccttgcgtgtatataatcctaagttaattccctggggagggtactcctccgtatttagccctggttgtatggtcatgacgggctgtcgtaaggaactcggcggtcaggggtggcttctcgaagtaccaggagggcatcagaaagggggtaatagctagttaatcatatatttaggatgtatgtacactatgtatactagaagtataggaatagattcttttctatattctttccacttagcttagagatttaatataggaatgagtagcttgagcttgtgtgtcattctaccctggaattatctttaccccttcttaggcacgactagtacaagtaacatataaatattagtttagttctctctattataatcttcccacgggataaacaaatacgatacccttggaaaactctcaggtgaaatgctacaatggtatatccgtgcgcttgcggataatctctgtaaccataatataccttgactatttctggcgccactgctgggaattatatttctagtaatgtcgttaggaaataccaacaagcatttctggcgccgttgctggggaagatttataagaagagattcctaaaactaatatcttatatttacctctgtatagtcaatatcctttgcaggttaaccttgttgttttcaccctttgttgtgaaaatagggtagtgtataattgtttttgacctgccggaaaacttccaggaaaatccataagtcttcttccgaagcataaaactgcgggttgttcccccgcagaagactcttccgacaaagaagccaaacgtactagcgccaccaactttcaagaccatggctgacaagactcttcgcgagttcgctgctccctcctctaagaatgtggccactgggccgcagctcaatttgggagacatggactttgatctgaagtccagcctcattacgatggcgcaggctagcccattctgtcgcaagccgaacgaggatgctaatgcacacctgcaacaatttctggagatttgcagcacatacactgtgaagggcgtcagtcctgatatcgtcaggctgaggctgttcccattttccctcctcgggaaagcgaagaagtggttctatgccaatcgtgctgtgataaactcttgggaaaaatgttcgacagcattcttgtcaaagttcttcccgatgggcaagattaatgcccttcgtgggtgaatttcgggcttctagcagatgcgggatgagtccattccggaagcatgggaacgtttgcaggaatacgtggccgtctgtcctcatcatggaatgtacgactggctgatcctgcaaaagttttacaatggactcactcccacgtcccgcaaccacctggatgcggcagctggaggagctttcttctctaagatggtcagaggagccatcgacctcatagagaagatagtctctaacatgggttggagcgaggaacggctccaatcccgtcagcgaggaatgcacactgccaaggagacggaaatactcgctgcaaaactcgacctcctaatgaaacgacttgacgaacacgacaagaagccccaatgcaccgtcaaggccttggactcgcacatcacgtgctaagtctgtggcaacacgggacattctgggaatgactgcccagagacccatgaagaggcgatgtacatgggtaacaacaacaacaacaacaataacaacaacaacgggtaccacccgcaaggaggtcaggggtggaaccagccccgtccgtatttccaagaaggcaataaccaagctaatttctctaaccagccttccttgaaggatcttgttttcgcgcaagccaaaactactgacgcacttaataaaaagatggttgctaatgacaagatcttagaaaatataaatgtgaaactagatggctttgcttccgcattccaaaaccagctaagtttcaatgaaatgattgaaacccagttggcacaattagctgctctagttcctacaaatgaatctgggaggattccggggcaacccgaaccctccatagaaaatgttaaggcgatcacgacgaggggaggtaagtccacttgcgatccgccataccctaacaatgcaggtactagcagcaacagcagggaaacaccgtctgacgcagcggctgaagaagaaattcagccagagaagaccgtgccgcagcattactgcgacacgaggttgctgccattcccccagaggatgaggaagccgtcagtggacgagcagttcgctcgtttcattgaggtgatctagaagattcacatcaacgtccgttgttggacgctatgcaagtgccaacatatgcacgttatctcaaagacatcctcaacaacaagtgaccactaccgacgaccgaggtggtcaagctgacagaggaatgcagcaacgcgatcctccacaaactcccggagaagaagaaagattcggggtgtcccacaatcacttgctcaatctagacacaaaaattcgaccaggcactctgcgaccttggggcaagtgtaagcgtcatgcccaaggacgtcttcgacaaactcaactttacggtgttggcaccaacaccgatgcgccttcagctggctgactcgtcggtccgctacctagccgggatagcagaagacgtgccggtaaagatacgggattgctttatcccggtcgatttcgtggtgctggacatggacaccggtaaggagactccgctcatcctgggcgtccattcctgagtaccgcagaggcaaacattgatgtcggaacaagaagcatccgtttccacatcaatggaaaggaggagaagttcgagttccagccgaggacgaaacaatgctccatggtccggttaaagtacgggccagccccgtagaatattcagacggtcaaagtggagccacccaaaatggacagcctcatcgctttcatgaagaaatctctggagatacaaccttccaggatgaggtcccgttattggaagacaccggcctagaaggaagagaaaccggctcaaaagaagccgccgcccataccaaggacaaataaggtatggtggctgaaacagaagacgcccgctccatcacctccggagacgggtgaaaaatccatgaaatgaacgccggaggtacggtcttgcacgtcggacttgaaatgacgccgccctcgccaataggtaaattggtatgtatcctcatatttattttcaccaatttgatttctgcatcatcaaagcatgtttgaatttctcaaaatttgcatttaggtttgaattttgaggcaaatattcaaaatgaatttttcagagcaaaattttcaatcaaaatttagtttgccacgaccacactggccgttggaacccaacggttaaaagtggggccggttgggcccactaggggttcggccgaaccggccaggcaacggtcggccgccacttttggcagaccaacggctagtgggacccacatgacagtttcgaccgttgttggtgccctatataagccaaccggtcgagagagaggaatccaccccatttcaactcattttcatttcctctccaactttgctctcaaaatccatttcaagttttgcaagcttgtctcaaaatcaaacactttagttgcatacacaagttgtttcgttgaagctaaccggtgggtagaacttcttgctatcctaacccccgccgagttagtccattcttatttgtgcagaacgaggcgatggttgtcccgtctgttcaagaagggatctggctcttcatcgggaacgaccaccgacatatcgatggaagacaccgacataccgacaagcctcttgaccgacaccaacctcaaccttatcggtgatcaggaattacaagcctaccatatgctgaaggaccggaagttcagccacactcgggcgtacgatccggaacttctgaggaaaacaggtatggatagtgattttcatgccatttggaatgctgtaatttggcagagatttgcagtagtagatgaaccaggttctcatttgcttaatatacaatttctgtgcactttgaaagaatcagaagatggcatatcctttcttttttccgtaaagagtatacgctttcatggaaaggattaagtacacttcttggttttcacgataactgtaaaaccgatcttcagaaaggaattcccgggttcaagaaaaacagattttgggaagacatttctggtgctccaacttgcagacgtcctaggacaaatgacatccataatcctacacttagacttatgcacaaatggattgctatgactttgtgtagacccccgtttttataacaggaatcaatcgtgtaaacagtaccatttccctggatcaagtagtctggtacacacgaattcatagctgaaataccaagtgcacatacacgagtgtctaatacgaattattacatcataagcccgcaggcatagtcttaaatcatcggaccgagcggtccggaatacatccaaaagcagaaatagataaggcagcggaattcaggcagcggcatgccattgccacaggcaacaaccgtactaagacctactgagcgccatcgtcttcatctccctcctggtagtaggcatagggatcctccgaggcttcatctcccgcttctgattaattttatatttgcaagggtgagtactaaccgtactcagcaagccatcatagcaatgatgcacatgacagaggaattcaaaggatggctatggttctttttgcataaagcaagttttgtaattcttttcacaagcctaagacctagcatagactgttcaagttttaataccagtgttcatattaaataatgacggttctgtccaccatccattgtgatcccaaggatagcttcccgccattgagtcgttatggttttctgaggacgtccacattcccgcctcttaggaagtggctccatcagcataaaaattcatcatgcaatatcccatcccacacaagttaagaatttagagtctagccaagtgtaatacatgtcccggtgctcaataaccgcgagcacggctattcgaatagatttggtttactcacactgcagtggatgtacactttacccgcactccgcgactacccaacacatgagcctcgtcccaacacatgagacacgtcacggcaaagcttttcgataacctcgcattggcagtacccgctccatgaacttaaatcctcatgcactctaggcgtccatgtttctagcagtgagaggagttctggcgctcccggggaaagagaagtctcacacgtatattaaattatggttcaagttaagttctctctctcacacactcatggcagtcctaccaatggcaacaccgatgtagggtacgcctctcggccctacctcaacggctgtcccatcgtagcgcacctgcctcaatcaggggtgaaccatctatgcagggatactgcctccacttggctatctaatctgctaggtctatacccattcgagaagtacggttgtacggggggtcgtttcatgcttaacttcatggctcggtccttaattgactggggacggtactagccttttccagataccacccaaatcctccgtccgccccagtcgaaaatagttgttttaattttatttctcctttcacaaatcatgtcatcaacatcatggcaatgtggcgctcatgtctccacatgccgcatctcaattaccttcccgaaggtaattgcccaagcatatagcatttgataaatatgagtatgcatgattctagaatagcatttctaagcaattgtcatagttgactagggactcatacgtaagcatggttacaaagatttaagggtaaacaataatcaaggcatggcataatcacaagtaggatgttcattatttcatgcaatttttatttgtaaacaaaacaatttcgtaattaggatcaacatgttcgaggaatagtgatgacttgccttgctcagagtcttgcgggtctcggccttcgcttggatccgcaactccctcgggctctatagttacgtgcaaaaattgatttgaattcggttagaattcaaataaaaatccaaataaatccaaatgaaagtcgaatgtgaaagtcgattcctttttattaactttactatctgcgaactacggcaaacccaatttcgacttaaactattttgcgggcagaaatattttgttgtcataagtttttaatttactcttcccgagcattatatccatataataggttagaaatttctattaagagctaaatatcggaggaaatcctagaaatattatacaatttaatttattctatgactaaacgattaaatataatatgcggctaagattcttagtaattaaatccgaatttctaccgtgaaccgatgacttatagagattaccaaaaataatctataataatctataagaattcatctaattgtttagttattaattatatctaaattactaccaattttaatctaatctgatcaagaaacatattttataattaactcggaatttcgatcgaaatactattacgctcgaggaatttccaaaaataatctatgattaaccccgaccatttttatttcctaaatcctcctaatttctcccccaatttcccttctattttctccttttcttcttttctattttcccaatttttctctcctctttttctttttctctcttttctctccctctctttctttttctctcttttctctccctctctttctttttctctgccagcctctcttttctttttcttttctttttttttccttctcttctctcctcccggctcctttctttcttcccttctcttcctctatcctctttcggctccttctcctcctctctctcgtcctgcctaccgcgaccggctgaggaaaggaaaaaggcggcggcggcatggcttaccggcggcaacggcaatggcgcggcgcacggtggctgcgacggcggcggcgcacggcgactgcgatggcggcggggaacgcggcacggccaaggcgcggcgcggcggctctatgcgacgacgcggcggcgtggaggcggcgtggtggggtgggtagaggagaggaggtgaggatggagggaaagagtgggagtagggggggattatataagggaaggggaaagagataatagggaagagggaagaggggccgcccctcatggctgccgcagcgtggcgctgcacgcggctcgacgcggcgatgggacgacgacgcggcgcggcagggcgcgggacgcgaggagcggcagcggcgacgcgacggccgaacggcgacggcgcgaggcgatggaacgggcggcgcggcgcggtagcagcggcggcacggggctcggggaagcagcgcggcacggggcgcgaggcggcgggctcgcggcgcgaggcgacgagacggcacgcagcgcggcaatggcacggctcgaggcggcgatggaacgcgcacgcggcgacgggatggcgacggcgacggcgcggcaaaggtggcgcgcggcacgaggcagcgatgggatgcacgcgcagcgcggggcgggacgcgacggcgacggcgcggccgcggccatgagatggcgatggcgacggtggcgcggcggcaggcgacgagggcgacggcgcgcggcggctagcgacgatggcgacggtgcgcggcggctcggggcgcgaggcggcaacgcgcggtgacggtggcgacagagacagggggaaaaaggaggagctgggttaggggaccccgtcgaacactttaggtgcaatgaacagtgccgttttctaattaacccgattttagtgtaatttccgtataaatttgattccacaattcttaattttgcatatatgcattttactcaatatttgtgttatcttaactaatgaattcaccctagattaatattactcatattttatttttatgtaatttatttgagttttaattagggttaattcttattccatcgtatttaaatttaattgatccaaatatggtcgcgataatattttatttatttctatcccacctaatctttattttgtatttattttaccaatttgtttttaaggtttattcctaattaactattctttactcacgattaataatcttcgagatcaaattcagataaaatagacgaataagatcggcatgatgtaattagtttaaaaagtttttgaaaatccgtatttttagagttttgattttgtcggtcgaattttcagggtgttacactttgtttcctagaggtgatctttgacccattcaaggagatgaattgattatcatgtttgccatggttagaaaaattaaaattgctcctgttaaatgtatgattaggcaatggttagtgtcgcgaccgagaaaattgcattttcccgaacgctagtgtattaatccccgtcccaggaaaagccggggtacaccatacaaacatgatataaaagacacatctgtattatatcgataatatttacattattacaaaggcacttaaggcctgacaatcaaaaataaacagcagcggactagcgggcctactgctccatcttcacaggcgctcaactggggtataagccaggactccacctaagacttcttctccaaagcttctcttactgaagaggggaaagattgagcaagaatgagtacaaccacagtactcaacaagtcacaccggcagatgcatgattaatgcaagggggtacaaggggataataataggggttaagttttgcagtaaacagcatttaaaagtcacttagttgcccaaagccattttataaagacgatcctagagttacacagtgttattaatcaaggccgtgaacccacacgaacctgccttaacccaaggcctacgatgattcagaccgaactagcaacccgaccctgggtcccagctcgtcccaagccaacccaggccaaccattccatattttagttgttaagcaaattttaggaattaaaacgctaacttgggtacattgctcggcttgcccataaccgagggcgcggctattcgaatagattatactctgatcagaggtgtacaactttacccacaagacacatcttcctcacgtgcaaccacgtgccacataccaccacggtatacaggcggaagacgtgacatagtttccaacccatcctagccatagagaagagtaccgacccaatcccacctacggccggaacctccgggacaggcaggcaggactgagcccccagcagcagggcaccaaccctgtaccatgacatctcgactaccgggccgcagctcgtgtagccttcatttgccctggagaatgtccatcgacccccgacttcatccacctccaatccgtgtacttttgtttataacttgactgagccacaaactaagccttacccactagacatgtggaagtacggtagtgctttgcaacagaggcccgaagaccggtctttatatggccgaggtgctactatcaaaaccatgcaccccgagcccagcctaaaaccattttggggattttgaatagagggggcggtgtgaatccaattccacaataaaccaacaattccaaagtgtccaagtgatatgagaattccccaagtctaaagttataaaaccacctaatgttgtctaattaaacagcgaagcatctacctaaaatcatactagtggtaccatgagtagagtatccactagttggggttttgtttaatctagggtggacaaggtaataataacaataacaacaataatacggtcataacaaaggtaaataggcatggctaagtaaaaccgtgataacgcgggaatttaaataaagcgataatgcaataatttaaatcaaaataattttataaactgggattcaatatgttcaaggatgatgtgacttgccttgctcactttcccaaacgccggcttcaacttccacgaagagcggatcttccgaagctgcagcgtctacacgaccaacggaaaagaaaaggcttttacgctaataaattccacataacagcagaaacaaagcacaaaaatgggttcttgacttcttaaggaaaaattagagacttgaacggtccaattccgagttcaaatggccaagttatggccatttgaagtttatatgttctttaaatggatatttgcgaatttcttcatttaaattttaatttaaaatcgaattattgcgtcagccgggagagagggcgcgcggaccgggtccacgggagtgggacccacgcggcagcctctcggtccacggtggaccgggtgcacgcggctggcgccgtgggtcccacgcgtcagccgcacccgcgggcgcgggcggctgacggccgggccccacctggcagccgcggggcgcgcccgaaggcggcctcgccggcacggccgacgggaggcggcgcgcccgtgccccgatggtcaccgccggcgaccaccggcgcggcggagcggcgcccgagagagaggagagaagagggaagcgaagcggcggtcttcggctcaccccgggtcgacggcggcgacggaaacggcgaccgaagcggaggaaggcggcggcgcggttcgggtcaacgaggacggcggtgctccggcggtcggcgggcgaaacggaggagcggacgaggtcgacgaggacgcggcgaagccaaaggaggtgacgccgagacgagaggaggtccggggcgacgacagcggcgaaccggagctcggcggcgacggcggagagagaggacgacggcgcgggctcgattccgaaggggagagtgagcggcgagcggcggaaacggaggagggaggcacggggaacgattaaatagcgtcgggagggggagagagcggccgggcgagggggaaacggccgcgaaaggtgcggccgccattgatgccggcgaggtttaggggaaagattccgagcgaatccgagggagagagagagggaaaagtgggggaaaagggagagggaatcacggggaatgattccccccactttattgcgcgcggggacggcgggatgcggcggaatccgcggcggcggcggcgctagggcacgggcgggcggcgggagcggcgcgaggatagggatgacaggcgggccccacctgtcagcgagggtggcgggcgggcccgcccgtcagcggcgcgcgcgcggggagaggccgagtgggccgcggggagaggagagggagggggagggagatgggccgagccggcccaagaggggaaggggggaaaaagaagactttttaggatttttctttttataaaatcattttaactttgtttatttcttaataattattatttgtgctctgagaattccactaaaatttgagggctccttttagaccaaggagaatttaacaaaaaatctccgggccacatttgaatttttcttatacgtattttagtgtttgccaatttcttttcgaattttaattaattctattattccttttagaaaatgatttttatttcgggatgaatttatcaggacgtgacaaatccaccccccttacaagaatctcgtccccgagattcgaggaggctagcatgaagataggttgggcggtcttctcttcttgtctgacttcttccgtcgcgtcttctataacgaacttgcctagcaaaacttctccactctggactgcttggctcgatctcctgttgcggatggaatcttctcttctcctgacttgaaccagggtgcaccttttagctgactcagactaggttgcggtagtttaatgatgcttccgttccagaacttctcatgattcatatcttcggagtcaacctcatacaagttaccacttcatctcatgcgtcaacactagcttgtcattactaggataccatgcttgtcatcatgagaataccatgcttggcgtttccttccagcttaccaccatatgctttagactatgatatcccgcttactaaggataccatgattgacaacttgccattaactatctcatattagctttcctggtctccggtgctaggtacttctgctattcgatgcaagggtcaaccactttaactataagttatgcttcccaagagaaccaatttatcccccttgacatgctttgacgtcttcccgaatgactttgctgctggacttgttattgtctgatcgtgatcctgccaaatctgaagcttcgttgttagaggtgattttaatctgacctctgtagactatcttcgaacatatcacttggttcataactgggaatagctcccacgaacaagcagctcggattcactttctttacattcagtttacttcccattattatcttcaggttgtcctcagttagcattcaacgtattcctttacacctttaaccttgatgtgttctttcccattggatcatctcccaagacatggcattacctggtaaccggtgcttgcacttttcactccgtgtagcatctgatactgagttgaagatttcactccttgccttcatagaaacacttttacctaggtcatcttgcttacttaatgacaaggtgactgttgcggggcaattactatcaggggtcttccttgagcgatgcagagcatgtttctgtttatcaatcacctttcggcctacttctttcatgctggagaacatctttgccaatctcttttatcaatcatctttcggcttatctctaacaggtggtattctttaatgtggattgcggacgcttctggggacgatgaggtcctttggcttgctgcctttcagtgaaaccttgatgtggttcgtcaaaagctgcactgactaccttcagggaaatacattgcttgctatctgtatctatgccactagggtttaattgccgatgatcatctttagtgcttcctcgagatggggagaatccaaattgttcttctgccatatcacctttgacccttttctgatacctgatagactaattaccaaccatcgactactatgctctcaaatattgatgtctcctgggtcttcttaactgtttgcaggtatatccgaacttatcaatgtagaggcatggcgggtacccttatgggtttcatccaacaatccttatcttgatctgtaaaaggcgtatccaaactcctatccccaactactgtctcattggccttttaacccaacacagtttaattgattttcttttccatcaacaggttggttattaactcgaggttagaacatagttcctctgaaatgagaccctaggtctcctttgacagtaaacaattatacacataatcccatatcagcatcttctgaaagagtcctcatagaacttgtctttattacacatttctcccatattacaagaatacgaggcactgccttaaacaaaaagggaaggtgcttaacatcggtacattgtatcttcaacatgaatcatccataagcatagcaagctcactgtttatagacatgaatatatttatgtattacatgattgctgcaaactttcgattacacaatgataggtagcgaactgaaaaccacaaatatggctgctcattttgattctggagagatatagctggcattgttctagtgactgcatccttgattagttctgtgatgatgtgataggactgcatattgctatcattcacaggagaagcttccttctgattgtgggttgaagcggatgacggtcttctgcttggtatcgccctccggaggttgattgccctttgctcggcctggagtaggtcggggagagacacaacttcttccatcgacgacaattctttgctgaggctgtcggtgcagagaatggttggtgctaaaggtattattgctatgatttattgcagagctaggtggagcattggtgctgtggatgatatcgtcgatgttgctgttggagctgactagctgatgagacaatcgtagggttgttcgttggatttctgcggtcttggtcaacaacacactgagttggcaatccttgggcacatggtttgttccttcgcacagaaaacatgtcaccttgcgagtgggacactcccctggtggatggtcttcttcctagtgagtgcagagtgtgagacacatgctagcaacgtgtccaatttctccacaacgggtgcatgcctttgatccgaagaagacatatctgaaactcttagtccaaacaaatgtctctttggttgatcacttgattttcttcgccatcaatcgctaggttatttgattcataatagattatgagcttacggaaatgagaccctaggtccccctaatcaacaacaaaatgtacacaactcacagctcttgcaatcttaacatggatccttcataaacttatcaaactcattcattatctcatgtttctctgttattacatgattgacggggaacaactataaaacaaaagtatttgaacactgatataagagtattatggttgcttctgactagcgctaggcttaacaggtactgcatttgctccagtgaccacttggcgattggcatgtctgtttccttaacaggtactacagttgtaaccgacaataactttcttacgctcgggttcttcatcttgtacttgatttcttggctgctgtgctggaacatccaaaggtacaatgccgatactggcctctgtcttgtcaactggtggctgcggctgaaattgagcattgacaccttgtggtaatgcactagctggagttggagctgttgcaccgcgggctataggactgcttcgggatgcatggatgacaattcgctgaggagcaagcttctgattgcagggagttgcgtggactgacgtgctggcagctatgtttctcggttttgggcacttgtcggcgaaatgacccattccttgacaattgaagcaacagatatcttcccggactcggcattttcttttctcattttgattcctctgtcctggcactggagttaggctgaaactgtaatcttggtgaggatttgtgtggccttgatgcttctctccgttggaactggcaggttggttggccatcttcttcgtcaacagaaaactgaattgacaatcttttggtacatgatcagttccttcacaaaagaaacaagtgatcctgctcgttggacacctgtcgggtggatggtcttcctcacaatgaatgcatgtagtggcacacgagctggcaacatgaccgatttctccacaacgagagcatgccttacgttccattttatcctggttgaaaccttggggagacttctcgtcttcatcatctgaggagacttgatctgaatcttcactatcagacactctacctccattagctaaaagatgctctgtcaactgtggtgcacctcggaaggtatttcttctctgacgttttgtcattcctggtggaggccattctgtgctggtaatgatcatcttacggacttcatcttcggttcgcattggtgtttctcttttctgctgaggacactcccttgcatagtgcccttgctcatcacacataaaacaaatgatacttgcttcttttgagtcaacatgtggcacgtcaccatgggtccttcgggatgctggcggcatgctgacttgtggtgtgggtgcttggactgcctccaactgcacttgaggttgtatctgactcaggttcagaattggcgtctgatgctgctgcagtatctctataagcaatcggttctggttaatcaggtgttggaccagtgtcacacaactggtgtctggtgcttcgttcactcgggagcttgaggtaccaacgtcctgacttctgaccttattgcctttctcattgtcagccatctgttgcaaaggtttggagagggagagagggaaaacaaaggggagagacagattagaaactaaggataggaccttaacagatctaagtcttttgctgttatgatgtatgttaggcttattctgcaagttgattaagcaaacaacctagcatggttacatcacaacccactgatgcaaaccacgcgctacacacacaagcaaggaaacacacgacaaacgaaacactagagggtggcttaggttctgcgacgggttctccaagatcttcgctcctgcttcacagctggcttcactgcttccttcactttactagcggatcctgcagtcttccggagcttcggcagacaattgacaacatcttcttctccacaaagccgaccatctagtactagttgaaatttgaagaaggaagaaagagtaaacgttttgcaaatagcacaggggaaggagaaaaaaggaactttcgcaaataattttatttataaaatatgtccttaggttttatcctcttggcttatcctacagtcgagatggctctgataccagcttgtcgcgaccgagaaaattgcattttcccgaacgctagtgtattaatccccgtcccaggaaaagccggggtacaccatacaaacatgatataaaagacacatctgtattatatcgataatatttacattattacaaaggcacttaaggcctgacaatcaaaaataaacagcagcggactagcgggcctactgctccatcttcacaggcgctcaactggggtataagccaggactccacctaagacttcttctccaaagcttctcttactgaagaggggaaagattgagcaagaatgagtacaaccacagtactcagcaagtcacaccggcagatgcatgattaatgcaagggggtacaaggggataataataggggttaagttttgcagtaaacagcatttaaaagtcacttagttgcccaaagccattttataaagacgatcctagagttacacagtgttattaatcaaggccgtgaacccacacgaacctgccttaacccaaggcctacgatgattcagaccgaactagcaacccgaccctgggtcccagctcgtcccaagccaacccaggccaaccattccatattt

SEQ ID NO: 7801 - DNA, 12037 bp, Oryza sativa
tctacacatgttcaagatttcatcacataatagcctaagattgtctggaaggcaaccatccatggggactaaaaaagtctttttggtgcaaagcagcttctctgaatccgagtcattgagaggcttcatctgatgcacaaccccattataattagacaaaacccacccagaaacctgctcatcgcgagctgtaaacaatattctgctactgcagttattattaggaaatgcacccttgatcatttccaaatctgatccgtcgaatatatcatcaatcaaagcaaagtatctggagggagaatacgaagagagaaaatattaagagaattcgagctctgatgctgctccgtaagagaagttctaaatgagtacagtactatatagcagctgaattaagcaagcagtacatgttgtttacctcttatccttgaggcattctgatatgttgcgagccaacagctctgggtcgtcctccaacatcgtgatttctgagctgttaggtgatgatggtgcctccagttgctccatgatctgcttgaggatggtttgaagaagaagctgcttgctcctgtgagctggcctgcgggataatttagccacaacgtggcactggaaatgagtttggcaccggagtcgacggtggagctccatggcaagagtggtcttgccaatgccggcgggtccagcaatggccatgacccggaggctcttgtcggcggccatgagccatccgagcagctcgtttgccgtgccgtcgatgccaacaagatgatcatggacggcagcagcctcgacttgggctgcttgatgcagtgatggcatgagctccgagcttgggagcttgaggcgtggatcattggagaacacacggtagagatagtacgccttacccggagtgtcatagttgaaagacattgggcggcggaagcaccgcatgggtggttttcgcagcagcgagcgaggtgcttcttctcggtgccgtttacacagaagtttcactatatctatggcgtccctcgtctcgagcttcagcatcataagccaactttcgtgtctatcgatgagatcgactacacaacgatctcatcataagttacacagaagtttcactacacaatgatggaagttcttcccatcgctccctccgacatgatccccggccgcacgcctgcaagactgtacggctatctgtatctggtaaggactcaagactgtacggccgtacgcctggtaagactgtacgcctgcacgactgcgcggcagaacaaaattactgcagcaaacatatgtattgcagatgcatgccgaaatgcatgctagacgataagacgagtactccctccgtcccaaaaaaaaatccaatcctgagtttgaatctggacataatgtatgtctatttcgctaatgtttgcgcgctactaaagcagggaacaccttatctcttccccatccttttgcacccatctccccaccaccagaaacgtcgctttcttcccatctcctcttccaagctggctgcacacgccgcctctgccataagctgcatgcgtcttctacctatcctcttcctcggcaattcgtgggcgagctatctgctcctcttgccgtttttttcctcctctctagcacgacaaacggagtgaaaccgctaataatggtatacgggttgttttcttcttccctttcggtttttcatttttttcagttttttaatatatacatatatcaaccttgtatacgtcttttttttctctcggtttctttgttgtttaaatatgtacgtatacaaacatacaaactttaatttgtatatgtatatatttttttcttatacatcaagattgtataaataaataaatatgtatgtatgtatgtatgtatgtatgcatgcatgcatatactttacatacatacgtatatatgtatatataaatatgtatgcatgcgtgtatgtcgtgcctaacacgcaccgaagcggatgcgtggggaagtgggcgtagtggccgcgagaaatgaggagccgggcacggaggagggaaggataaaaacgactaggaggggttctcttcccctcctttaatcacttcaatacgccgcgtttctgtgccctagctctctccgttctgtgcctcccttgcgccacacgctctcgctcttctcgcctttccttcgccaatgccatgacgtggagctccgtgccactggatggcagaatccagcctccctctcgcattaccaatgagaggtttgtgccagctgttggagggtgaactcctcaagcaggggactaaggagcccccttctagttcggtcggggggcagcgggtgataatcgaggtttggtcgaaggagcgatgcagaaggggtcgggcccttaaagaacgatgagacaaaaggggtttatacaggttcgggccactaagaagcgtaacatcctactcctgtatttggttgattctgtgaggaacacaatgtatcagtcggttgaaatctgagaaatcatcccccttctcactaggcctggatctccttatacctcaaggggttaccacaggggcccaaaaacccacctagagaagaaggaaaacattatttacatttattacatgtcttatccctctgacttggaagaccatgagcacagcgcctcggcatggcccccatcaaatcatgctgaacgatacgggggacgtctgtatcattctgcattaattactgaaaacttccgagcactcgttcccaccagggaacgggtaccctcctccatcggtacacgccatgtgtccattcgcgtggggggattaggatcctctgacgtgaagtcagagggatgtggtcactgacatatggaccccaccactcgcggaccaacatgtcagtgattacgccagggagtagttcacgtcagaggatccggttccgcgcgggagagggacgcgcagacatccgctctaaatagcttttccgatcacccctgggggttgtcctggccagtggccactggggttccacttgcaattcttcaccgctcgaataaaaaaaaaatctccatcggttcttccttactcaggtatctattccctcagtcacagccactggcgattgttttctcgccgaagtcatgccctacgaggaggttacgactagagagagaattgtggcgtgggggagtcactgaaaccgtgaaacgaaagctgattatggatctggtcgtcggcgcgtcgagcggcgccgtgaagtcgctcgtcaacaagctgggcaccctcctggcgcaggagtacaccctcatctccggcgtccgcgacgacatccagtacatcaacgacgagctcgccagcatgcaggccttcctcagcaggctcaagcgggacgtcgcccacgacgagcagcgtcaggactggatgaagcaggtgcgcgaggtcgcctacgacatcgaggactgcgtcgacgacgtccgccaccgcctcggcggcgagccccgcgggaccggcacagttgtctccctcaagaggacgtggtacctgctcaccacgctgtaccagcgctgctgcatcgccaccgacatcggcaacctcaaggtcagggcgcagcatgtcagcgagcggcgcaccaggtacggggtggagaacctcccagcaaacagaaatggtggcggcaacaacaactccggcgctcccggagaccatccagctcctctcccccggctgattggcaccactgaacctgtaggcatggacgacgccatgaacgaccttcaaagatggttcatggtctcaaagcagaacagccaaatcagttaccttgctatcgtcggatccggtgggcttggcaaaaccacactcgcaatgtcattttaccgcaagtttggagatgagtttgattccagagcgttcatgctcgcgtcgcagaagtttcatctcccaacagttttgagaagccttgtcagccagttccatcagaagcaggtcagcgcttctgaggatgctcttcacggaattgaggaatggggagttgaagccctcaagaagaagctcgctgatcaactgcaaggcaagaggtagaggaatggctactatatattacggagtatttattttcattccttcatagtttttcttgacatttctggtttagcacttgagctaatctttggatcagtctcacacaagtttttagtaattaaatagtaacaccgaatttgaattatgatactacctccgtttcaggttataagactttctagcattgcccacatttatatagatattaatgaatctaggcacacatatatatctagattcattaacatatactgtatatgaatatgggcaatgctagaaagagttataatatgaaacggaggaagtagttattactgatttggataaggggtactttctccgttcacaggtaacagtcgttttggatacaaatagtctacaaaatgcaacagcatttttattgtatatatttataaaatccaataactttatgcagaatagaaaaacaaatattgataccaaagttgaaaaggtttaacaacatgttttgtgcctgggaggagtactacttcttcattcttttaagttcaaatattaaacgaagaagctaggtagtataaaatgttatttaaagagcaacttttacagtactttctcaagtactgtaaaatcacactctatttacaactacaagtaccatcaaagcacactctatttacaactacttacttctaaacaattcctgaacaggtaccatatcttgattgatgacatatggtctgtatcagcatgggaaagtattagggattcattacctaagaataataagggtagttgcgtaattgtgactaccaggtttaactctgtagctgaagcctgccgccgtcaaaatggtcatgtgcacaagctcaaacagctcgatccagtgaactccagcaaattgtttcttcaaataatatatgctaatgatccgtgtcccactccaaccattaatgatgagattgtcgtgaaaatgtgtggtggtctgcctttggccataatagtagtgtcagggctcattgctagtgaactgaaatcaaagattggaaagacgttggatcagaaattgattgaagtggagaaggctttaagtgcagagttgggaaacaatctcaccactgaagtagtgcggataattaaccactgctacaaaaatctgccacctgaccttaagacatgtttgctctacttgagtacgtttccgaagggccgcaatattagcaggaaatgtttgataagaagatggattgctgaagggttcgttactgacaaacatgggcagacggcagaagaagttgcagaagacaacttcaatgaactcattggcaggaacttgattcggcctatcaacaacagcagcaatgggaaggtgaagagctgtcaaattcatgacatggtccttgagtacattgtctccaaatctggtgatgagaatttcatcactgtaattggtagccactggcagacaccgtttccaagctacaaggtgcggcggttgtctgtccataaaagtgataggcaagaaactgatctagtagagaggatgaagttgtcgcatgtccgatctttgactgtgttggagagtttcaaagctcttcattctactatgctcaaattccagatactgcaggtgttggatcttgaaggatgcaaggacttgtcgtcaaaccagctcaagaaaatatgtaatatgcatcagatgaagtacctaagcttgcgtgggacggacatatacaagataccgaagaaaataggcaggctggagtatttggaggtacttgacataagggacacggatgtcacaaacttgcctgcatcagtggagaggcttcaacgaatggtccatctattggctggcaataaaaccaagcggagagcattgagattaactgaaggaatcacaaagatgaaaactatacagacactgtctgggattgagatctctggaaggtcaaccaggacagcagctggggagcaggcaccagttcttgaagtcatcagaaatgctacaaccaccgatgccaaggatggagatatcgcgggcttgcaaggtacccgtaaggaaggcagcaaggtggatatgccaaaacaattgcgtccgctagcagccttggagaagctcaccaaccttaagaaacttgccatttacaggcttgttaatttccaagcgaaagatgatgaattgttgctctctgctattgagcatttgagcagttgttctctcaagtttcttgcaattgatgacagtttcacaggctttcttgacagatcactgagttcttcacaagcacaaccagaacacctttacacccttgagctttctggcagcttgtttaaagtgccagaatggattgaccgcttgcacaaccttgagaagcttactctgtccatgacttcacttacgacagatactttggtgactcttagtaggcttcctgagcttttctctctcattttttcacttgatgcagcaaatggtatttcaaatatcctcaaaactgtgcagaagaatacattggagtcaggtggtaaaatctttgtgccggatggggggtttacaaagttgaggttgctccgttttacggcaccagtgctaccacctctgagcttcctagaaggggcaatgccagagcttcagaggcttgagctgaggttcagaatcattgagtttgtatacggcctggaaaacctttcaagtctccaacaggtatttctgacctttagcagccaggcacctgaagatgcgaaagagaaggtctctcagatcaaaggactggcaagcaagattcgaaaggctgattcctccaacattagtgtggtgatagatgagtacaacgaattatcaaaagaacaatagattacctagtcatgatctccacagttggagggaaccagtgtgttatcgatgtgttgtacctactccatctacagtctgtttttgttttatgattttcagatctatttacaattttttgtactgtttttttgttgagctgtggcatctttgttttgtctgctgtactcccaaaactctgctagtgaaaaaaaatatatcttctgttttcctaagaaaactaatcaatataaaggtgtttcaccaattctaataccattggcctacttaaagatgctatttatttgcctcgcaaatttcaacttaaaacaaatatctgttttcagtctctaatggggttcactgatccctgacaattaattattgcctgtagaaggattcactaatccaagttactgccaaaatttttttaaaccaaatttaatttctagtaattccagaattctaattagttcctgtcaagaaaatgaattctagttaaccatgtacttgtgtttattctagtcaacaatgcgtgtaacatgcatttgtttctacatccaaatattccgtaagaaaacaatgtatttacaaatactctaccttactggaatcaacttgtatagtgtcttgattttattttcaacgctaggagttctgcagttttttatttcattggagtgtaacattttttagtttatctattcctacacacaatctgttttacatcctcacagacgtgactaaatcaaccgtcttaactaaatatcaattttagtttttctctgcaattttaatcaggtggttgtggtcttgtggaactgccaacatcaccaattcatttcagttattttttttatgttgctcattttgcaatttcagttcatgtggtgtgtagtttcctagcttgctctgtatcaacctagtcgattaaattactcccttattattctttcgataatgacctctacatccagcatgtatcagaccataaattacccccttgtgttcctagccaccacttagagtagacaagcaaaataagagaactgaatcaatcatgtgtctgcatcgagatgaaaaacctagtaagccgtggtcctcctgatgagccatggtgctcgacctgccgatggttgggtggaggccgacgaaggaagacgtgaaaaggggatccgacctcggaggaggaggaggtgcatgcgcggagatgtagcggcgacgccggcgtggacggcacagggatgccgcgcccgcgcgtgggcaggaggtggagaaggggggcgccggcggggaggacgtgcgccgtgtccctccggtggccggagcggaggaggaaggagaggcggagcagatctgacggcccagattgatcttgcgatattgggccttcaagtgtctcctggcatgatggcagcacccttaaacgggcctccttcatgggcttttgttttggttgtctatgtgggctgtaatttctgtgggccttcacatttgtgggcctctaatggccatggccgtcatgtaatccgtgtggtgagagatgctcgctctcgccgttgccatggcctccaccgccgccgctctccccttatttttcacgaccccacctcctccagtccggtgaccggagaaggggaagaaagaaagcctagaagatccgacggcggcacagattggttggcgctctctcacgcgagtcatacatggtcgccccgctttgcaatgcgtcgagtgggcgaacaggggtgtccggatcgggctggagacgtggagatttgactacgcgcacaaggtgtttgacggaatgacgcacagcttcctagcagtcgaactaccttctgttctggaccttctggtcagtgttgttctacttcgattttactctcagttttgagttgactttatactgcaatgcattccacaagtttgaactgtgtaggtagattttggaacttcaggtttggtttggactttcatgtagaaaattacgactcaatgacagtgtaacacactctagggaatgtaaatcaaatcatagtttacaacagttaacatgatattgaagataaaaaaaatggcacaacagcgacacgcatgactgaacatttacgatatatatcttttttttaagggaaaacagcatatgtgccttttcattaaatatatatcacaatgacataatttataactatagttacatgacacaatttaaagtttatagatgcaagtggctaacagtaatacagaagcgaacgcgagtggcaagttgtgtttcttggctgttcttgtctgcaggctgctattattgtcccggacgtccaatgtatagcaaatcacaataacacaggaatctgttacagattattgacttattacacacgcaatctgcagcatacagctccgaaacaatagtattactcgcagaatcaactttgaacgaacacagcgacacacaaataaaaattacatatacacagtttgctcctgatcatatgtaattacatatatacacagcgaccaacaacaatacagaagcgaccatgagatgtaagagttattatctcaccgctctgtgagatgcattgccatttgccaacaacagtacagaagcttgttcctgctgtctgctcctgaacgagctgaagcaacgcaggctgtcctattgtcttttgacatctctctcacctcaggagtcaggagaggaggacgtcattccctgtggcaacaagtaattaagaagaagttcatcaactaaatttggagttagtttgcaggtagcaatgctagacaggttagcgtgaacagtgattaccttttcaataggagctaggcatggcactctgtttcaccttcatcttctatctcgctctgaaactctgtttctctcctcggtgccgcttcatctgctgcctgaacaacatcctccggcgaattgacttggttgaatcttgttgcaccctctgcctcctcctcaccagcttgattaacttctatttgcatgcctctgatgaaaaggtcaatagggttgcgatgcttggcgacctccttgctcactgcctctactttcctcttaatattggggctgttcatgtaccgtacgttgtagcaaagagctacctctgaaagcattttaaggtttccgatacctgaaggaacactcatctcgctcataggggatgtgtgcaaattcagtcgcagatatgtgagcttcggcatagcctcttcttcgaaggtcagccgtgggacagggcaatcaagggagaatttctctagttctttgaaccctttgctctcaatcactatagcttcttcaggaatgaactccaagcctagtatcaggcgctgtaatttgaccaagcccgcgaggatcttcacatcacctgccacttgtttacagaccgtgatctgcaagaaagtaagatgctcgagcccttcaatccattggggaacattggcgaattttccggctgttactttaaattcatcaagaaatttaggtggatcacttagagaacgcaggaactccatggaacaaccgagcccacaatgaatggttaaggacttaagttgcctccattttcctaaggatgacaatagggcttgttggtaggctttgtcattgcactggtgaaaggcccatgttattgcgaggatcttcaagtcgtgtagatcaccgagatactttactgacctttcggagaattcacttaaatcaatgagaaaatgtttcaacatttttagccgcacaatttgctctggcatgtgctttatttgtgtgcctcttaggtccagcatccgcaaagatcctggctcgcacacttctgatgggatctcacttatgtgggtgtggctgatgtccaatgcattcagggtgcgcagctctttgatttgtggtgggagcttgctgacctttgtgttactgacgctcagataactcagcacaagcattttgcatatctgcagtaggtcctcatccttcaaattctcccagccttgaagatccaacgacaccagatatccaaacttgtctagagggactgttgttctgttgactgcaccagatatgagtagtgaacgagtatgagacaaatccatttcttgcagcatttctgggagctgtggatcgggatggtggagagctagacgacgtgctatccgagtgttcttgccaccacctcttggtgctgagttgagagttgcgctggtaatgacataacccttctctgctgctctgtaagcaagaaacctcagtatgaaaggattgacctgccacaggcacaagtcatcttcatcaagattgtgtccacagttccttgctgctggggtgattatattcctgtcaaccatctcagagaaatgcaactcagacaacagcccttcgtctagccatttcatgacaagacgatccttctcaaacacatatccctgtggcaacatgcttaggtagagtaacgattgtctcaactcatcactgtaatcaaatgatagccagtgttcaaactgtttcagcagcaggcgtacttcttccaccctaggaattgctgagctgccgtgttgctgttgatgttgtttcaaccaatcagccataccagttatgaacgatggtattcctctacatttcatcaatatttcatcacataatagcttcagattttctggagggcaatcgtccatggaaccaaaagcttttatgtggagcagcttctctgaatctgagtgactcagaggcttcatcttatgcacaatcccattataatttgacaaacaccaccctgctatccgctcatcgccagccgtaaacaatattctgctaccacagttattattaggaaatgcacccttgatcaattccaaatctgattcgttgaatatattatcgatcaaagcgaagtatctggagggacaatacgaagagaaaatattaacagaattcgagctctgatgctgtactgtaagagaagtcgtaaataagtagtgctatataattatagcagctgaattaagcaagcagtaaatgttgtttacctcttatccttgaggcgttctgatatgttgcgagccaacagctccaggtcgtcccccaacatcgtgatttctgagctgtttggtgatgatggtgcctccagttgctctatgatctgcttcaggatggtttgaggaa

SEQ ID NO: 7802 - DNA, 2628 bp, Oryza sativa
  unsure (1)..(2628): unsure at all n locations
aaagggcagatttagtatatcaagttaacataaagtaaacataatagccaaattaggtaagatcggctgaacggnnncngggggaaaaatgcggcccttaattcttcttaataataaaaccaaactagatattatgattttaagtattacttaataggttggattcactgaatgaagcattaagtataaatagaagtataagatttaaacaagttgatgaaagtattttgagatggtagatgcactatataatctaagtcaacgttgatatctaactctatcggctgttacctggtagtagatgctagccgatctagggttacatagcaatattgatctagattatatagcacatatgataactcggcaacttacataaacaagattagagtgtcataaagatggaagcactaatcctgagaacgcaagccgccataacaagctttacctcttgtcggagatcgaacccgatgcagcccaactcgaaagcaagaactcgtcgaaaacaaacgaaagtaaaagggtggcaatgcgttgagattgttattgaactgtgcgttaattgattacatgggtttgggctactttaatacctaaagtacacaatatgtccttgtcggacacgactcctaactctattacaacttaggatacaaacaagtccctaaggcggacttttaccgactcaaagtttaaggaaattacaaaaaatattctaattaatagatacaattgtcttcccagaactcaatccatgcgtggcaatccatatgaagcacattaacccgatccgatgacgtatacccagtcatattgtcggaatcggctcaatcgacaaccttggccgactcgaactctaccgatctaggtcgcagccgattcgaacttcagccgactcttgctctgtttccgaaacaatcgatctcttagattccgcttcgattttatcttcatctccgatacttgaattaccaaatttagtcgttaacaacagaacacttgatggagtagatcctttgtcactgggtagagcagattgctcaccgtgacatggagaactctctcgacatcagaagccatggtgagtggctctgataccaagttgtcacgacccgaggccttgacgggataaacaccaccgggaggatagccgggtgacgttggctcctagagaagagatgtagatttaggctagggagaagagcattatcgggagaaaaaagactaattgatattcattgcttaacttgagatgaatacaaaccatcccttatatagagatgatatgacttgacccttaagaaactaactcagactaactctatctaatcttgtcgtatctcctaaccaactgctacagtactcgaggtactgttcatccactaggacttgggcttgtgggcctcggccttctgcccaatgcctatgacactacaacctccttttgagcagcttgtcctcgagctgcaacatatagcagacttctagacgtacacgactccctaaataaaacttaatataattgctgcaactatttgtcccggaggttgtgacccccaagatgcagccctgctcgtcagcatcactccccctcgccaacaacggcgccattgccaggaccagtggaggatcctctggaagcgtaccctgtccctcgctccctggctgttgctgcaatctaatggccacggaccacgtcgacttgaacgacaccgtggagggaatcaccacccatggctggttggggagcaaccccttcttaggtggtcacccatgggtgaccttgatccgcttgcaccacttcaagacttgtggatgtggttgcagtggagaggacagacaacgctgtctgcatgcctccaaacccgccggctgagttggaggtgtagagatcggtgacggcatcaccatgcccactgccatgtcctgctctatggcctcctgcttgctatgccattcctctttcttcaccagtttctcctgaattaaggtcgccaattccttgagaacgaccctcaactcctcgatgcttttaactccttgatcctggttgtggaggtctgttcgtactggagatacaacagccatcgtagatgttgcggccatggaaggctttttgtgcatactctgcatccgcatgagattggaatttaattgaagcctccacatctgttctcatctgctgcatgttgatcttctctgctccataagcataaatgttgatgcgaaaaacatacactggcctgagagatttgcttaactctagtgcaggacctaaatcttgcttttgggtttaagggcgtgccagttggtttgatcctgcaaccaacaagaaacaaacaaaaaaacatagttaaatccataaacggtagccgatcggccacatgctgatgacatatcgtttgtaagttagccgatgtaacgtgaattagatcggcaatgatatataaagcaaaaagaaagttaaatctagtcgatcggctgtagatattaacagtatataatctatagattgaaatatgtttaaaccaagtgattaggatagatcagaccagcttgccgagacagtataaatcacttatgtttaaaagtacttcaatgtaaagattatatatgtttatagcatag

SEQ ID NO: 7803 - DNA, 774 bp, Oryza sativa
ttttaaactgaactgaacacagccttggttgtactctaccggagggcatgaccctgcagcagctacaccaccctaaactagcagctacacacctgtacaccctgcaactttacattacatcattattaacttgcacctgcccaggcaggtatcattacattactacctgcgttttggaagggattttataaacccaaacggacatttcaataccgtatgattaattaagtcttaactactcttttttaaataaatagattaatataatattttaaagcaactttcgtatagaatattattttaaaaacatacaccatttaactgtttgaaaaacgtacaagtgaaaaacaagatgtaaggctgtatttagatccagggttaaaatttttgccgtgtcacatcgtatatacggacacacatttaaaatattaaacgttgtctaataaaaatacaaattacagaatccgtgagtaaaccgcgaatttattaaacctaattaataaatttcgtctcgcggtttacacgtggattatataatttgttttgttattagacgacgtttaatactttaaatatgtgtttatatatccgatgtgatacgctaaaattttataccccaacacaggttgtgtttagttcagcgcaaagtttagattttggttaaaattaaagatgatatgactgaaaagttatgtgtatatgacaagttgatgcgatggaaaatgactagtttgatctacacagccacgtcctcatcctgaattcatgatgcgc

SEQ ID NO: 7804 - DNA, 6678 bp, Oryza sativa
tatgttgagtgatatgacccgaacgaagtacgttctccggcggatcgggatcttcgtcaagcttcgccaagtcgtcgtcactatggattttttgacaagggatacttcaactactttggatctgggaagtcaaacccaaccagagtacgtgccccgacaagatcggaaccatcattgtcaacaatttggtctatcgagatcatccaagcctcaagatacgcggcgtactaaaagacgtcagatcgtataatgtacaatgagtacgcagtaaggtaattggtggattggttttttaaattaatctactaatttcgtagatacatccggcatgtatctataaaagtacgcaatattttatatgcaatttatcgtacatattcagatcatacaacattgtcagatctataatttattatgtttacctagagcatgttttttatacaatatcaattatgcgagtgcttctgatgttaggccaactacggtttaatgctgggggctcgctctattttcttccgtataaatcatgcttgtttacggtttacataatgcctgatatttaatctgctcgttatgtcctgaaaatactagaagattcatgcaattttctaagtacatactcgatatgatctgctatatatcttgccttctagaaaaattttcaggaacaattgagcactcgagtaggttgtggtcaaacacacacaatatcgagaactttatcgataaatgcggagttgtcgcacccaacctaccaacgaagaccgacgacctatctcatagcaccggccatagctgggctattcgagaaaaggttgttaacggataattcctcgtgaacgttgtcggcttgatcacacgacatgattgcgaatggatatccggatatgctataagttgggtatgtgagtcatgctggccacatgagatgcacatgtaataaaccaactttagcgcccctataggtgattgagagacgcctactcgttggttctcaaccagtcaatcgtagcgatctctagcacctcaacttcaatcggtcgagagactcctactcctggttctcgaatcagtaggacgtaacgatctctcgtgccacgacttcagatggtcgaggtacgactacggcaatagcgtagcggtcctcgcaccacgacttcactcggtcgagagatgaggctactcctggttctcgaaccagtaggccgtagcgatctatcgtaccttaacatcactcggtcgagagatgaggctactcctggttctcggaccagtaggctgtagctatctctcgcacctccacttcaagtggttaaggctacacctggttctcgactagcggtgtagcgattctcctactatttccacttcaagtggtcgagttaaggctacacttggttctcgaccagctgctgtaacgattctcccactatttctactttaagtggtcgagttacgactaccacctggttctcgaccagcggtgcagcgattctcctactacatccacttcaagtggtcgagttatgactacccctgatcctcgaccagtggtgtagcgattctcccactacctctactccagcaaagttgatatcaggtacacagtatcgccaagtgttttacccagagatcccttatcacgacaacacctagagttgaaaccaatcctactgtccctttacgccgccctggcaaggcctccgaggaacctaagggaacttcggctggggacgcccagagtggataaggccttgtcaggtaatgcagagacgaacgatcatgtaagatctggtcatgtaagagttctcaccatgcgtattaatcaagccgtgtaatcggaaattgggttttccaacttcacggctaggggctagggtaagtgttttttcaaccaaggcaggtcaagggtccaagagccttatcctccgaaaatgattctccgacaacaaggatgggggctagggagagtgtatgactcaacaaactgactgatcgaagtcggtaaaagagaagacgctcgtacacaaaacattggtctgtaaatttaattcattttcagttttccatacatattataacatgtcaccctttgaacagttttccaccacacatcctatgtcttatacggatacaaccttaggatataggaggagtttcgcataaggaaggatgaatagagttctacatggaaacgacaaggactactcggattgtatcaatattggttttcctagttctacttggataaggggacacctatataggtataaatacaagaccccctaggaggaaaggggacacgcaacaatagatcaacatacaagccaacatacgccaagacaagccgccgaatatcaacatcggagataagcttagtagtccccatacggtacctacgactaccgtcaggagggatctagcactatctttgatctcgccggacatggattcgaggaggaagactaccctgttgtcgattacgtgtctgcacttcagaccgccatattgataacagatagataggctaccccaaatattgttctggtgtgattatgatgaataagagcaacgaccggcttcggccaacaggagtagggttattacctgacaatttaagggcccgaacctgtataagaatcctcgtccctatctcttttacctcagtctcgcatataccctggtgccaatgatccccgtactatgcaaataccggcaaataccatagtcatgacatcagacatcgacaaggctaacaactatccatgtcaattcgtacaaggaagtacatacagtacaagaactaaaaaaaatgcaaaactagaatacaatttctaaatatgcaccgaagtactgtaaaagtgtagaaaaagtacaagactagactaaaattttattagaatacctaatgcgatatgtcttcataattttcactcttcatcaacagaaggtagagaacctgaagctaaatctgaaaaatgatattatataatgtaagtgatacaaattatgagaacttaattatttgtaggttacaaagcaatgcatgacatacctctaggtaatttgtgcttgcgcgtcctcaaagcatgataatgttctataatctgatgatcttcaatgctagtaaaaacatcccgctcaatatagcaaatcatgcagtgattcatccattcatcattcatcttgttccgcagctcagttttaataacattcatagctgagaaggctctttccactgttgccgttgcaacgggcaaaatcaaggctaattcaattaagcgatataccaatggaaaaactgtgtgtctatcagtttggaccatcttagcagcaagtttaccaaggtcagagcagcttgagaaatccaaatcagatctcacattagagataaatgtgtcaagttggtctctaaggactaaacaatcatattcagaaaagtcatctgcataaatcttagcaagttcaatgagcttatcttcatcatagttggcaaaagaattccttggatcaaggcaagcaatacatctcaatagctgagtagacctttcagcaaaacgattgtttaactcaacaataatttgatcaagtaccacattaaatatgcatgtccggccggccgctcgccgccctgcgcagtcgccactctccaatcggcaatcggtgatgtgagagacagggaggagatgaggagagctgagaacgtgagagaagagaaagaatgcgaagcggcgctcggtgatgcgggatacggcgtgatgcgagagagagaggaggtgggattagggtttgtgcatctattgggttgggctgatgggctgctattgggctgagggatgtggggctgaaacaggccatgtgtggggctgggccttggggatttggggaaatctgaaaaaagtcaaggtactagtccactaaaatttttttcacgagtggggcttgcgcccaagctgccctaggcccagttccgcccatgttaagtaagaagcagtatgcacgtactgttttttaaagttagtatagcaatacatactgttttttagtttgatagcagtacatactgtttttagtttaatagcagtatatactgttttttttgttagtaatagtacatacttttttttaagtagcagtatataccggtttttagttagttgaagtacatactttaatagcagtatatactttttttttaattagtagcagtatatactgcattgaagatgttcatctttcctttttttttttgaaggtatacgtttttttatatacctttattggtgaggaacattatataccttttttattcggtagaagtatattttttatttagtagcagtatgtacttgtcatgacacaaaacaataaattttaagcaaagcacatatacgtggtatgatatattgatttttttatgtaagccacatactgaaatagaccggttgtatacctagacctgaaatagagccggtatataccatttagagttcataagtggtatgtgctattttctttttataagtagtatatatatactacaatcctcatcggaggagtatatacccatttttttcagtatatactacccatgaagcaatatatactttttgaaagtacatactgttttttaagttagtaacctcatatgcacctcctaacaaaatgatttcattacgtaaagaaccgggtcaactttattgtagctataattaatgtaacaaacgggaagtaacccactgaatttttgaaacaatttcttgtttccacatgaaattagttgatctcgtagtaacagtaatcaacagcagattaaatagagtacaattatgacgataatggagtaaaattaagaagagatgatggcaaattagatcaatacacgcacacataccaatgactataatctgaaacgaaatcacaacgaatggaaaagcgcgtgtttctaccagacaaatcctgctattcgttggatggtctgccgtgatcttcgatcggagggggacttgccgttgccggtgctgtaggcagtgctgtgatgtcgccggcgccgcttgctgccgttgccgtatgatttcatcaagccgatggatcgtgtcgtcgcctcaggcttgccgatgggctgcgccacgcacgcatggaccctgatcgatcgccgatcgatggatcgcaacgtggccgtggacatcaatcgcgatcgagcgacggcgcccgtggacgtcgatcgaatcgctgccgtcgacgccgagttgtcgaaggatctcgccgtcagctccgacttgctgatggactacaccgtggatgccgagtcgccgattggtctcgccatcgccgctgccaccgaatcatccgtagatcgcgttctcacctaggaacccgatttgttgcgatttggtttagcagtaccgcatgggaacgagagatttattccagcgttcagtataagcgcggcttcacgccacgcccgttaatgtgcacgttttaaaagtaactaaatgaaatgctacaatacagcaatatataatcgagtagatgagtcaggtggtattccaaaggaaaataggacacttttttgggagtgactgtggatcggtcgtccgatcgaaaacttcaaaaatcgggacgtcagcgtccgatttacgtacaaaactattttaaactgatttttctcttaaattacttgtccaaatcatgatctgattgcaccattaaactcgttgcaattaaatcttcaaaacaagaccacacatggatgtattccgacgaaatttttttttacagtagcttattattgtattatttttaaattgtttgcacgatgttccactaggtatatcagaattgtttcactaagatcgaaaatgtttcactcgtttaaatcgggtgttgtttcaccttatataaaaacaatgtttcagtaaatagcgaaagaatgtttcagttcactgcaatattatatctatacatagtgaaacattgtgagtacattgggtgaaacatttttcggtggaacaaaaaaataaaccaaattctcttaatagggggtttccaaaatatgtgagttttttgttgcaatggaatgtttcgttcactgcaacattagatctatacataataaaacattgtgagtatagtgggtgaaacatttttggtggaaaaaataaaccaaatttccttaatagagagtttctaaaatatgtgggtttttattgtaaaagagtattttaattcactgcaacattacatttataaatagtgaaacattgtaaatacactagatgaaacatttttgtgaaaaaatgggagagaagtaagtgagccctgtataggcacatagggggaggggcgctgaataacatgcaccaaatacgctaatgcagatatgacctgaacaaataaataacaaaaaacaaactcttttatcattcattataataaagacaatcgacaactaacaaagagtatctagagggacttacaaactgcactagagcaaagatgaataatatatctctagtaacgaagaaacgaaatttcaatgttcgccatttcctatcagtgtgaacatgaaccctcaaatagtaaggagctttacaagtggtgcaatgcgaaaaggcaaatccttcctgtacatgagacaaagaaaatgccaagcaaagttagttttcttacgaaaca

SEQ ID NO: 7805 - DNA, 6310 bp, Oryza sativa
ttcctgcagccccactgaagcgatctcgaggatgatagcgctacaaacactgtcagggattgggatctgcaagagctcagctggagcacttgcagacatgcacaatctcaccaagctgaagaagctcagcatctataacgtcaaagacttcgacagcaagaacctgagtcatgaattgctgtctgccatcgagtacctaactggctgttcgctcaagtctcttgcaattgatgatggtttcaccggatttcttaatctgatggattctctatccactccaaaatacatccacacactcgagctttcaggcgaactacccagagtgcctaaatggatcagtgagctacaaaacctggagaaattgactttatcattgacatcactgagcacagatgctttgtttatcattgcccaacttcccgtgctcttctcccttgcgttttcggtcagtgcagcaagccaggaccacggtgtcatggagatcctgacgaagaacacgatgaattcaggggggaaaatcctcatcccttctgacggatttcacagcctccagctgctccgtttctcggcaccgttactgccactgctaagcttccttgatggcgcgatgccgaagctacagaggctggagctgcggtttaggatcttggaaggtgctcatggtgtggaaaacctagctagcctccagcaggtgcttcttagagttagccagcaagctcctgaaactaccaaggtgcaggtgtctgatatcagaagttcagtcagcttgcatcccaacagacctacggtggtagttgatgaatactacgggtgatcaattatccccttcttattcttgcagattgcagtgttgtttgaacatgtcatttttactgtgcctgaatcatcaaaataaataacaatcctactggtacgggttttctcctttttctagtttattttttgagctatctcatgctgtgacgcgtatttctagatgtctttgactactactagcatcgacatgggagacctggaatacgcggtacttcgataatgacctggaatacgcggtacttcgataatggttgtgtttagatccaaactttagatccaaactttggatccaaactttcaacttttttcatcacagtaacctgttatacatacataatttttcagtcacatcgtaccaatttcaacccaaatttccaactttgaaggaactaaacacagcaatatctctgttggagcttgtgcaataagttaatactccttccgttccattttgagtacagccatgattttctgtgtataactttaaccgtctgtcttatttaatttttttaaaaaaataattaaaaacacaaagtattattcatttttttatcatctcataacaataaaaatactaattataaaaaaaattcaaataagacggacggtcaaagttttgcgcagaaacttatggttgcacttaaaattagagagagggagtagtattagagcagatacaatagcaaactataatctagctatacgacattttgagaagataaaagaggagagagaagagtagcgggctatagatttgtagccagctgcagcacaggctctaagatgcatgtatgtatgataagtgagaccatgtattaattgtgtactatatactctcttcgtttcaaaatgtttaacaccgttgactttttagtacgtgtttgaccattcgtcttattcaaaaaatttaagtaattatttattcttttcatatcatttgattcattattaaatatattttcatgcacacatatagttttacatatttcataaaattttttgaataagacgaacggttaaacatgtgctaaaaagtcaacggtgtcaaacattttaaaatggagggagtattatagataactattgtatgaattatctattaaattgactagtattaaattgactagtagttgacttgttcttagtactactagaactagaactagtcacttgagctggttttggggtcaagtgcaaattgtcggataaaaaaagggagaacattttcattatccaacagcgtatccccccttcaatttagcttggttatgctctgcactctgcactccaaattgttgctcttttggtcttctccttaatacaaaagatattcgtgtttttctgtattcacaagaaataatttttaccgttctgtcacagtttacattttaaattgccacacggcttcgaccatcacagaggaaacatgtaaatatgttttggcctgcagatcttggtgtttagtaactagtagtcctcgttggattgaattttgggaacagctatgtagtctattggtatatatcccaggttctgaatcgacgtttcacgaagagacttgtgaactgccagtgtagtgtagagtgattttttcgaaaaaaaaaaactctcaattcctttttacttgttatcgttgactcgtactatcactaataattcttaagatctttcaataaagatggcatctcatggtcgcgcgaacgcgcaactccgagtggctaagtacatatggaacaaattcaccaaacgtccctcaactttagatcgagtttgtatgacatctctaatctctaataccaaaaatctttacccctaaactatacaaaaccgtgcataaaggaacactttacactatacccatatactagattcccagttaatcatagaaatcttcttgttctttcgttcaaggaaaacaatctccttattatctcagaataaaataataataagacgatttcttctcatatatatatgatttgcatctgtgatcatattaggttgtgtttagattggtccaaagtttgaaatttggttgaaattggagacgatatgactgaaaagttgtgtgcgtataaaaggtttgatgtgatggatagttagaagtttgaaaaaaaaaactttagaactaaacacaccatgagggaaatcaaatcaaatactacgtactgtatttcgtttatttaaagattagagacattgcttcgttggactaaaaaaatcatgagagatcgattgcttcattagctcaaagtttcaaacccacacgaaaaaactcccaaagtaaataaaaaaacgaataaagaaaaaaaccgacacgaacggattccacgtcacaatcctcatccaatcctctcacatcgtaaagcgtgcgatagaaagtccgcggatcgacacgtcatcatgacgagcaaacgaagctcgacacgcaccgtttatctctcccatcctttcctattaacccaatgacatgtgggaccagaaaatgcaaaggaggttgtggccccacctgtcagtgagatagtgggtcacgagaaggtagttagtcaaagaaaggtaagccttatctacacatcaccatctgcttgttgccacgtcaccccatatctcctctcgcttccttgccttcgctgtcttaacagtaccaaaattaccaaaaaaacgcccacagatttcttcattattacacagatttcctcagaattcggaggttaggggcatatatgaaaatattagttttgttaggggtcaatctgtgagagaggtcaaccttttgtgcccataaaaaagcaacgtcctaacgtaacggcaacgaccaccgcttcgctttccgtcgcgcgcgcgtttcgtcgaacaccacgccggcgaccacgacatggccaccgccgcctcccgctccggccgccgacgcggcggcggagacgacgaagacgaccggacggcggcgatgcgacggctgcgcgtgctgtccctccacctgcaggatccgtccccctcgtcggaggcggggctggcgcccgcggcgtgcgcggcggcggggaggcggcgggcgacggggggagcggacgcggcggcggcgctggcggcgtacctgagggggaggcaccgggacacgcaggcgcgggtgttcgagttcttcctctcgcggcccgacctccagacgcccgtcgagatgtccaccgccgcgcaccgggagctctgcttccggcagctgtgcgcgctggtgcgggaggccggggtgcgcccgctcagcctcatggcgaacgaccccgccgagtacttcgccgtcatggaggccgccggcggcgccgacatctccctcggcgtcaagctcggcgtccagtacaggtaaaggattacaaattgagtaatactaaataattagtaattgactagttcctgtcggtgctgaatgttctgcacgtctcatggtttctcttcaaatttttttcacgctcaactgcaatttgttatacacttatactaattgttaaactcaatcaaatgtatgcttcctcgaagagttcgtgtgttccaatccaatgggaactcaataaatctaaaaaaaattggtaatagttagctggttactggtagtctggtagtgatcttctttccttcttcttcttctttttttttttaccgagatgaataattgaggaaaacaaagcgaccatgcgatgtaatcatgtaatacatgctaattgtgttttcaccttcgcaataattaaagcattattgctgtgattgcgaaaggggggcttgtacctatcgatagctcaacgagatacagtactgctgctgttggctgttggcaacaatatgccaatattgcatttgcactcttccacgagggcaactattgttagttgggttgttagttataagggctatgaaaagcaacagttcatttataatacgaaattttttgtttctcttttgtaatggtttgatattaaatgatggtcgtcttttgcaaccgtcgagtgtcagcctgcttacttgctatgataaagagagctaattaattcttgattttgatggctcaatcaagcatcaaaacgtgcttgagcttgcttttggaaagcatttttgttggttattagtttttaggccattttatttacaggatgaatgatagcatgccaagctccaaaaatgcagatgatcttttaccctttttttaacaaagttattttttaggagctttgcattggaaattcactacatgacctgcttgttaatgcagcctttggggaggttctataataaatctgggaaccaaaaagcacagagataggttctttgacggaatcgacaatttggattatcctggctgttttgctatgacagagctgcaccatggttagttcttacttctatttactcactaactaatcattatcactgcttggttgctttacactttatcagtccaaacctcctagttcaacctccatcccattactgttatgtaccatattattttggttcttccttacacagtcggatctgaaccctgcaccaaacaacactgttctgttctcaataatttgagaatgaatattcatgcccatgcagcctgttagctcccatcatgataatagttaagtcctccacacgttactatttcatcttattttatttattttcccttcttaacaggatctaatgtccaggccctacaaactactgctacattcgatccagttactgatgagttcattatcaatacacccaatgatggagctattaagtggtggattggtaatgcagcacttcatggaaaattcgctactgtttttgcaaggttaattttgcccctccaaggaaaaggtggggaccctgctgatatgggcattcatgcattcattgttcccatacgggaccttgacaccaatgctgttcttcccggaattgagatcaatgattgtggtcacaagataggcctgaatggtgtggacaatggtgcactgaggttccgttcagtgaggatacctcgtgataatcttctgaaccgattcggagacgtgtcacgagatggaaaatacacaagcagtctgccaacaattaacaaaagatttgcagcaacccttggtgagcttgttgggggacgcgttggtattgcatatagttctgtaggtatactcaaagtttcagtgaccattgctgttaggtatgctctgcttcgacagcaatttggtccacctaagaagcctgaaatcagtgtgttggactaccaatctcaccagcataagctaatgcccatgttggcatcatcatacgcatttcactttgccacacggtacttggtggataaatactcagaaatgaagaaaaccaatgatgaggatgttatggctgatgtgcatgttctttcatctggattgaaagcctacataacttcatatacagcaaatccattagcgtatgccagaatcatgtggtggccatgggtatgctgctgtaaatcgttttggtgctttgcgcaatg

SEQ ID NO: 7806 - DNA, 11943 bp, Oryza sativa
ccattgctactgtggtccacttgacgaatgatattcctactgatgagctcattaaagtagtcgtcagcaacctcttcgacggtttttccatgcttctcaacaatgaaaccttcagctatccatcgcctgaccaaacgcttcctgttgatgctgcagccctttggaaatatgctcaagtaaagcaagcagttcttctgatcagctgacaaatcattgtaacagagattgagtatctgtgttactccttcaggagtaaggtggtgtttacatcatggacttaactttagtccctgtctttagacactaatttagagtattaaatatagactacttacaaaactaattacataaataaaagctaattcacgagacaaattttttaagcctaattaatctataattagagaatgtttactgtagcatcatataggctaatcatggattaattaggctcattagattcgtctcgcaaattagtccaagattatggatgggttttattaatagtctacgtttaatatttataattaattttcaaacatccgatgtgatagggacttaaaagttttagtcccatctaaacaaggcctaagattcatctccagctctgaacttaaaagaatcttgcacctttgtccaatggctctttgaccttgggtctctggccagaagtcctgccaccgcaactattgccagtggcagaccaccgcatttcttcagaattttgtccttggtttccctgaactcgtccgggcatgaatcatcaccactaaagattctttcattgaacagtcgttttgatttctcatctgaaagccgatctagcatgtggatgtcacctgtttgctgatgagtgctggcgtcagctacagatttgaaccttgttgtcaccactattctactgccattgttatttttgggcaaagatccccagatgtattcccatgaagatacagaccagacatcatctactaagaggaagtacctgttggagcaacatgcacaaatcaaatcaggatcattatgacacaatgatgcacacatcacaattgtttttcatgataattcctcttcttacacaatgaactagtaaggtgacccgcgcagattgcgcggctagcgtcatttttttttcacacatgaaacatatattttcatattttatttttaaaagatagtaaaatgggagcataactctactcctcttataatatttattatttttttaaattccgaatttacattttatattttttttacttctacatggactcgaaagataattgttaggaggtattgttaaactaaaaaagagattgttttgatgttagaaatggttggctaatgtgttttaggccctgtttagttcctacataaaaattttacacccagtcacatcgaacgtttgaacacctgtatgaagtattaaatatagggtgaataataactaattacacagattgcgactaatttgtgagacgaatcttttaagattaaatgcttcatgattttataatttggtgctacagtaaatatttgctaataacgtattaattaggcttaataaatttgtctcgcagtttactaacatattctgtaattagtttattttattagtacctgaacaccccatgcgataccgtatataatacccgatgtgacacgcaaaaactttacacccctgtatctaaacaccccctggaaaaatatgttttttctattgaaaataataaatggataactcaaaagattattgttttttactattttgaaaaaaaaagtaagtgagatattggatcgatcgctgtacctagcgcacaaaagttatgaacaaagctgaccattaaataatccttagattgcttgcttaatactccctccgtattttaatatatgacgccgttgacttattgactaacgtttgaccattcgttttattcaaaattttcgtacaaatataaaaatatttatatcatgtttaaataacatttgatgatgaatctagtcagaataaaataaatgacaattgcataaaattttttgaataagacgaatggtcaaacgttggataaaaagtcaacggcgtcatacattaaaaatatggaggtagtagtatatctagtgattacccataataaggagcagtagttgttagtagtagtaatggtgctacatttaatactactaaatagtgtcaaatatccggtatgacatgattaaaatttagtgctgatcaccttagtcattgaaatatttattactgaaacttgtatgtttttagaccctatgagaacataaaaaaaaaatacagatgtacccttgaacttctatgacccacatgtcagcccaacccttctctcactgattcgcttctctcctcccccatcgaacacatcgatgcggcgccgccctctcttccccgtccgagcggcgccgcccttttcccctccccaccgtgtccccttctccggccgccagcgcgcgtccccggcaccgccgccggagtggatcgaggcggctccgtccccggccgccaccgtaggtgcggattgaggcggctccctccctggacgccatcgcaggcgtagatcgaggctgctccttccccagccgccgacggcgggcgtccatggccgcgtcgggtcctgatcttctatggagcttatgcacgcgctagcatcgacgcatcctcccccaacagcctctcaactcctctccggatggtgagcgcttcagtgattattttttttatttttttaatgatttttgcatttctggaatgtcggcttaatctaatcctgttggacttagataggatgtgccagtccgtttttcttttttttatttttttaatgatttttgcatttctggaatgtcggcttaatctaatcctgttggacttagataggatgtgccagtccattttatttcgcggaccttgttctgcatgtacggacttcatccattaatagcatatcaaaactcataatctcatctgttgcaaaatttaccgattcctacattctcaatatcgctttgattctccatgtttgaccttttgttgtcaactcactaatcttcttgtatgccatagtgattccagcaagaacaattcctgggtgcctttttgattgacgaagtggattccggtgagaacttctggcttgcagatttgtggcgtgctggcgagaagtttgaacggcaagaacccggtgaatttgctaatttgtggcgtgcttgttgatgatcacggcgacggtcactgcaagaagtttttttttggcttgttgaagatttctggtttgctttggttagcttgttgaagtatttattgacatgacaagtacttatacgattcggaaacggcaagagtttgattagagtttaattaggattggtttgtctttcaatgtttctaaaagtggtgtgaacatgcggattcccaaaacattgtcagtttccaatgtattgtatgactcggttttccttattttcattttgactgattgtccgattaatctttttttttcttcagtttttaactaattctaatcctaatctagttctatttttctttttccttattcttttggattaatcttattttcgttttgactgattgtccgattcatcttcttttctcctttctttagtttttaactaatcctaatcctaatctagttctatttttcctttttcttatttttttgattaatgtgagaatttctaggttgtgagagcgaacatggaggcttctttttctattactttaaagatataatagattagtggacagacagaaccataaattttgaatactaggaagtacttcatttgactgtgcttcaatggtgtcctagtactaacaattccgaaagattaagcggaatgctgaatttcttgctcatattcatatatggtggagaatgaacttcaaagttggtattcatctccattagttacgttagttgagaatgcagttatcattttagaaatggtaaattgcaacttgggtttagccttaggcatgtatggtagacacagaacatcagaattcacaaatcaggatcaatctgctgtagtggtagcctgaagttattttgcagatttgctaataaaattgagggcattctagcaacttttatccaaaagaaaaacatgattaataacacattaccatggcaggaaatataattaaatacataattacgaaatttttattagaaaaaaagccagagaaaaactgtgtttctccacatttagttatttttctataatggatagaaatcggacctctatattctccgcatttaatcattgactggattataaaagtaataactcagcactaaagaagtaaagatgatagcaaactatgtatagtagtatgctccctctgttccataattccaagttttggacaataacacgatcttcaaaatatatatgtttgactatgtttttttaataataatatatataataaattaacatatttttacttttattataatactttgtaagataaatctatatatgtgttgatttagggtgtgtttgcaagagcaagttcccaacactctcctctcgttttccgcgtgcacgcttttcaaactgctaaatagtgtgttttttttacaaaaagtttttatacaaaagttatcaaaaaaattcatattgatccatttttgaaaaaaaaattagttaatacttaattaatcacgtgttaatgaaccgctccgtttttcatgtataggagatggtttctaacacctatctccaaacatagccttaagtgcatttaaactaaatagttttaaagttataaaagtttgatgactttaatattatccaaaacattaagaatcatggagccgaagggggaaaggagtacctcttttgttccaaatgtgctgtgagcttctccttaagctgcttgtctgtccatctctcgatccctgcaagagagtctccatctgtgctctccttgtcagggacctgaggcatgacttgcctgaggatgcttctgagcagcgccgcgagattgagcttctgcgacgcctgcacgcacgcccgggactcgaacttctccccgaacttgcggtgcagcgccaatgccagcgtcgtcttgccgaggccgccgaatccgacgacggcgaggaccctcaggtcgggcagcccctcggtcagccatgccccgagcttgccgatggcgtcctccatccccaccgactccgcggcgccgacgagctgcggaccaggctgggggcggtcgttgacgtggtaggaaggggcggatctggcggccttcccgttcccggcgtccggccggccggggtccttcacaccgtacctcgtgcggcgctcgccgacgccctgcgcgcggttcttgaggtcgacgaccctggcggcgatgccccggcgctcccagagcgtggccacggcgtacctcgcgcggcggaggccggacaggaggccctcgccgcgtggctggccgccgaggcggtggctgaagtcgtcgatgcagtcctcgatgtcgtaggcgacgtcgcgcacctgctccatccagtccccgggtctgctcgtcatggtggtggccggcggcgtggccgaggttgaggaggaaggcgtgcatgctggccagctcgtccttgatgtactggatctcgctgcgaacgccgctgatgagcgtgtactcctgggccaggaggctgccgagctttcccagcagcgacctcatggcgctgtccgaggcgcctacggcgagctccatcttgttctttgcctgcccctcaccgccggcgacctcgatgacgagacgagatgaagctacactacggcactacgcccaacccaacggacgctggagtgcactgtagcctgcagaggactccatggggacgagcaggtataatagcaggctcagctatacatatactctcttcgtttcaaaatgtttaacaccgttgactttttaagtacatgtttgaccattcgtcttattcaaaaaatttaagtaattatttattatttttatatcatttaatttattgttaaatatactttcatatacacatatagttttacatatttcacaaagttttttaaataagacgaacggttaaacatgtgctaaaaagtcaacggtgtcaaacattttaaaacggagggaatatattttaaagagataaagaaagatagagaagagcagcgagctatggatctgtagccagctgcagtacggactctaagatgtaatgtgtgtgacaggtagaatcaggtattaatagtatagtaagcaactattgtataaattggctattatattggctatactattaaagttggtttagttgaatctatgccactgtaaatatatcaatttagataaatatcactactattcatttattcctatatgcagaaaattctatccgtgccactaccgtcatcttttccgtcgtaaatgcagaaattctatccgtgccactactattcattttctgcataaattcatctattcgtatatgcagaaaattcatttatgctctctctcctcatcccaacttgatttgatttagcaaagattgttgtgtgtttgcttcgcagcttcgctgcttgtttcagtgatttcaggagcagcgcaccgtcaatgcgatcttgttgcaagaaaactactagcatctatccaacttgagtagagagccctttgttagttgcgatctccagggtgcgtgcgttaggactgatcgggaaacctcgtcgaacaaatatgagtagactagatctattgtggtggtaccaaatacgaagttctccttctcattgaaaaacaaggtgtgcctgtaaagcaagtgcccctaacaagaccaatccatattaccgagaccaatctcgctagccgcaagagagaggcctatgttcaaggaatgaatctttttttataggaaggctggtggcatacgaagagagggcgacagaacatttgcattccctttctttgattgagagaaggataaagcaggggatcgtgaaaccgatccccactccgcctcacgcgccctgatagggggcgcccgccgttcaatggctgtgggcccctctcacgaagtgccatataaaagagggggagctgttggcgcacgcaaacaaacgttcgtcgtcgtgcacacgcactccccacaaaccctagaacccaccgatccgggataggcgctgaagtgaggggaagcctaccgtcgggatcgccgtcgcctacaccgtccacgccaccggtcgacctcaccatcatcatcgacgttgtccacgccgccgaccccgggagcacccacaggcaaagctacattgtcgccatggccgcatcaacctctaagggcaaaggtacgtccctcacatctctctccctcttccccgttcattctctaagtgcatcactactattgccatgagttagtctacctctagatccacacctaggcaaacactaagatctaacaatggtatcagagccttaactaggtgtagatctggtagggttagaaagagaaagaagaaggggtctcagatcccgaagaaaagccaaagaattaaaacaaaagcaaaaaaaaaaaacctacctctcccaccgccggttgtcgccgacgctgcgcgggaagtcctaccgccgccgctagctgtcgccgacaggcgcgggaagttccaccacctccgccggctttcgcctatgccgagggtagtacgccgccaccgccggctgacaccgatgcgcgcggggagtccaccgccgctgccgccggctgtcgccgacgcgcgcgggaaggaagcggggagaggaccgcaaggggcgtcaagggcaccgtcgcaatgccgctcgacgtgttgacagaaaacacgaggcctgggagatctgcttaactccagtgcaggtccaaaacttgccttcatatgtgtgagcgtgccagttgatttgatcctgtaatcaacaagaaataaagacaagagaaccgtggttaaatctataaatgatagccgatcagccaggtgccgatgacatatcatttatatctgagccgatgtcatctgtatatcgatcggcaatcgtaaataagtaaagaagaactaaatctacttgatcggctgtaaatattaacgatatatgattcttatgtcgatgtatacttaaatcaggtgattggaatagatcggtcatcatgccgagacagtataaatcacttagaccgaaatatacatccacaacaggactatatatatatatttatagcgtagccgatcagatagatctagcgtgtatcggctaatactccgatactactctatattaagatattgaagcaataataatatatcaaacaagagtttaacatatttagttatggcagtatcttgacataaagggcagatttaacatattaatgaagcaaataggataactgtagttaaatcagatacgatcggctgaaactctgatgctattctaatcgacaactaggtggcaggctagagatcaatattctaagcacgacttaatagatcaaactcaattgatgcagcattaagtatgaaaagaagaacaatatctagacaatcaagccgctagaagattcatagaatggtagatatcttatataatctggatcaacatcaagatctaacctaatcggatgccttctgcatacagatgttggtcgatagtagattagatagcgatattgctgaagattatgtaagatatatgataacttgacgaattatataaataagattagagtgtcataaagatggaagcactaatcctaataacacgatccgtcataacgaattttaccttttgttgaagatcgaaaccgatgcagctcaacccgaaagcaaaaactcgtcgaaacaaaattaaagtaaaaggatggcgatgcgccggaattgtattgaacgtgtgtgttaaaaattacatagggctcagggtctatttatacccgaggattacaagatatgcccataccggacacgaccattatctctaacaaactctaaatatcacgtctttgcggcagacttttgcccacacttatctataaggaatttacataaaacatcctaattaatagatacaattgccttcccaggactctatccatgcgtggcaatcatcttgaagtacatcaacctgagcccgacgccgtgcacaagtcgtattgtcagaatcggctatatcagcttatttagcttagctcaacctcagccgatcctagccgtagccgatctggactccagccgattcctgctttgttccagaactcgatctccgcctccaactcttcttcgatcaaatcccctttcctgacacaaatgctaccaaatttggttgttaacacgacggtggcgcgctcagcctagggcgagcgtgcgcgccggcgaggggccctgcggcggcgccgccatcacctccagctgccaccgaccgtggccacagcgaagagaggagggagaaagagaaatggcgctagggtttttcggccggccgggagggagggttttgttccccccgatctcggcggtcagccgtccgatcgtaaccctagcgatcggatggctgaaaaaaggcgcttggttggtggctgtgggccgaacgtgccaggccggccaaagtctgattttggttcctcgtggccgaagcaaaaaaagaaaaagaagttagatttggatccctattttagaagcttttattatttatgtttattgaagtatttatttctaagcaattttaaccaacgtgaaaattgttcagggagtaaaaaattgtaagaattgcttctgaacatgtatgtaattttaagtttccgctgctataatgatgtttacaagttttccatgcattagttctatttctgcccaacggtgatgtagaattaatgtggtagtatgttgtatgttttaattttgaccaacgttaaattaaaacatacaagagttttatttgtttcttgatttatttaaatttgctttcaggaacaactaacccacttgtgtatatctcggccgttgagccccttaatgggaataattaaggctcatggcgagagaagattgagatagcacttgcgctgtctaatatagatttagctctcaccgagccctgtcccactgcgccagttgcgccagtgagggcggagggtgagagcgaagatgcttttaagcagagaacgttggaccatgctccaatagtatagaagtacgacactgatcatgcgaagtgggagtcttccaaccgcaagtgcttgatggtaatcaagagctcaatagtggaggcagtaaggggagcaatcccagtatgcaccaccgccacagagtatcttcagagagtggagaatcagtttactatttcttcaaaggcttatgcgagctccttaatcaagagcttagttactatgaagtaccatggcggagatgttagagagtatattttgaagatgagcggtatcacttcaaagctcaagaagatagacttggttctccctgacgacttcctagttcacctcatttttgcctccttgccttcagaattcgagtcatttgctgtgaattacaactcattgcccgaaaactggaacattgagaagttgattgccatgtgtgtgcaagaagaggatagacccaaaactcgtggtgattctgcaaattatgtgaagaacaagaagaggaacaaccacagtcagaatgtcgcctctcccaaagcacgtggaaaggcaccacaggttgatccaaatccacgacaagaagtggagagggacgcttgcaggtggtgcaagcagaaggggcactttcagaaggattgccctgaattcctgaagcatcttttaaaaaagggtgagacatcattacattcgtagatgaatccctgtatgtaagttattcaaaatccacttggtgggttgattcaggtgcgactattcatgttgcaaattcattacagggcttccatacgaggaggatgctagcaagaggagaaagatgcattagagttgcaaatggtgtcgaagctgaagtcgaagctattggagaatatccattaaagttgaataatggcttcacactttatttgcacaatgtgctctatgtaccctccttaagtagaaatttagtttccgtttcatgtttggcggatgatggatataattgctattttgaaccagatttatgttcaattatattcaagaataagtgtgtgggtcttgccatccgagaaggccaactttacatggtgtctgaacatgagaatgcgaatgttgtatgcaatgaagagaatgttgcgtgcaatagtgtgtctttcttatctacgaatgtaagaagtaagcacaaaaggtgcaatgaggaaacctcggcaaaattgtggcactgccgtttaggccacatttcgagggggagaattgaacgattgataaaagaagaaattttgcatccattagactttgcggatacagaatattgcatcgattgcattaatggaaagtatgttaaacaaataaaaaaaaggagccatacgaagtttagaaaaattggaaatcatacacacagatatctgtggcccttttccaattaagacagtggatggttatgattcatttaaacattcacagatgattattcgcgttatggctatatttatccaattaaagaacaatcaaaagcattggataaattcaagattttaaggctgaggtagaaaatcagcatgatctaaagattaaagtagtaaggtctgaccgtggaggaaagtactacggtcggcataccccttatggccaaatacctagaccttttgcaaggtttctacaggaaaatggcatactagtccagtactccacacctggcgagcctcagcagaacggagtagcagaaagacgcaaccgtgctctaatggacatggtg

SEQ ID NO: 7807 - DNA, 16021 bp, Oryza sativa
gtcatgaatttgacagctcttcaccttcccattgctgctgttgttgataggccgaatcaagttcctgccaatgagctcattgaagttgtcttctgcaacttcctctgccgtctgcccatgtttctcagtaacgaacccttcagcaacccatcttcttatcaaacatttcctgctaatattgcggcccttcggaaacgtactcaagtagagcaaacatgtcttaaggtcaggtggcagatttttgtagcagtggttaattatccgcactacttcagtggtgagattgtttcccaactctgcacttaaagccttctccacttcaatcaatttctgatccaacgtctttccaatctttgatttcagttcactagcaatgagccctgatactactactatggccaaaggcagacaaccacacatcttcacgacaatctcatcattaatggttcgagtgggacacagaccgttagcagatattatttgaagaaacaatttgttggagttctctggatctagctgtttgagcttgtgcacatgaccattttgacggcggcaggcttcagctacagagttaaacctggtagtcacaattacgcaactacccttatcattcttaggtaatgaatccctaatactttcccatgctgatacagaccatatgtcatcaatcaagatatggtacctgttcaagaattgtttagaagtaagtagttgtaaatagagtgtgcttttaaggtagttgtaattgtaaatagagtgtgattttacggtacttgagaaggtaccgtaaagttcctctctaaataatattttatactaccttcttagtttaatatttttatggggaatatcttcctttaatatttgaacttaaaagaacgaagggagtagtactcatcccaggcacaaaacatattgccaaacattttcaacttgggtatcaatattttttccctattatattctgcataaagttattggactttataaatactagaaaaaagatgcccgtgcgttgcaacgggaaacactaacgttattaacttagtaaaataataaaaaaatgagctcttatgatctagaaattcacatgttaaaaaataaggagaactcattgtagaccaggactctttcattttgtttttttttaaatcgcattgcccaatcgaatatgtacataaaacaacttaatataaagtataaattataaattagaaaataaataatattggatgaggactctagaatattctccaaaagaggctagggtgcatataggaatacaatttagaaaaagaattaaaattcaatatacaaaatattgaaagaagagtttagagttcatatatagaaatacaattagaaacaataaaaaaataggaatatttgaagaagaatagagaccatatagaattaaaaaataattgatattatttaattttagtctaaatttaaattttgtatcacgacaaataaataattatatttttagtcagaaaataaatccatatcatgaggaaaacaatttagttagaattaaaataataagtagtcataagcaattataatgggcccttttatggcctaatgggctaataggcctatagaaccaacgagccatcaagcccagtaggcagaatagactggaggcccaatagtgtggcggcccaatgaaggagaagccggggccgtccgatcgaatggacggtccaaattgatcccaaactatatatatactctgcagcaatccctaaccctaaaaattcattttccccctctccgcgcctctaatcccctcccccccccaccccaacacacacacacgagcggctgctgtggcgccctcgatcccctgtctctgaaagcgacagcggcgccctcctcccccctccccgagcggctgcggcagcacttagcagcagccggcgagcagtgacgggctgcggcgcctctccacccctcgcctcctctccctctccatggggccacggcccacgggagggctcgaccgtggcgggcggtggcaggcggcggcgctctccccaggaaggaagccgacggcggcctggagtccctgcgacggcgacagcggcggcgacctcattcgatctaatttttggatatatttgggtatatgctttctccaattttatttgtatgactgaattttgattgggattttttttttaggggggggggtggattgaattctgattgggatttggggggttgcgacggacgaaaaatttgcgtacgtttgaggtaacgaacggaaaaatacgaatcttttaattagttaagatatacaataaaaatgttgttgaaaagttgtgttttgtagactatttgtatccaaaacgactgttacctgtgaacggtgaaagtacaatttatccagatcagtaactatcataattcaaattcggtattgctatttaattactaaaaacttgtgtgagacttatccaaagataagttcaagtgctaaaccagaaaagtcaaggaaaactatgaaggaatgaaataaatactctgtattactccctccatccctaaatatttgacaccgttgactttttagcatatgtttgactgtaagttcttattaaaaacttttgtgaaatatgtataactatatgtatatataaaagtatttttaacaatgaatcaaataatagaaaaagaattaataattacttaaatttgtcgaataagacgaactcaaatatattttaaaaaaatcaacggtgttaaatatttagagacggagggagtatatagtaacaaagccaaaatctatacctcttgccttctagttgatcagctagcttcttcttgagctcttcaactccccattcctcaattccttggagagcatcctgagaagcgccgacctgcttctcatggaactggctaacaaggcttcttagaactgttgggagacgaaacttctgcgacgcgagcatgaacgctctggaattaaactcatctccaaacttgcggtaaaatgacattgcgagtgtggttttgccaagcccaccggatccgacaatggcaaggtaactgatttggctctgctgctggctgttgtgcttcgagaccatgaaccatctttgaaggtcgttcatggcgtcctccatgcctacaggttcaacggtgccaatcagccgggggagagaaactggatggtctctgggatcgccggagttgttgttgcctccaccatttgcgtttgctaggaggttctccaccccgtacctcgtgcgccgctcgctgacatgctgcgccctgaccttgaggttgccgatgtcggcggcgatgcagcggcgctggtacagcgtggtgagcaggtaccaagccctccggagggtgactagcttgccggccccacggggctcgcggccgaggcggtggctgacgtcgtcgacacagtcctcgatgtcgtaggcgacctcgcgcacctgcttcatccagtcctgccgctgctcgtcgtggttgatgtcccgcttgagcctattgaggaaggcctgcatgctggcgagctcgtcgttgatgtactggatgtcgtcgtggacgccggagatgagggtgtactcctgcgcgaggaggctgcccagcttgttgacgagggacttcacggcgccgctcgaggcgccgacgaccagatccataatcagctcccgtttcagtgaataggtataggaacctgagaaagtaagaaacggtggataactttttttttttctttttgattcgaacgatggagaattggaaatttggaaccccaggggcagggatgggtcatgggcagggttttaaatcttcctctatagctatttgagaaagactctagttatttattctcatgtacaatttagctgctatagctctatttagcctattatatatagctgccgctatagccttttgagaagttaaccgctaaatgtcttaacccgttatttaaaatattggtcatgggtggtccagccgctgggagtgggattgaccgagtggggcaatcatgatgccataatgaggcctatgcaattatctaattattttaatacatgattttctttaaaatttgttaaacaaccatcatgttgtgttaggattttttaaaaaatcaagccttattgtcatcaggtttataattttacagtttttaaaagtcacagcaaccaccacctcttacttctttcctccccttgattccccactcgctatggctttatcttttatagtttttaggaatatcgtctaatgccgccatactagtacattatggcgtgtctgctgcccattccctttattatcgttaggatttaaatatggaataagtttatctgaggtcccttaacttgtcagcaaatccaattttcgtccttcaacccgaaaaccagcccctcaggtctcaactatcaaaaccgatgcaaaataagtttcaagacggtttggatagcggtttcagctgacgtgacgtctacgtggataatttgactcagtcttcatctgaggtggcattaacatggtgcttacgtggaaatttgatttcaaaaataataaaaactatgacaccacaaatcagttatataaaaaaataatataaaatggtggggcatgtcattctcaccctcttcttcctcctctctcccctccactcttcaggcacgacggggaggaagcggcgcgcgacggccggtgggagaggaggggcgcacggcggccgacaagagaggagcagtgtggcggtcgggccgacctaaggccagcaacgacgaggctgttggaatgtaatctctttcccttcattaccaactccccttccttctcctcccgatcctgtttccataaatcggttgagtgagtatggaaagtggatgcctatacatgtaatgctccgtgatcaattcattatcgcgatgagtcattcctgtctaacatggaatcaatcactcatcgatccttcgcttctgcataacccgccggcgtcgctccgccgccgtgcgtccacttccgccggtgcaccctcaccggccgtgcgttcccggcgacatcatgtcgtcctcttccaccacccctccctctccgaaatcgaccgcgatcgattctactgccggtgccgtcgcagacgctgttcgtgcggccttcgctgttcccgtcggtctggagatcgaccccactacggcaaacaccgttgccgagtctgcggcgacccgcgcctctgacgccacacgtgaggccctctccgtcgccctcagtgccctcgtcttgtcaccggttgccacggttgctgcgacctctggcgctctcggcgcgacggccattgccatgcccgcggcgacactccacgcgtcgtccctacccactgcgacgatccacgcaccgccgcccgcggactccacaccgccggcccttgccaccctgtttgcctaggcacggctcacccacggcgccgcggcgccgcccgttggtcacatccggcggccggccacgcatgcagccctagcagccctctatgcccaagccgtcggcatcctcaacatcaaggccctcgtctccgtcgtgctcgacgtcgccaccgccaaccacacccggtggtgtggactgttcttggcggttctcggcaagtacgcgctaacggaccatgttctctccgactccttccacttcgaccgtgccgattgggtccaaatggactgcgtcatcctcacgtggttgttcggcaccatctccttcgacctcctgcaagacgtcctcaccaccaacaccactgcccgtgtcgtttggctaggcctcgagcaccatttcctcgggaatcaagagcaacacgccctcaacctgacaaccgagttccacattgcaacaaggcgacctccccgtctccgagtactgccgcaagatgaaggccctcactgatgactgtggcgacctcggcaaacctgttcgtgaccgtaccctcgtcttcaacaccctcaacagcctctccgacaagttcaaccatcttcagtcgccgatcctcatgcaacgcccgttcccgatgttcgccgagctttgctcccttcttcgcctggaggagatctccaagtcaccgcactccaccaccacttcggccgtcttcctcgccggcacctccaacaacagtggcaagacctctaatccagcgcacaccaccggttttggtgcagggaatcaaggcaacaaaggcggcggcaacaactccaagaatcgttgtcgtcgcggcggcggcggcagtggtggaaacggaggaggaggcggcggcggcactccagccgccaacaatggaggcaacagcgctaagtcgggcgctggcggcgcccaacagtggctgacgccacacaacccgttggccggcacaatccacatgtggcgtgctcggcccaaggccggccgggcctcccttcgctggggctgcgcttgccggcccagtcggcgcccacccggcccaacagtggcaggccacctagatgcatggggcgcagggccaaccagcccaataggtggtctcccagccacccacccccatgggctttcaacagcctatgggttggttcgccggtgctccctatcaatgggatcaagcgtctctcgcgggctctttcaacaccacgacacttcagcagcccgccacgaacgaatggtacatggacaccagtgcaacggcacacatgacatccgactctggtaccctctccttcacacaacccccaaactctacatccccctcccacatcgttgtcagtaatggctccactattcctgtgtcgtccatagggcaaactgacatacatcacccgaagcgctcctttatacttcgagttactctttgctctccacttattatcaaaaacttgatttccgttcctcggttcgttattgataattggtgttctgtcgagtttgatcccttttgtttctcagtgaaggacttgcgcaccaggaccatgattgccaggttcaatagctcaggtccgctctaccccctccaccaagccttgtctccatctacagccgccacagctctagccaccaccaccaccgacacttagcaccgtcgtctcggtcatctcggccatgaagctcttgctcggctctcctccgttgtgcccatggccaaaggtggatcccctagagtttgccatgcttgccagcttggacgacatgttcgccttccttttgccacttctgtcactagggcttctagcaattttgagttgatacattgtgatttatggacatcccccgtcattagagtttcgggtttcaaatattatcttgttattcttgatgattgttctcactatgtttggatttacccacttcgctttaaatccaacaccttctctactttgccccacttttttgcctatgttaaaactcaatgttccaccaccatcctcaacgtccaatgtgacaatggccaagagttcgataactctgccgcccgcacttttttcctcaccaatggtgttcacctccgcatgtcttgcccccacacctctccccaaaatggtagagccgagcgcatcatccgttccctcaacaacatcgttcgctccctactcttccaagctagccttcccaataccttttgggttgaggcccttcacaccgccactcacctcattaaccgacatccaaccaaaacacttgaccaccgcaccccttttttgccctttatggagtccatcccacctacatacatttacgtgtcttcggatgcaagtgttacccaacctctccgccaccaccacctgtaaacttgcaccccgctccaccatgtgtgtcttcctcggttatccactccaccacaaagggtacctgtgttttgatcccgccacaaatagagtcatcatctctaggcacatcgtgtttgatgagggttcgtttcccttcgcgactacaacgacaagtgccactaaccttgattttttggaggattctaccacccctgtgcaggctcctatcggcgccaaccgacgacctgcagctcccttgccagccgccccaactccaccacaggctgcccatacacctgggtcagccaccgctgcatcaagctcaagtccagctccctcggcctacaggatgacgctctctcggtcggctgggccatccgtgccgcaggccacccactcacctgggtcatccgccctgtcactaggccgacgcgcgttgctccacgatgggccgctgacacatgggccacgctccaccgagccatctccttcgactggcccacgacaagactactctgctgggtcgtccaagtctcctgggctgaccgaagcagcacaagccgagccagaggttcttgcacccccatgcccaagtctgcttcctccatcgcatgtctccattcccacttggccaaggtctgctcgtgtggccggcgtcccgaagccaccatccatgctcgacgcttcccctgtcgtcaacgaccatcacatgtccactcacagcaagcacggcattcacaaggtccccgaccggctcaacctccatgtcgacacgctctccccgctcccgaggacgtacagggccgccctcgccgatccgccctggcgctccgccacggaggagttctccgctctcctcgtcaatcgcacatcggagcttgttcctcgtcctcccaacatcaacgtggtgataggaaagtgcattttcaagcacaagctataggccgatagctcccttgaccgctacaaggcttggtgggtccttcgtggtttcacgcagcgccccggtgtcgacttcgatgagacattcagccccatcatcaagcccaccaccgttcgcaccgtgctcagtttggcagtctctaggaggtggcctattcatcaactcgacgtagaacgccttcctgcacggcaccctacaggacatggtctactgtatccagcctcctggctttgtcgacaccacccaccccgacatggtgtgccagctcaacaagtccctctatggcctcaagcaagcaccccatgcgtggtacagtcggttcgcctccttcctgctgacgctcggcttcgtggaggccaagtccgacacctcgctcttcatcctctgccgcggcattgacaccgtctacctgctcctctacgtcaacgacatcatcttaaccacctcctccaccgagcttctccgctagtccatctcggctctgcagtccgagttctccatgaaggacctcggcgacttgcactacttcctcggcgttcgggtctctagcagtcctctagcctcctgcttagccagcgccagtactgtctcgacattcgggatcgggctggcaagacaaactgcaagccctgcaccacccccatcgacacctccgccaagcactccgccacagatgatgctccggtcgccgccccaacggacttccgcagtctcaccagggcacttcagtacctcaccttcacacgccccgacatcgcctacgccgtccagcaagtctgcctccatatgcatgatccaagggaaccgcacctcgctgctctcacacggattcttcggtacgtccgtggcatgttggacctcggcctccacatccagccgtctgcagcaacggaacccgtcgtctactccgacgccgactgggccggttgccctgacacaaggcgctccacgttaggctacgctgtcttcctcggcgacaacttggtgtcttggtcttccaagcgacaagtcacggtgtcccactctagtgttgacgccaagtaccgcgccgtcgccaacgccgttgccaaggtcgcatggctacgtcagcttctccacgagcttcactcgcctccgcccaaggccaccttggtctactgtgacaacgtgagtgcggtctacctctcgagcaacccgatgcaacaccagcagaccaagcacatcaagatcaacctccattttgtttgcaagaaggtggcggttggcgcaattcgggtccttcatgtgcccacttcctcacagtatgccgacatcttcaccatgggacttccttcgccgattttctcgaagttccgttccagtctcaatgtccactagcatgacgttgcgactgtggtggggtgttggaatgtaatctctttcccttcattaccggctctccttccttctcctcctgatcctgtttccataaatcgattgagtgagtatggaaggtggaggcctatacatgtaatgctccatgatcaattcattatcgcattgagtcattcctgtctaacagaggtgaatgtgcgacattgagcttgtggttggacggcgacgggagggaggatttggaggaactggcagggctatgtcaaagaacgtgagggaggacgagaaggactgtggcccttccttcaccgctcgccactgctggggagaagcaatcgtcacgcgggggtgggaagatgggtgttcgtcatgctcaaccctgacccagggagaacatccaacactggggttggggagatggatggacgaccgatgactctagatctgaatgatggccggggactgtgcactctatccagtcacggcggcgatactgtgagctggtgggcgcaggcggtttttttgctccgggagtccagggaggcaacgagcaagtcagcaaaaggaacatggaatgccggcggcggttgactttttgctccatgtcgctcactgttgaggctgatgtgtgtctcgactctcgagtagattaacgcggtccagcaggctgcaacaccgacggcaacgacttattgtgttggtggtggtgcgccgccggcatgccacgaacgtcttcgtcggcgtcggtcttcaccgccgctgtcggtccctttcgctgctcctccagcacccgttgcccagcatgtgatcgccggaagtcgagcgacagcaacaccgacggcaacgacttattgtgttggtggtggtgcgtcgccggcatgccacgaacgtcttcgtcggcgtcggtcttcaccgccgcagtcggtcccttccgctgctcctccagcacccgttgcccagcatgtcatcgccgtaagtcgggcgacagcatgaggccggtaggcatgacagacttgtgagctcgacctccaccaccctctcggtctccggcggtgttggtggcggcgcaggcgacgacgaggagaatggggagaggagatgagatagagaagagagggaggagagaagagaggggatgaggtggaggaagtggggtctcactatttcctaatcttattatttaactgacatgtgggcccatatattttattttacttttaaaattgttagattttgcttcatatgccacgtcagatgaagaccgagtcaaattagccacgtaggcgccacgtcagctaaaaccaccgtccaaaccgctatgggatatatattgcaccaatttcgacaattgagggacccgttttatctggttttcctgttgaatgacgaaaatcggattcattgacaagttaatggatctcagatgaacttattcctttaaatattgaaccttatcattgttggagtttctatttttagtttctacaagcctcgtcaatcgttgtcaccctactcctttacggcctgtctgtggcccttcctctttattatcattatgattttagaaatcaaacttaattattattgggattatgttttatagttttagatgtcccgtcaattgccgcaatgctactccttgacagccaacgttttgtccatcctgattttaaaaattgaacctgatcatattggttttggtttttttattgcttagtcctttgccatttctcggtttgtcctctcaatgatataatagaattttttagtctaaattttaattaatctcttgttgtattctagatgacctcttctttttatattccttatcattttatttcaaatttcagttatatctaattatatttctacttgaactctcattttttctaattttggattttactttattttttattttgaaattaattaatcttttgttgtgttctggatatagtattctttcaatattccaaattttagacatttttaaattttattcctaattgaactctatttttttcattgctccaatcaatgtgaaattttttattcaagattttagttatttataaattatatttctactggaactcttttttcttttctaattttataatttactttattttttattttgagttttcattaatcatgttgtgttttaggtagcctgtgcaatagcgtggctagcgccaattgaaatatactttataacacaaaattatcttttcttaacacattgtcatctttttttaagaacttcatggtcatctttaaagtttgttaaatggacgacctatcttgggattaaaaaattgatacttatcatcatcgtcgccacgctcccaattttatttcttcaactctcaccagtgtcccccgtgctactcctttggcgcctctctacttgctggcgcaccacaccttatatgtattgtccttgagaccagctgagttcgtttctcagggatgctaacctctctcctttgttttttacgagcgcgcttttcaaactgctaaatggcttgttttgtgtaaaaaagtttttatacaaaacttgtttaataaaaatcatattgatctatctttttttaaaaaaatagctaatatttaatcaattacgcgcgactggactgttctatttttttcgtgcacaggacatgtgttaccaacattcagcttgtcttgctgcgattcctttttatagctttttgaaatcctgcccgttgcccctcttttccttatttttaaaagttccgccagttgttgtcgatctactccttaatttgttgccattcagcttgcctccacactgccgaagaagaggatagctagaaaatgcagcttatggcagaggcggcatgcagccagcttgggagaggagatgagaagaaagcgacgtatctggtggggggagagatgagtggataagggtggggaagaaataagatgttccctgctttagttgcgcgcaaacattagcgaaataaacttactcgcctagcttgcatttggcatgcatctgcaatcagtacagttgtttgttgcaataattctgttctgtcgtgctgtaccagctagccgtacaacaaaagaatagaagaaaacaatgggttttcagcccaaaacctgcaaagaattttcattaacttttttaattataatgtatagtggtcctaatggttcaatttattatccagcttctaataattgttgtatcactgaagaaaaaggtatttacccgttacagcgcatggatatcttttctaatatattaaaaaattgaaaaagaaaagaaagcggtatgcatgtgtatattaaataatctgaaaaaagtggtttcgtttcgtttgtcacgctagagaggacaaagaaaagagtaagggccggggaacatatggctcgtcgacacattaccgaagaagaggatagctagaagatgcagcttatagtggaggcggcgtgcagccagcttgggagaggagatgggaagaaagcgacgtttctagtggggggagagatgtgagggaagagataaggtgttccctgctttagttgcgtgcgaacattagcgaaatagatttactcgcctagcttgcattcggtatgcatctgcaagcaatacagttgtttgcttaatgctacctttttgccaacatttggaatgccctaatgttacaccatcgatccataagaaaacagtctttttccccttcttttaacttctttgttaaagcgaaggaatagaaatatatgaacacatatataaatccatatgaatttttccaagaggtgtgagtggatgcaaaatctcgtttattttctctctaaatttgtaggaaaacgaattttatataaaccaaatgacacttacgaattaatccttagaatctaaatcctttctctttggttcaaaccgaacaagccgagtttagggcctgtttggggagcttaaaattctgagaagcagttactgagaagctagctggtgagaatctggagaagctagaaaacctagcttctggcttctagttcattttacagattctacaactacagattctcagaatctgggtaaaaagctgaactgtttggaggagcttcaggcaactggagattctaggagaagctgcagccagggccgttcctatgattttgagggccctagacgaactcatcatgatgggccttctaagctatatataaaattttatgatatatatatatatatagacgctaatttttcttgcaaaatgaaaacaaatacatccatatataaatttaacatgtctggtaattattgataaaaagaagtcgaccaaaataacaatatatttgtacatgggaactaatatcattatcttaataaagaaaagaacccccatcatatccattgcttctcatgaaaagaaagttattcggacatttcttgatgcaaaatcatcaataacggtattaagatcaatattgtccaaaatatccttctcgatagagcacatagctaagccatttaacctttcttgcgacatagttgatctcaaatagttcttcaacaacttcaattttgagaaacttctttcagctgaagctaccgtcacaggtatagttaagagaattcgataggcaactgaaacatttcgatagcaatctgcatccataacaaacttcagaatctcaggcacggatatcgaagaatctggcaaactcacttgcaacacttttaattctgaataaaaatcattgatctcaacatcggataagttctcatgagtaaatatttccacaaaaatcttgcaatgcaaccaaagatctacttcatctaaggattttaaattttcagagttgaacaaaaacccaaaaacattatcaaatgctttcatctgctcaaatatattagtcagtgaagcaattgcagcatcaatcataactaggaagttctataaacaagtctataggaggacgacactccaactcctctcgtctcgacgtttctgcttctaggtaggccataggcaggtactagactactagtattaggtgttggtcctcaccatcatgagcccccggcggtcgcatcggttgcataggaccagggccggccctggctgcagctgctaaaagctcctcctaacagacccttagatcctatgcatatggtgatggggtggtagaattactactcacaccacaactattctcctttaaaggagtatagagtgctagggtggaggggcccgcacatctgtcggttacatcgaccaacttaagtagtttaaactattccaagatagttttttttatcaagtattcctcgatattttggacgcataggattgtgaaatgacaattaaaatatttaagaaaattaaatataaagtgcatatttgggtaacacaaaacagacccttagatcctatgcatatggtgatggggtggtagaattactactcacgccacaactattctcctttaaaggagtatagagtgctagggtggaggggcccgtacatctgtcggttacatcgaccaacttaagtagtttaaactattccaagatagttttttttatcaagtatttctcgatattttggacgtataggattgtgaaatgacaattaaaatatttaagaaaattaaatataaagtgcatatttgggtaacacaatttaattgttttattactattttagtggagcttaacatggtcgtattagaaaattagcgcattaaaaatattcactattataagccattttaaatttgttttttcgggggaggctaattactatattttaatctctgagagtgaacgtaaagatccacacgtttatccagctagcatcaagccatcgagttcacttcaagtaattcaacacggtttaaaaatatacatgtatataaagtttgtttgtgacgtattaaaaaatggaaataaactaaaagaaaaaccgaaaaaaaa

SEQ ID NO: 7808 - DNA, 7423 bp, Oryza sativa
cttccatcgtccgtcaaaaaaaccgtgtaaaaaaaaccgggcagaaaaaaccaggtttgtccgataaaaaaaccggaacggaaaaagaagtccgatccagaaaaaaaaaaggggcgaaaaaaaccaaaaggcaaaacggacggagtccgatccaggaaaaaaaaggcaaaaaaaaaccaaaaaaaaaccggacagagtccgatccaaaaaaaagccgaaaaaaaccgaaaaaacaagggacggaaaaagccatgtttgtctgataaaaaaacaaaaaaaataagtctgactcctatatccttaacagtaaaaaaaaaagtttgactcctatatcaaccaaaaaaaaaagtctaactcagattggtgaaaaaaattgatgtgtcggattgaagatctgtttgcaaaaacggaatctacatgtcgagagcattccatttttatatgattttaatttttggatttgtaattttatatttgagtccctgtaatttttatatttgcatttgagtccctataattttgcaacaagctacttgaggttgtttttgttaaaaaaaataaaagagaaagagaacaaaggcagaaaggtgcataaaaagaaaaagaaaagccaaaaaaaagtctgactcagattggtgaaaaaaattgatgtgccggattgaagatcggtttgcaaaaacggaatctacatgtctgagagcatttcatttttatatgattttaatttttagatttgtacttttatatttgagtccctgtattttttatatctgtcatatattctcctgtattagaaaaaaaagcaaaaaagaaccttcgaaaaaaacaaggaaaaaaacgtgcgagaaaacaagaaaaaacacacgagaaaagaaaagcaaaaaaaggagaaaaatatggttttcttcgtaagtgaaaaaagcgaaaaaaaaacatggtaggagaaaactgttagaaagaaatgcgccttttcagaaaatggtttgagaaaatcgcgcaagaaaaaaaacactgtttataaaaaaacaagccgctcattaaaatagaaacattgtcattgacatgattatgcatgaaaaacgtatattattattagaatttttttacccgttgcaacgcacgggcatttttgctagtatagaaaaaattatgaccataccgataccattttcataaaacaatgaagaaaataatactgtttttgatcatttctaaccgttttcgtccctagcttagtgaccaagatttggctatatatgctcatttcatgattttatcattatcactgcacccaatccatattatttccattactataggaaatatgattatgggaaaaagaagaaactgaaaaaatgggtaaagcagatcaaccgaacctacagggatctgctaattaattggcgcacgcgccctccactgtgccacgtgtcttttatttttcacgattttatttcagcgcgatttttttccttttttggtgcgatttttttttcactattttgacgttcctcccctcggcgcattttccatattgatcgcattcttttcgattttttaaaatctgaattgaaagttttcaaatctcgagctgaaagttttcaaacatggacttgaaagttttcaatctcaaattgaaagttttcaaatctcgagttaaaaattttcaaatctgagttgaaagttttcaaaatttgtcttacaaatttaaattttgagttgaaaattttcaaaatttgacttaaaagtttaaatctgaagtgaaagttcaaattttgagttgaaaatataaaaaattgtgtttagagtttcaaattttgagttaaaagttttaaattttacgtgaaagtttctttcacatatagatttcttttcaatctgttagtaaaaaaatcttcccaaaaaaaataaaatattttcttaattatcgtcattattctaaactaaccgagttagttacgttgattcctccggaatcgcgcgctggcgcacgcgttagcttttccggaacctcgatagatatagattaaccatcaacgactcttcatcttatgtccatacaatataggttaatcatcaacgactcctattacgtttcttggttatcagccgcgattttgaattaattctaaggttgttatcgtatttttttagcattggattttaaataacacagatataattttttttgaatggtttatcaagtataggccaaaagatccgcgccgctggatccgtcgcccccatgcctcccctccgccagatctgcaaggggagggaggggaggggccgggcgccgccatggtcgcccactgacgccgctgtcgctgcccttctccccgtctgcagccgagggagaggaagggaggggctgccgccgctgtcgccgcccttctccccgcctgcagccgagggagagggagggaggggccgccgccactgctgtcgctgccggccggctgggagaggagaggagaggagtgggagagagggagagagtgaggtggcagagaatatcgagcagtggtcgcccagtgggcgcggagggcgaaggatatcgagatctggctagtattttcacgtgcgcagttaacaggcccgcacgtgaaaataggtttattttcgcgtgcaggcctgttaagtgacccgcacacgaaaattgattttcctgtgcggacgatagactagcgccggtttccccatttttctgtgcagttccacttatggatcgcatggaaacaaaattttgggggaggggggcggggcggggtccagaaatatcaatcatgtagtagtgaaagaacattatgttttcccaagaacattatggtttcctctgggaaaacattaggagatatgcactccttaggaggacacgatcagtgtataaaattgtttcaagtgatttacacattcggtttatgcagggaagaaaaagtcaacaatcagaattgactgattcatcggctgataatagttttcaactgcaaataaaggctggcactaattgagtttgtatttgctattcagcagcactttatcatcttgatcttttttgccctagagaaggctgcctccactttttttcttagctgcatagcgtgatttgcagtagttatcttctgttagttttagggcatgttcaatggcagatacgagtatgatcttttaaacaatataagattatttagagaccgtgtctttataattgttgagacgacaaaggctctaatcattaactcaaaaaatattccttttgttaatattctttccatctttttaccttcatgcaacaatatttccatattgttgtgattaagagtcattgttaagctgttgttatgcatgacaacgatattttgtctctcctctttctttttcttccatgtcaataagtattcctaattagcaacgctaaaagaccactattgacaactattgtacatgcccttatgttgcagcataaaaaacagataagtttattacatagatttgttaactatggtaattaggatagggatctcttgtatgcaggaaaagcatgcccttgttgggtatataagggggaagggcttatactgcatatataatgggaaaagtttatagaacaaggctgctattcacattggaaatttgcccttttttactttggggtgttcttgaaaaattgatttgattatccttgagggtcgtacaagatggattcaatatttggtgcttgaagttgatgcatttgttagtgttttttgaaagatctagatagcacttgatcattatttccctttttggaaccattatcctaggtaagactaatttcataaagtatgcttccttgctgtcaatattccaaaaaatgttccccccgacatgatgcttgtagtttacggagatttcgaaggtggtgcagaatgcttttataaggaaaatgcatttagcatgatgcgcactctaaggaaaaggcttgacatggataaaattatgacaaatattttcaatattttaggtaattattgtcgtgggtaggtttctgcatcgtctgacatgaaagacagatcaaggtgttaacacagtgaattgatagtgttaccgctaacatatagcattacccaaattcatgtagatgttagaatctaaacatatatgtactaccagacttaggaccaaccctgtaggagtgaaaccgtcagaaaaattgatcttaccgtcagaaaatgtattcctgtaggtgcgccatcagaaatcgccgacagaaaaaagaccaaggagaaattcaatttttctgtcggtttcccgacagaaatgatttttctgtcgggtattcctgtcggttggctcacagaaaatatcaactggcgtcaggtttgtgaaatgttaattgtgacgtggacccgtcaggaaaaaccatcaatcaccgtcagaaaaaatgtgttccacgcccaaaaaaaaaaagaaaagaaaagaatataatacacatgccaatttggataaatatatgaacatcaatctcaattcaaacatcaaaattcaagctttcaaagcttacatgaatagtccatccaagttcagtaccaacaaattcattcaaatcagagttagtaatacatgtacaatgtgttcagttactcaaggaagttcaatgtgttcagttacaattgtattcatcaaatacatgtacaaggaaattgtcttccagcagcaatccaagttctgtggtgcttcaaccttggccatgaaaccaaaaaggttttaaaaaagaggttcagttggcataattttcttcatcattacaaaataaataacaagcgagcaagataaatttatctgtacaagcatgaaaaatgaaatacgacacttgaaatgataagtggacctcacaattattccagtagtactctgccaattcagataagacatgaatgctaggatcaaactcattagatattggatgagaggcataccttgatttttcatgttgtacaacgttctacagatatttaactgcggcatttaagctgcaagctaaggtaaattataaatggtttgtacataataaaattttaaaaacaaagagactgaaattaattttgtttagatggcatgtatatatccaacacatgtatcagtatgtcttgccaaaagatatacatggatttagacgtgtgaagtatgtatatgcactaccagagtacaagagactggaaagcactaatgtattcatacatacaaacagagctaaataaatgttttgtttgttcctgaaacagagaaagcaaaacactatagtgttcatcattcacacaatcattaccatgaatgacaaggcaaaaatagcataagaaaagcatctgcatctgcattctaactagatttatttttctagggaagatattaaccaacatctaaattctaactaaatgtgaccaataaaagcatagtctatgataaggagtaaattctatatccaattctataaaaaaagaataatatccagatatattatcctttaaaattatcataaagctagtatcataattttctaagccactgataggttaattccatgtcaaacaaatcaccgtttcctagttttgcatgtagatctcaacataagctgcttcaaaacagcaaaataaaatgggggtattctgagtgagaagccaaaaataaatttacctcacattaatattccttggtctttcacccatccttcatagtgtcctccctatgcactatgcatttcagtagttaaatactctcctaaagagatggaaagacatcaactggcaggaagctcacgattcgtagaaagaactaggtctaatttgttcagctagcatagaaattgggggatttgtagagtatccaaaaacacaccaaaaaaaacttcttatgctaagaggtctaacaaggaaaatagcaacagatcttagtgatgcaccaactcagatctggacacaaggaaaggcaagggcggcttttactgaccactaacctgattaaaagagatgaggcagtgactaccgaggatcgggtggaaggggaatagctggcgcctgctctccccatggcaggtcgacctcgacgacgcggggtggtgtgagggacggcggaccgcttacctcgaggccggatctggagctggtgaagctagggtcgtgggatttggagtacccaaactcgggatggttggatccgcgacctccgagttcagggtgtccggatctggagcacctgagtccatggtggctaggaccggtcaccggaagggggagggtcggcggaggctcgtcgtcgaccggagatgagcagcgacggatggcagattgacagggcctgtggatggcgcagggcagcaacgtggttccccgttcatcggaggcgccgacactaggaccggcatcagggagaatagagagagaggaagagtagtggcggcgagccactgggaatgaggggaaaaaatttaggcattgtttcgataacgggattgggaaatgatttctcacccatcaaaaggtatctttaaatcctaaccattcattcttcctcttccatttaatcataacccttcattcattttccaatcccaatcctactctccatttcccattatccaaacacacccttagggcttcggttggatgagcaagttttatacgatggttatatggcccaccagtcagcgctgatttttctgtgagtcctagccacaaccgacagaaatataccaatttttctgtaggtataagtaaaccttcacaaaaactcattatttctgtaggtcgtctgcgggaccgacaaaaaatatctcagcccacaggcttgccctcaagtctggtaatggggtgtctaaaatcattaacatatatatgaatgtggacaatgctaaaatgacttatattacgaaacggaaggagtattcatttgtataattgtatctgttcgcagttgtgttgtcgatacaagttcataaggtctatgtatttgacatggtttcgattacttgtttcttaattggattggtcattacctatcatgtggtattaacttatatgcgaccttttaaacctaaatgaaactaaaggtgatcatttgatcagcaacagctagcacgtgttttttggttgctttgattaagacatactgtgtgcgcaagtgtggtattaacttgtatgcaatctttgtaacctataaatgaaacaaaagatgagcatttggttgacaacaggtaacatgtgtttaatgcttgttttgattaaagcatgttttgtgtgcagctgtgtgcgcggcgtgtcgtcgcgtgttcgcgttcatttctatttaacttactgttgttctttctaactaacaaacaattattcttactatcgttaaaaaaaagtgcgagaatgctcgatgtcaggcgcccggcgcgtggggggaa

SEQ ID NO: 7809 - DNA, 17394 bp, Oryza sativa
agcccctaaatagcaagatttcggagggctatttaatagcccggaggatccaaacagagcctatgtcttattgatctaacacagtagagtttcaagtatgatcattcactttttttcacgagattcatgttgattcgcattttaggccctgtttatatttcaccccaaaatttttcaccctatcacatcgaatgtttaaacacatgcatgaagtattgaatatagacttaaaaacctaattgcacagattgcgactaatttgcgagatgaatcttttaagcctaattgttccataatttgacaatgtagtgctgtagtaaacatttgctaatgacggattaattatgcttaataaatttatctcacgttttactgacggattctgtaattggtttttttattagtgcccgaatatctcatagaacaccctatataatatccgaagtgacagtaaaaattttacacccttatatctaaacaccccctcaaacaaaaaaacatcgcaaacttttgacaggaaaactaattagcgcgtacgcgccagatgagttagcggcacgcacgtacacgtgtcgctcacacagcgcagcgctaccgttattataagtaaaagccggaaaccagaagaaaaaaaggtgatgcgtggttttttttttcagattagcgagattagtgctgattttttccagaataattaggccgtaatctgcattcaatgattttacataattcaaggatttcaatgatttttaaaaaatcgacccaaaatttgaaactttcaacactaatttaaaaactttcaacttatatttaaaaatttttaaatcatattaaaaactttgaagtcaagatttgaaaactttcaactcaaaatttgaaactttcatctaaaaattcaaaaactttcaactcaaaatttaaaactttcaactcaaattttgaaatctttcagctcaaatttcaataactttcaactcaaaattcataattttcatctcaaaattgaaaacttcttatttgaaattcaaaactttcaacttaaaatttaaaacttttaaatcaaatttcgaaacctttccacttcaaatttaaaactttccactatttttgaaaagttttcgactaaattaactatatatgctttttaaagactaatgctaatgatggtaattaacgctaattgtcgtaatttgcggcacgaatgtcgtagcactgtagcaggggcgcgcgttggtgggctgaatgcccaggagtcggaatgaggctgctccactggtgtaccgtataataaccaaaaaagtgcgcgctacatattctactcgcgaatccgcgcgaactaggtgtcgcgagaggttgatacgcagtcactgaagtccccgttcgcaaaagagcaaaaacattaaccgcacgcgcaatcacaacgaagcctctctggtcaactctcacccgcacgtacgactacccacccacccacccccaccgaagctactccaaaccagtataaccaccgggccccacgcgtcatcctcccgcgcgtacgccaccgtcgcgtggcaaaagttcgcgaccaatctatacctcgctcgctcctcgctagtccaccaccgcacctaacagccgccaacctctccctcgactcgtcgtcgtcggcttcgattcgatcgatcgaggcgaggaggaggaggagctagggtttcggatgggaggaggaggagggttgtagaagcgcgggggcaggctgcggtggatcgtcgatgggggagcagccggcgcggggggcggcgtcgtcggcgtcggagtcgtcgccgctgatcccaccgccgtcggagatcgacatcgaggccggggccggggaccagttccagtgccggatctgcctcgagaccgacggtacgcgcagatccacccccccttccgcccgcgaggcgcgaccttatcgtgcgagggggatctgagtgctttgttggctcggtgcgtgtgtgtgtgggtgtgtgcagggagggatttcatcgcgccgtgcaagtgcaaggggacgtccaagtacgtccaccgcgactgcctcgaccactggagagccgtgaaggtatgaagcttttgatccctcgggcctccccgctgatctcccgcccatttcattggttgcacgttagctgttaataaattgggggagctgctgtttgctgtgcgctgagagaagttggggggttgtggcattcttggtagataagataccatgtttaaacctcatttgttgtgataactaattttagcgttatatgaatgctgtgcctaaaatgtagtttaggtgcgatttgctacaatttaagctatgattcttcataacgtagagtatccagagttgcctttgtcaacatttacgctttcaagatacatattttaattgcacaaaaattggcaggtcaatgttattttgctaagctttgtttcgtaagaaaactaactttgcttggcattttctttgtctcatgtacaggaaggatttgccttttcgcattgcaccacttgtaaagctccttactatttgagggttcatgttcacactgataggaaatggcgaacattgaaatttcgtttcttcgttactagagatatattattcatctttgctctagtgcagtttgtaagtccctctagatactctttgttagttctcgattgtctttattctaatgaatgataaaagagtttgttttttgttatttatttgttcaggtcatatctgcattagcgtatttggtgcattttattgatggattacagaattactggttgaggacagcctgggcatttgacaatgaagttagtttttattacatatgtggtaaattactttatcatatcaaacttgttatttcttgcacttagttttgcatgattgtttgatgaaattgtaccctgattgaaataattatcatgatagttcaccatgcatccatataactcaatcacatgggcgctgtaggttttacaaggttaaatgtgcagtgcgtacacgatgaacctcaatggctcaatcttgtttcatgtatgatgggtgagatgggcttgtaaaaaggaatttaagtgtagaaatgtgatatgagagtgaatgatatatgtatcgaataggaaagagcaagctacttttccctgtttaatgcatggtaattgttgtcacttgaatatgttatagtttgcttgtgacttattcgaggcatgtgtccttcgaaaccaagcacctctgcttctaatttgctataaccctataactaacaagaaactcctgacatgagctgctcatttcacccatttttacattaatgccttcagtttgattaattctgagctcttgctgaaacatcgcaatgaacagttttatagacatctagttaactttgttcggctcaataaataaatgccaataaattaactttgttcggctcaataaataaatgccaattatatcaaccaaactacctgagtgtagctcacatggctggattaatcaggaacacatgttcgttacatggttgagttgttgaactttctttgttaatgaggtgttcacaagtgataaagatgaagattaagtatgggcacgcaaaccaagaaagccattaatacatgattaattgaattttaattattttaaacttgaaaaatggattttatcgaatattttacagcaacttctatatagaaagttttcacacgaagcacaccatttagttgtttgaaaagcgtgctaacggaaaccgagggataatctgcccctttcatcacaaacgaacggagaattgggcaagctaggatattcatctgtatcatagccaagtatgtaaagaagtggatatatgatatgcatgtcgtattctccctactgcgtgaattcattgggctctgttacttatattatgaggaactaagatttgccaattgtgataatagatattatgtggaaaattcatatatactcactaaatctgtgggaagactcgctataagattcaccgtaccttctcttgcgcatattagtttaatctggactaaatttgagtattgttcttatggttacaggggcattgctattttttgctttgcttgggttatcaggatgcttcataacttgttatgaccgaagagtacggaatgacctggcacagccttgtcgagagttatgtctttgttgctgccaaccagggtatgcttcaactaatttagcaattgtattaacaagctactaatgctgcatgcttgtttcatcagcactgctcattgttcttttctgtttcaggatgtgtgcagattgccatctacctggtacgctttgcatgtggacagattgcactacatgctttgagggctgtgcaacgacagctggagagtgtggtggttgcttgggtggtgctggagaagcagggttaccattgctctttatcatgggagtaatcgtgcttggactattcacagttatcggcattttctacagcgtcttggtagcaaccatggtgggtcagcggatctggcagagacactaccatattcttgcaaaacgaatgttaactaaggtgagttctgtttgccgcttatttctcagtctttgactttagtttatttccttctgcacttaagctgtatctggttcttacaggaatatgttgtggaagatgtcgatggcgagcgcgcggattggtgtccgccccctctcccttcggagcatgtccaacagctgaagtctctggggcttctataatctgtagcccatgattataccaatgatgaccttaatttaggacttgcggcactatccagctgtacaggagatgatacaaattaagcggtgaagcaggcgtttcggtttttaagcagccaaatgcacaacaatatcgtttgtctttttttgtacattgtaacaagggaatacctatctgaaaaatgacaacagcatttgatttttatacgatgaatggtttcacagttttatttcgatgagctcatttcttgtgcatgttaggttggtgatctgaacaagggaaaatatgtgcttctggtattaggaaaccttgcaatgagttttgtctggtagggatgcctgaatacctgatgctctgtgtttgatactttggttggtgacagcttgagtagaaacgtagacaaataattctccttttaaaccagatgacaatacggtaaaactgtatttgaatttgaattggtaccagaaaaaccaagaatgcgccttttaaaccagaatagaggaaatttctactcagtcagtagtcttcaaagtgtggtaccaataccgcaactttttaagtggtgcttaaaaaaaagataaccgaaaaaaagataattaacttcacaaaactaattaaattatcgcggaactaaatatttaaaatatactttgattaaattatcgtaaaactataaatttaaaatgatatatcacaaaactacagttttaacaataaatcacgatacatcatcttaaatttatatttatagttttatgaaaggttagtcaatatatacgtagtttgaaagaaaaatactttttttaaaaaaagctggaacagtttgaaagaatttggcccatcgggctttgatttcacctgcacccgcaacgcaacacgcaccacttcgctctttctctcgcggcgccacctgaaccggagccggaggggaggagatctcggcggccgagcagaagcggcggcgctcgccgcggttgcggagggggaagaagaaggcgcggcggagcgtagcggagggagtagcagcgaggcgagcgccgagagggagagatggatcccgacgcggtgaagtcgacgctctccaacctggccttcggcaacgtcatggccgccgccgcccgcgactaccagaaggtgacttctctcactcactcgcggaattggctgtggaggttggtgtcggagccgggcgtgctgctggatggatctcggcaccagcgggggggaatcgaatctcggttcttgattgggagtggggttgacgggcggttgattcggccgcggagcactcggctcagctgtgctgcaggcctgcagccatggattgtggaaggtagaggtaacggggaagatgatctggtaacacgacaatgcgaatttctcgtcttgggaaagggcaggcacatgtatttgggcatttagcaattgggtggtattagcttgatctggtatttggttgggatcatggggaggtttagttcataaaggggatgggttagctccagtcctgtgttgatgttgcagggtttgaagaccagtgtattccatgctgaataggagtatgctgctttatgacacctcagtgtacacaaaaacaatggcgcttctcacgtgtagccaataaacatggatcaatttgagtataatattttggaagtttagaataacaaagagttggagtggatcatgatacatctggccgttcttttacatgttcaaaatgggttaccttcttaggccacgaatgcatgtcatgtaacatttgcaggtaatccttttgatattcttcctagatttacagcaacaaaatgtggtgtttgcatcaaagtgtagaggaaggtataactgtccttcatgcacacacttgattcttcactccttgcaatgtgatttgcaagttataatcttctctgcttatttgtgtcaactgcattttatgtccttgttgtaatgggggtaaaaaactgatccagcgggttgggtcgtgaaattggctggttggtggccgtggagccagtgtgctcctggatctcggaaccagcgcgtgatcaaatcttggtttttgattgggagtgaattgtagtctggtacacctatctttagaacttgtgtctgatttgcctccactcagctttgccacaggcatggattgtggaaggtataaccatagatcaacgtggaggatgatcctggtaacacaacagtgtgattttttgtcttgagaaagggcaggtgcattggatttgggcatttggctatgggagtggtgttagctcacgtgaaaagtcttgccttccagactgctctgtcctggtgttgctgtagcatgatccaatctttggctgggaacattggggtgggggacagttcattcggaggatggattagctccagtcatgtattccaggacaacaaatagagtgatggtgcagggtctagagaccagtatattctatgctggataggagataatgctttatggcacctcagggtacacaaaaacaagggtgctcctcccatttaggcagcctataaatgtggttagattggaatatggtttgcaagtttgcaataatcaaagttgcagtggatcattctccattcgggtgttcttaacttatgtatgttgaaaatggattaccttctgatgccttttgctctctcatgaattcatgttatgtaaaatttgtaggtattcatttttctatcaaaatggcctttctgtatattgacagcaacaaactgttgggggtttgcatcgaaagtatagtacaaaaggatataactgtcctccacgcacatcactcgtttccattatttatacttgattcttcactccttttgatatgattggcgagctatatcttctcttattgtttgtgtcattttcatttatgtccttgttataatgggggtgaaatactgtatttttacactcttgttccagtgctttgaacctcttgcattttttaaaaacaaacttgctttcaaaacaggctaatactactctctctgtccccttttgttttttttcctgtatactgacatagttaacatgttaggaaattgtagctaaagagaaagcccaagcagcaaatgcaagccatgatgaggttgatcttgatgaattattggatgtgagtttaactatagtatcttctatatttctcttgttttttttccttcagtttgaagcactgattacctttttatctatcatgctgtggaactacaactataggatccagagcttgagaagttgcatgcggagagaattgctgctctgaaggtactgatctgcacattgcccttgaaggttgtgaacctgtgtggataatcttcattttaagttattcattttcctgtgcataacagaaagaggtcgagaagcgtgaagtgctaaaaaggcaaggtcatggtgaatatagggagataactgaaggggacttcctaggagaggtcactggcagcgaaaaggtcatctgccatttctaccaccgtgaattttaccgttgcaagtaggacataatttgttcttttaaaaataagttgttttataattgacctgatgataattaattgaccctgatgataattcatggacacctatctaaatcttttctaggatcatggataagcatttgaagacccttgcaccagtctatttgggaactaaattcatcaagcttgatgctgaagttagtatgctatctctattagcatccagttacttgtattttattacaaagatgatgtctaatcttgtaaataactactccagaatgctcctttctttgtcacgaaactaggaatcaaaacattgccctgcgtgatattgttcaagtaagtgcataaactttcatcattttacccatcggatttggataacgtgtgcttaaatgtttggtgctccttgctataaccttttcatcatgcgaggaccaatccaatagtcagggttctgtttttgctctcgaactgaaattttgttctttaggaagggcattgctgttgaccggttagttgggtttcaagaccttggcagtaaagatgatttttcaacaagagcgttggaaaatatactcaagatgaaaggtatctctattacatctccatacacaattctgtcaaaacattgaaatgacaaatatgataacacacaataatgtaggtataatcgacgaaaagaagaaggatgaggacgatgaagacgacgaaaccgatatgtcaatgaacaggaggattaggtcttcaaccgctcaagattctgattcagaatgaacaagaggtgatacactccactgtgtcatcaagtttcttttgcactctgtgtgtttatgtaatatgcattccgagttgtatcaacccagttaggaaacgaggtatttgaaaatgcaatagctatagaggaatttattttgtgtactgtttagttagtttttcattcatactgccaaagtgccaagctggcctatgcgagtcggtacgctttaccccaaacagtttttcttttctggccatcatgctgtcaatgttttacctacaatacctgattggttgctatacatgaagtatcacataaacatgacgagctaagagttgaaaattggacgtaactacacagctagtgatagccagctaccactccatctataagagatactatctacctatatttcaaatgcaattttctcttaaactactcacccgatctacgatccgattacaccgttgtgttcgtaacaattaaatctttacaataagatctcacatgattatattttgatgaaaaatcataaattacttttatgatatgtctaaattacttttagatttcactaagttacttcttagatatataaaagtaaattcagtaaagcctaaaagtactttacatatattatagaagtaacttagagcaaaacaaaggtaactttggcatgtcatttgaagtaaatccgttgtacagataaaaacatgactctatctagaaattaaattaatcagcacaaattatagaattaactaaaaacaataataaaagtaatcacctcagagcattatgaatgtataggaagtattttaatcaaatctaaaagtaagttatatatatgataattatatatatgatagtttgttcaatgaaaaaaaggcattaattaaagttactttccttttgttataagttacttctataatatatgtaaattacttttataatatatgtaaattacttttaggctttacttaatttacttttatatgtctaagaagtaacttagtgaaatctaaaagtaatttagacatatcataaaagtaatttgtgattttttattaaaatataatcatgtgagttcttgttgtaaatatttaattattatgaacacaacagtgtaatcggattgtaaatcggatgagtaatttaagagaaaattttatttgaagcatagatgataggaatatttcccctacttacttaatggattagtaatatagtaaagtaagattcttcaagttaacacatatctggataggggtcgctcgttatgactaaatcgagagtgctctcgatttagattttgcgttgaaaattaccatctcaaaagcaattaaaaaaattgcacagctacgaaaaggaaaaaaaaagaaaagaaaaaagaagcaaactttcgtgcttctagaatctattgcctagacaaaggttgggtgattatgtgactgcaacaaaattgcgaaaacgcttagtatcgtacgtccgataacaacgaaactccggacgcgtagggacccacatcagaaacccatcccttctccaaccttatcctattcttcctcatccaaaaccaaaaccatttcccccatttctctcccctaccatggacttctccggcggcggaggtggaggcggccagcggcagcggcggaggtagcgtcgcgtccgggagggtgcaggcggagcggtgattggagatcgtggggaagctcctcgcggcgagggagttcgtcaggtgcaagcggttcgcagagcgcgcggtggaggtggacccgcccctccctggtgccgacgagctcctcaccgtcaccgacgtcctcctcgcttcccagtcggtcctccccttggtccacgccgacccgctcgctgtcatccagcttccctcggccaccaacccggccgaccacgctgccgtctcccacgcctaccgctgcctcgccctcctcctcaggcaggagaccaacccccacccgggcgccgatgtcgccctcagcctcgtccacgacgcctacgccatcctctccaatcccaaccgccgccctccgcccgccgttgccatcgtcgtcccccacactataaggttggcgaaggtgaggaggcttgtggcaacgtcgacctagctagcgagcattgttgcacaccatatgttttttgtgttgcacatagtgtgtttgtgatgttgtaatccgtcttttctggatgtttcttaaatcagtactggatgttgcatttggtatcttcggatgttgcacatattgggttttgagtgttgcattcaattgaaacatcttcaataaagcgatgaaacattcttcagtgaaagatgaaacatctttaattcatgttgaaacattttttttcgagcgatgaaacattgcaacatttcatttaacatacaatgaaacatcgttcggagatttcatgttgaaacattttttttcgagcgatgaaacattgcaacattcattctacatacattgcaacaccgtccggagatttgcaaatctccggacgtccgatgcgtagcactctccacaaaattgatgacacaatccgaacatctatctatactaatataaaaagcaccagttcatcaaacacctgtcttttctatcccttagatctattcatccaacggcttgtatcaaaatttggatcaccttgcaattagcgatctcccactccgcttcgcgtaaccagcgattaaaggaaaaaatagtgatcggattagcgttcttgccgtccttgccaaaccgccgctcctccccgcgatggcgaatcaggatgtccgctctgctggacgtcctcgacatcaagatatctacaaaatacaagtactgcgaattacgtgctgaaaaacccaaaagggataattgttccgaaacgacaatacaagcctagaatgtttatggcacgaaatcaaaaagtacaaaagaagaaatttactcttcaaatagagaaggaacaatttcccctagatccaccacgtccgatatcacgtcctcgcgtgtgtcattcgctgccccctgcgacaagatctctttaagatccaagttgggctgcgcaagcctcacacacgcaaggagatggcaagccccggtgtggatcccgttggcgatctcatcagacaccttggccgcatgcttcgaaggaattacctccatcgcttgggccagggtgaacagcgaagatgtcaccgaggtctcgtcagggtgctccaggatcttggcctcaactccgcacgcccccgccttctggtgaaggcttgtgaagctctgacagagcgaagcacggatggaagcgaggtggtcctctaactcagacatccgcctttcgaggccttgccgctacgactcgttcccggccacgagttccttcatcttttgaaggtcctcgcgagccacctccagttcctgctcaagctgggccacacgtccatctgctgaggtcacgcgggcgttcgcctgctcgatcacccgagccacccccgagcaccaacgtcgaggaggcgcttcatctcggccatcatctgcgtcaaagtcagtggctcgatagcagctggcggaagaggagcaagtaaggctatgacgacgtcaggagcaggctcggccgcgacaggggcatccccgattacagcagtggcagtaagcacagccgctgcggtagtcgtgctggttgcgacttcacccctgctgtgggccaatgacgtcgaggaggccctgaagacatcacatcgtgtccgtcagaagacaatattagaagggaattcgtgaaggagaaaaaggttccatttttttgctcacttgttcgccgccagctttaccagtcttcttctcggggttggagggaggttgcccgcgtcctaagtgagatggtaaaataagaatctgctcgctccttttcacgacaacaatacaccgaagacgactcacctcggaaccgctcaccttgcgacgagacccagtgccggtgactgtggtcgcccacctcttctgtttcgacgtcctgctgcccccagcagcagcgacgtcggaagcctccttggagactttctccttaagtaaggcggaagcttggtgatccacgagtgggccaatggtgtccgttagaggtagagcctgcaaagatgaggtcatatcgttttctcggaagaaagaggaaacggatgtcaactatgcttacgttgatggcggtagctcgttctgtgccaccttgctcacagagcggggccaggatctcggccgccttcgaaggcaggctaatcatcacttggcacaccctctgggctacggtggcgctgtcaagacctacgataaggaactaaccttggttagatctgaaaaaactgtagacgcagaataaggtaacaacgcgagaacaagtaccccgctgcgagatccgggtcacatcgtccggcccagagtagtcataagcagggtgaacacgggcttgcagcggctggattcgacgacctatgaagtcgacagcaacctcatagctggtcagtccttgtactcgcagatcatctatgatgtccacgaatgcttggagagaagaagtcaagggaggtttcgaggtccactcttgagatcactcaggttggttctcgggaacgacaaggacaggctctgagttttcgatctgaagttaaaaccacctcgatcttcacttgctacgagataaggggtattggaagggaatgtatttcgccttcatgccatcctgaaggcgaaatccgtagcatccagagatcctgctggattccatccaatgaagctcgtagtagtagcagaagagatcgagaaaaggcactaccacaacagagatgagcgaaaatgctcaggaaaataatcgaattggggttgagatgaagcaaagaaagaccgtagaagttcaagatcagcaggaggaattcggaaggtggaggtagacaaccacaataaacgaaatcctctaccactaccatacgacctaagatgggatggggttcagtacctcctttgtcccgctccatggtcccgcggccgggtagagcccccttcttgcagtttcttcatggcggcggtgtcaaaagatgatttttccagatccatggccgccagaagatcgccgggaagtgaacagggaaaaaaggctagggttttttggggacggaggggtcaagagcgccgggaagatggaagaattttctcgcaaacagatttgaaatggatcccaaaattcctttaaataggcgcacaacaacacggttcgtatcctaaggaaaggagagagattgctgccgaaaatttctaaagctcgttatgggctgtagtttagacttcaatttaaattcactcacgaccgttgaacttccttcagcattgttgctggctccgtgtctctacggttttataccgggatcgaccaagcgagtacgacaacgtgctgacgagcgaagttgcgcatgacaacgtgagttcatttaagctgaagtcgggggctactgtcatggttatggataaggcataccctctttccttggacttatggaatatacggatacaacataccatcacaaatacgagctatctccgtatgcgttaaggaaattcgccagatgttatggaaaatgtctctacgggacaagcgacggacgaagtcctactcggaaaggatagggtcttactatatcgtacgagatccgatgtctccgagtcctacttggagatcaagatgatccacggtataaaagggacccctgagagggattcaaggcattgaatctcaccaccaacacacctgccatagtttacgaagccggagcacgcagagctaagtcaccgggagatctcgtcgaatccattgactacaatttcatcggtatcgtcgagttcatctattcctattgtaatatgtggtttcttccatataatctcatataaattggacaagggctattacttgataaggggcctgaaccaatataatccttgtctttgtgtttgcttgatatcatactacgtagatcctcataccagcgaaccccaataccctaatcatccggtctacgggtatcactcgtcaacagaatgagcaacatagaaaaaactgcagaactcctagcattgaaaattaaatcgagacactatacaagttgattccaggaaggtatttgtaaatacaatattttcttacggaatatttggatgtagaaacaaatacacgttacaaacattgttgactagaataaaaacggttaactagaattcatttcttgacaggaactaactagaattctagaattactaaaactgaaatttggttaaaaatattttggcagctacttggattagtgaatccttctacaggcaataattaattgtcagggatcattgaacccaattagagactgaaaacagatatttgtttcaagttaaaatttgctaggcaaataaatagcatcattaagtaggcaaatattattagaattggtgaaacacctttatatttattagttttcttaggaaaacagatgacattttttttacactagcagagttttgggagcacagcagacgaaacaaatatgccacagctcaacaaaagaacaatacaagaatttgtaaatagttcagaaaatcataaaaccaaaaagactacagatggagtaggtacaacacatcgatgacacactggttccctccaactatggagattatgtcacgacccgaggccatgacgggagaaacaccaccgaaaagatagccggacggcgttggctcctagagaagagatgtagatttagagtagggagaagagcattattaggagggagagattacactaattgatattcattgcttaacttgagatgaatacaaaccatcccttatatagagatgatatgatttgacccttaagaaactaactcagactaactatatctaatcttatcgtatctcctaccaactgctacagtactcgaggtactgttcatccacttggacttgggcttgtgggcctcggccttctgcccaatgcctatgacactacaacctccttttgagcagcttgtcctcgagctgcaacatatagcagacttctagacgtacacgactccctaaataaaacttaatataattgctgcaactatttgtcccggaggttgtgacccccaagatgcagccctgctcgtcagcatcactccccctcgccaacaacggcgccattgccaggaccagtggaggatcctctggaagcgtaccctgtccctcgctccctggctgttgctgcaatctaatggccacggaccacgtcgacttgaacgacaccgtggagggaatcaccacccatggctggttggggagcaaccccttcttaggtggtcacccatgggtgaccttgatccgcttgcaccacttcaagacttgtggatgtggttgcagtggagaggacagacaacgctgtctgcatgcctccaaacccgccggctgagttggaggtgtagagatcggtgacggcatcaccatgcccactgccatgtcctgctctatggcctcctgcttgctatgccattcctctttcttcaccagtttctcctgaattaaggtcgccaattccttgagaacgaccctcaactcctcgatgcttttaactccttgatcctggttgtggaggtctgttcgtactggagatacaacagccatcgtagatgttgcggccatggaaggctttttgtgcatactctgcatccgcatgagattggaatttaattgaagcctccacatctgttctcatctgctgcatgttgatcttctctgctccataagcataaatgttgatgcgaaaaacatacactggcctgagagatttgcttaactctagtgcaggacctaaatcttgcttttgggtttaagggcgtgccagttggtttgatcctgcaaccaacaagaaacaaacaaaaaaacatagttaaatccataaacggtagccgatcggccacatgctgatgacatatcgtttgtaagttagccgatgtaacgtgaattagatcggcaatgatatataaagcaaaaagaaagttaaatctagtcgatcggctgtagatattaacagtatataatctatagattgaaatatgtttaaaccaagtgattaggatagatcagaccagcttgccgagacagtataaatcacttatgtctaaaagtacttcaatgtaaagattatatatgtttatagcatagccgatgttgtagatttaacatgtatcggctaatactccgacactactttatactaggatatcaatatagatcaaatatattaaacaggaattaatcaagtgttaatgtagtttaacagattaatagggctgcagga

SEQ ID NO: 7810 - DNA, 9020 bp, Oryza sativa
acactggcgccgtgcccatgccaccgtggcactagggctgtcgtggaggtgctgactgggcagaaagggggcgccagccacactggcgccgcctctcataccacggcgccagcatagctggcgcgcccctcctctgtgccttaaaccccgtgggccccaccacctttctcctccccactcccattttcgccattcccagcccgagcagcgagctgctgttcttctccctctctctccccctcacctctccacctcaaatccacttaatttgaagccgtttttcgcgggattttttgtggaaatcgaagagaaaggtagactccttcattcccccctctttttttttcatttttattggttgaatttgtagatcggtgggtaaccctagaaccccttttttacccaaatttgtgatttttagcatttgttcttaggattggcttgttgtagtgctacatgtttgcaatgtactcattggtgtcatgatttttttaaccatatatgtggtaatgttaatttttggatggtttggttggatggatggatgaaaaattatggttgaggcatgacggaggtttgggctgtatgataaagtatttgtaatatttcgatgtgtaatgcagtagtaaacttgttgatagttgtaggtggattaaatatttttttggagtagtagctttgggacaatttaagttatgcattggttataatatgtcggtttggactacgtttaggaatgaagatttaatttttgttgcaaagttacatttgattttttggtgtagatggatagacttgttcgtgtttactacggtggtagagtggtggaaccttatgttggtggacatgttgagtttgaggatatgtcattgaagaccattttgtttcccacccacccaactctagatgaactaaggtcacgagtgaaagaagttcttggatggaccgaggataatgtggagattcgtttttatgggagatacgatgttggtcaagggcataagtatatattaaatgtgataggtcagttggaatgggaagtttactttgatttggtaaaagatctcagtttagatctctagaggtgtttgcatcaaagttagttcgtaccgtagaaaatttggatctaaacaaatctccttcttatcattacgttgagaagaattttgtgacatattattctcgtcgtggagggggtgcaagtaagagtgagttggtacgagaagacttggagggggaaggagagaagaagagacctttgcttggaaatgatttatgggaggcaggaccatcaaagagacattgcggtactgatgatgtggatgcagcgagggtgatgaaaagggagttagtacaagaggggcttgatctaagtgaacatttgtcggcgagtgttcattggtcgtcgtacggagtcaaccctgaatacccgacagaagtagcaggccaatatgtgaatccagatgattactttgatgtcgaattgagtggtggtcacgattctgtctcagtagaagtcaatagagatgatgttgacgaggaggcaagtgttgagcaatatgatgttgaatttgctgaagactctgatgatgaccgtccattccctccacttagtaataatgacaagttagcattagaggaatgccgtgcgtttgagaaggtgtttgggaggaagccgggcattcctgagtttagggacctaacacatgcccatggtgcactactagatggcggcatcaacctagatcagttgccagaaccattccaggtggatggtctcagaaagggtttagagttcccatccatggtcgcattgaagctatggcttcaggagtacgccatcgtgcaccatcgtccataccgtgttgtcaattctgccgcaaatattaaatgtgaaaacccacggtgcaaatggaaggtccatgcaactaagaggtctagtggcacgtggaggatatcacgggtaggtaaggaacatagttgtgctactgccgaaggttcagggagccaccggcaactgacatcaaagttcatagcaaataggttatgcaatgccataaaactgcaacctacactctctgcttctgcgttagctttgtatatatttgaggttttccagtatagagtgaagtatggcaaggcttggagggcacgagaggaggctatgaagctcatttacggtgaatggggtgaagcgtatgtccgtttgcccactttgctgcaagccattaagcagaggaatcccagtatggtctaccacatcgatactcatcctgatagggttgtcaacgttgatggagtgaccaagaaaatttttatgcgtgcattctggtgctttggtccttccattgaggcttttaagcattgtaggccagtactagctataaatgcaaccttcctaactgggaaatacggtggtgccttgatgactgcattatcagctgatgcggaggaccaacttgtacctttagcttttgccttggtggagaaagagaattcacgagactggtgctggtttatcgatcttttctgacgggttgtggttgggccgcatagggaggtttgtattatctcagatcgacatgctggtataataaatgccatgatgactcctgttccaggattgccatcggttcaccactggtggtgcatgaggcacttcagtgctaatttccacaaggccggtgcggacaagcatcagacaaaagagctcctaaggatatgtcagattgacgagaagtggatatttgagagggatgttgaggcactaaggcagcgtattcccgaaggtcctcgtaaatggcttgaagatgagttgttggataaagataagtggtctcgtgcatacgatagaaatggccgccagtggggttacatgacaaccaacatggccgaacagttcaatagcgtgctagttggtgttcgtaagcttccagtgacggccatcgtatcatttacgttcatgaagtgtaatgactactttgtgaacagacatgatgaagctttgaagcgagtccagttagggcagcgttggtccaccaaggttgacagtaagatgaaggtgcaagaaagtaaggcgaacaaacacactgcaaggtgtttcgataagcagaaaaagacatacgaggtcacagagaggggtggtataacgcgtggtggtgttagattcggcgcaagagccttcaaagttgaaggtgaggggaactcatgttcttgccaaaggccattgctctaccatatgccttgctcacatcttatacacgtttatctgattcatgcaattgataaggaatctcccaaccgaatgccgtatcagttctcttcaagagccgttgtgaacacatgggcaagtcgctttgagccatacctttaccccacacagtggccatcgtacgatggtgaagaatttgttgctgacccaaatttgaagattaaaacaagagggaagaggagatcaaaacgattcaagaacgaaatggactcgggtctgggtggttctggaaggaaaccaccttcatgcgttcaacttgatgctgcgccggtgcaaaatagatgctcgttgtgtcaccaggagggtcacaagaaaactaagtgtcctaagcgtccaaaaaagaagaagtccaaaaaaaatttaagtgttagggaggtaaatattttgttttcctactcatgttctcgcattcattttcttttaatatatgtcacattggtaactaacggtgaatttattactttttcatgtaggatggccgaggagggacaaccgccgacttacccagccttagaggcgtactacgaggcccgtcatcacggggctgcgatcgaggcggggagggtatgaatcggcattgattcacttgtgcataagtatcggtagcgtgtatttgacattatattaactaattgatttacaattgctaatgcaggtacttcaaccgctccgagtcagagctcatgccccccagtgttcgacgataggtacatcccgtacctaagggctgtaacgccccgattttcgttcgggattaaaaatcatttaataatgcatttcctagaaattgaataaaaagttaagcaatttaatcaagtgaaataatgggagaattaaaattttcccttaaaaatcattggccgggaatattttgtaatattctttgtgccttaaaatactctccggatttttctgtgaattttcggagctcaagaagtaattataataatataaagttcatttaatcaatttaaataaaaagaaaagaaaataatcttccccttccaccctttcgggctcggcccaaatcccttcccccttcccctccggcccggccgccctcttttccccctttgggccgccggctcagctcctcccctccctctccctctagtcctcttttcctcccccaaccggtctcccctcttcctctggctgacaggtgggacccgcggccccacctgtcatctcctacctctagctccatccccaaccgccgccatggccgccaaatcctcccacgtcgccgcctctcccgcgggactccctctcctgcgcgtgcgtggacgcggtcatcgccacgtcgccgcctcccgcacctctctctcctcccacgtcgccggccagtttccacccctctcgggctcgatcccgcctcccctcccctataaagagcatccccggggcttcctctcccgtttccccctcctccccgagcccgcggcgccttttcccgctctccccgcgcgcgtcccagctccgccgctcctcggcgaactccagccgcgccgcgccgccgctctcgttcaccccgcactgcgccgtcgccctccccggcatcgcagccgccgtgcgcaccccgtccaccgctccatttcccctctccaccttcgaagcgccgcagccacgcgcaccacctctttccgccgccgccgccggctccagccgcctcttctcgcagcttcagccaccgccgtgccgtgccgtcgccaccgtcggcatcgccgcgccgagctccaccccgtcctacacctcttttccctaaatctcccaccaaaattccacctccgctgtccacccgagccacctcaactataccgcctccagccgccgcctctcaccgctctagccgtcgtcgcgcagcgtcgccgcgctccaccgcaccctggctgccactccactccgtccagaaccccacgggagccgcttttccaaagtcaaggtcagctccactccgtatcgccgccgtcggccgtcgtttttggtcgctccgtgccggctcttccctccctaaccgctccaatatcttccccaggtcttgccggccctcggccgcggctccgttgtggccgggcgtcgtcggaacgctgttcccgtcgcctcccatcccggccgccgccatcctttccgccgccggtcgtcgccgaggccgcccgcgccgtcttcccgagaaggcgtcgccgccgcccgttgtcgtcgtcgtccttcccgcgtcggtgagcatctccctcctcctcccctccctttctttttctctctttgcccgccggccgccgcatgcgtgtcgccgtcgcgccgcgccgcgccgccgccggtgtcgccgccagtggccgtccggccacgcgccgccgtctggtcgggttggtcggcgagccaacccacccctccgccttgcacctctaccgtggactcggtccacggtgggctagatccttttgcccactgacgcgtggggcccgctcatttggtggacccggtccaagcccgcacctccttgacgcgctgacgtgttgggcccacctgtcggcgccggcgccccttgctgacgtcagcgagtgccatttcccttgagaaaataaataataattgcgcaataaatcgagtttaattctagaaattcatttaaatggctcaaaatttctaaaatccatatctaattcattcgaactccgaattgagccattcaacttgcaaaattcatctaaaattgagctctacatgtttgtttagtttttatgtactgtttccttggtttttattagagtttttcctcgttttgcgtgccagcgtgtagtttccgtcgtttcggaagtccgcggtcgcgaggaaaaaagttcggaagatcaaagtgaagaagcaaggcaagtcacacattccccttgagcatgttgatcccaatttacaaatgttttactgtttgcaaacaaatatgcatgttttgctaattacatggggtcagggttttacctatctgctcgcttgtgccatgtttacttgatatctgttctttgtcaaccttgggtaatgaatcgactagctcatgttacttatgtgacctagctagaactatatgcttagccatgcttaattaccactagctcagttgatgggataattgcagtattagacctttttagtatcagagtgagctgcgtgctcgagacacctggccatgcttcatggtcgtaattatccaactaaaatgcgactgaatggtgggctgtgggtgcatggttttgctggtcgcacccatggcagttaaggaccggttcgcgggatgccctggaagaacttatcgtacttaccacaagccagcgtgggcaacggctgggcttgtagtgtagcttttctctagccgacgtacccaggcgagggtgggcgtgatggagttgggtcggccggggtgtccggttgatcggcttccggattcaccgcggcacgaaaggggggctgcccgttgcctgctggggacgggggcgaaccctaaggtgtggtgcgatcggttagagggggttatgcgaagggtcctgtcacggcctctttccggtatgtcgtggtggcatgtcggcgcacggaaacgtgtcgtggggctgtgtcttgtgggtacagttgtacacctctgatcagagtaaaactattcgaatagccgtgcccgcggttatgggcggtcgaccagattcactgtgattagtcccaccttaataaatcgacccaatgcactgtagtacaggtgggttggttgggcctgttcaacgtggtgtagcgttgatcagtggagattttaatgttactttaattactcaacagttttactgtttgctaaataaaacgttttacaaccgcctttatgcaaatagccacaaaccgtccttgtgttccccttgcacgtctgcatcgttggtgtggcttgctgagtacggtggttgtactcagtcttgctattattcccccttttcagaagtgtagtgcttctgagctgaagacgaagttagaggaccaaggctcggaccccagttgagttttgcctgtggagtggagctgaagccccgctaggatcgccttttttccgctgctgctgttttcgtttcggtgcgaggactaagtgcctctttaagtattttacgctttatttacgtttggaactgtatattacttgtcgttttgtgtaccctggctggtcctggacagggatttaatacacaaaatagtctggaaatttgggctaaatttctgggcgtgacaagggctgccgggttgctcggggtggccttggtcgtgagcagaggaatgccagtgttcaacgctcctgcgttgacagcacttgtggacagatggaggcctgagacacacagcttccacctccccagtggtgagatgaccatcactctacaggatgtggctatgatcttggccctcccattacgggggcatgctgtgacgggcaggacagagactcctggatggcatgcacaagtgcagcagctgtttggcattccactgaacattgagcaggggcaaggggggaagaagaagcagaatggaatccctatgatgtccggactagagttggatatcaaatggagcacgccccacttagagacagagtcgtaagttttcttgcatttgtcaaagttacttccatttgcaccctagaccctaacatatatcttttaacgctttcagtcgagagagctccttaggagtgtgaatgaaatggggcatgccctccaagctccgaggggtggtgaggacacggagaacacgctccgcaatgttttagaggtaaaatttatttagcactttgcattacttgagttatgcctaacaaacttctttttttttgaaatgcagaaagttcgtcaaaggtgccggaaacttgtagcaagattaggttgcaggtcggttggattggacgacgtgtaccaaccggggagactaccaccaccactacctcaatccgcgcgttcaagtactgctcgacactccatcaggatagaagagcgtgaaggagttggtggctcgtcgtcgtcacgcattaagcaagggaggggaaaggggaaggcgccggctccacctagcgacgacgatgacgatgaggacgaggaggatgaggactatgtcacaccagacgccgaggagatagacatgtcacagcttcccgacgcgcctcaggggacgcaacccacgcaatacaacttgcgatccactcgggcagcgaaaaagaggtaaaatgaacttaccattctcaaatgttatttgatttcccttattttgtttttaaaatgttttaaacattggattttcaaatgtaggtacactccgggctcgcaagcaattcggcgccaacggaagaagtaatttgtatgaagttaatctattggttggtagtatgacatatatggtgcactatgtgatataaaatgtgatggactatgtgaggactatgtgatggacttttgacattgttttttgtgtggaatataggatggactttttgcattgtttgatgtgtgggatatgtgatggacttttggcattgtttgatgtgtggaatatgtgatggactatgtgaggactatgtgatggacttttggcattgtgatttgtgcaattggaatctgttttagtctgtacgaatctgtgaattgtgatttgaattgcgaactgtgaattggtacatttgtgcaatatggatcttcaatttgcagggagcagacggcggcccaaccaccctggcgccaggttggga

SEQ ID NO: 7811 - DNA, 12194 bp, Oryza sativa
tcattgttctcactaaaacataagacaaactatgtgcgaagaactgaccttgtgaaagaacttcggttcaaattttcctgcaagacagtttgtcatagtcacattcatagcatcttgaccacctccaataaccacctaacacaacgaagaattcttgtgattagtagttagaataggaatgggaacaagatgagctgactactcgttacagtaacatctcaggtgaacaattcagatgtggccaattagacatttttttcgtgttagtacaactacacatccatgacagccaacagcactcaaacaaattatatggaattagggcaaatccagggtgaaaagatgtgctggacaggtacataggtgcttttgcacttcctggtgtatattcattgttatgtatgcatgtatgcatgtaaaagtactaattgcagataagaagcatgtgaattttcctcaaaaaaaaaaagaagcatgtgaatgaatcatttgttgctctcgtcttatagtaaaactaatcatagaaggaaaatgactcaaaagtgagaaaaaacttgtgccaaccaaaatcatcaaaaaaaagcataagtaatatccatattcaactaatcaggaggtttacttcagagcaaaataaagaaacagagaccataggcatttcgatcccaacaataacatgttgggaacatatgcagttagcataacataaaacgaagtaatttaaggcatgaccatgtaatcttgtaaaaacattgcatctataaaagaacttgaggaaatgtatttaggaattaggtattgtgacataggtcgctcagtgacacatgtcttgatcagtgtcaagagttcttgtatcccatagctagccagatagaaatgtgcatgacagtaaataatcatatttgtagtatgaagtacaaacaattgaagacatgattatgctagcagcatcaacaaaatatcaccttagcagacttatccaaggagcctgtttggaaaggcgatcaatctgaagatttggaaagtgaagtaattgttttctgatgtccttgttccttgtctgactccttcaggcattgtccagtctgtacatgcataaaccaaacagaatgtaaaagcatcccatgataaagttgatggaaaaacctgttcattcccatacagttacaaagtcagcatgtttaataaaaggtaaaacggcaacaaataaccagcatgcgttatgcataaatgtagcatgtttttggttagtgaacagacaacacaaactaccattttgtcatttgcactatattgccagactcaattcaaatcaagaagcctgcaaggtatttatcaccagttcaatgactacaaacatatgtcatgttaattcatactgttgccatcaataaactgtgacagtcgcacatacgtaacagtgatttttcaaccatatctggtaattttttgactatcaaacaacttcacttgtcagtccacagatacatgtcgaatgctaaacaagagcgctacaggttcagaattatatgcaaattatcacattccggacaagcatcacacacctactagtcaagagtttctagtagcacgagtggtaagtagagataacatatggcaatgcaagctaacctcggtgatgaactgatgatggtcctgttcgacgggccctacacggcactgttaatcctccccaataatcacgagaagagactcttccggctctgcatccacaaccacacacttcagaattcacgcatccggaagcttccaagcggaaggagactgaagaggtaggaagaggagacgcgtcttacggtcatcggggtcctcggcgatgcgcttgacctgggcggtcgccggtcggcaccttctactccatgaagctgtcggtggtgatgacgacgaggccatcgccgatggcgaactcgtctgagcgcgctcttcgccgccgggcttgtgcttccctgcgccgccggggaggaagggtggtaaactggtagggttagggagagaggatggggtgggggatctggaattctggatcggtgcggaaaaaccctaaccgggccggcccaatcacttcttggtatcatggcctcgtgggccgttgggccagtgtatttacatttcgaatgggaccacctatatatttgtcgacaaattttctagtaaaaatttgacagatgtaattatagtacaatcgtagtgtaattacactataacttgtatgtaattacactgtaacttgcatgcgactatagtgtaacttgtatgtaagtttcacgtaattttgaatcgttagatctattacaagatttgttctggtgaggaagaaaaaaatcatagcacacacatatgtgaaaggatttgttcccacgacctctattttactgaaataacatgttaccgagagattcttgaaagttacatacaagttacattatagttacagtgtaattacatgcaagttacagtgtaattacactacgattgtactgtaattacatctgacaaatattagggggagaaatttgatgacaaatatctagcaaaatcgtttcgaataagttcacttgagctctcttagcttgtcatcgagtttaaatcaaattcatgaactgtaatagcagacataacgtgaccttcaaattgcaatatcgtagcattctagacaatattttatccggttttagctatcgtggtgaattcatggatcgtgttttttgaacggttcagggaaattcataagttatttttattttgcaaggacattaaggggatttcagaaattcaaaagttcttaattacacgcactgtactatgcgtgtaagagttgattcaggctgtgtttagttcacaccaaaattagaagtttggttgaaattaaaacgatgtgatggaaaagttaaaagtttgtgtgtgtagaaaagttttgatgtgatggaaaagttggaagtttgaagaaaaattttgtaactaaacacggcctcattttcttgaagaataactcaagctgaaaatatcttaatcacaatagagtaacagaagaccagacgactttattgacttgctggtgcatgggccagagcttgcagaatgtcaggaaggagggaaggtggagcaacatggtaagcgtacatgacaattgacaagttgacagtatacacgcgcgtctccgttcttaccgcgctcagctgtctcggcgaggattaattactgcctccacatcctcctcgacgccattgttgacgagcttgaccgtgtaccggagctcggcgacctgcctccggatggcgtccaccgtcgccctgacgctccggctgttgatgtaccacgcgtcgtactgcacggcgacctgctcgaggctcaggaggttggcgatgcccgacggcgggctctcatggctcgccgggcccgtggagagcttcagctcgaggtcagttagcttcggcatggccccttccttgaacaccagccatggcacccggcaatcgacggacaatctcaggagctcacggaacgggtagatgatgatcccattcttctcgtcgtcgccgtcttcttcttcttcatggatttttgagttcaggggagctctgttgcttctgttttgagagctggacatgaacccctgaccttggatcacaatggcttctcttgggaggaaatccagccccagctcgaggcactccaacctgtgcaaacgtccaagaatcttgacgccttctggggctagcttgcagaccctgatatgaagcgaggagaggtggttgagccctgcgatccaccgcgggacggtgaggaaccgggcgtgcatcgcgacgtgtcgcaggttctgaggcgcgtcttccggcgagaaatcgaggaactccatggagcagccgagctcgcagcggatcgtcagcgacctgaggcacttcaacctctggacgaggaagctcaggttgtcctggtactccttgtcggtgcactggcgaagggatagcgacacggaaagcacctccaggcaacgaagaagggaaagtttcctgacgacgtcggctgagcattcgcgtagatcgacagctgctagtgtctccaacgtatcccggagcatcccccaatcgatccccttggggatcctcgtgctcgccgcgccgtcgccagcgcgcagatgccgcagcgccactaggtcgtcgattcgctccggcagccgctgtatccgggtgcttctcaggtcgagctcctccagcgagcgcagggtgcacacctccggtgggagcttggcgatccgggtgtggctggcgtccaacgtctcgagcgagctcagcatcccgatctccggcgggagctcgctgatacgcgtgttcctcaggctgagatacctgagcaggaacagtttgccgctgctgaatatccgtggcaggtcatcgtctttcagcttctcccagccttgcagatccagcacaaccagatgcgggaacatttcaagagaaataccgtccacttctccagagaccgtgagcgagcgagtgaaggagaacatctcttccatctgcgccgggacctcctgatctgcaggctgctgctgctgctggccatggtggaggaacacccgccgtatctgcaggccggatgagccgcggagcgtgccggtgtcgcagcaactggtggtgacgaaattcttgtccgcggatttcgacgcgaggagctggaacatgaaatgattgacctggtagctgcaagggttgcattcacaatcgcacgccctcctcctcgtcctcgccggacggatgatacaccgctggacgagctgcgagaagcattcctctgctctttcctcgaacccgctctgcaacgtgtgcaccgcgatcagcccctcggccttccatttcctgatgaggaggtgcttgtcgatcacgtaaccctgcgggaacgtgctcatgtacagcgacagtagccgcagctcgcaggggagattgtcgtagctaggagacagcgtgtcctcgacttgcttcagttctctgattccgcttggcaaatatgctgcaacacaaggtctggagatatccatcgtcaccccactctgatctccttcttcgtcatcgtagtcttcttcctgcatctgcttcgacaccaggccggccatggcaattatgagcagcggtgtgccgtcgcataccctcagaatctcattggagactcgtccagaattggctggccgcggccaaccgtgagccactgccgagaacagcctctcggaatctgtcgcgccgagaggcttgacctcgtgcacgaggccgttaggccatgggtgcgagcagcaggagcgagcgacgcttctgatgcgcgtagtgattattatgcggctgtggcatctgttgctcgggaaagcatcccagatgtgctcccagtccgatgttctccacatatcatcgattacgatgaggtacctgcagcaattgtgtgtatgtatcacatcgccagcttaaaacgaacaaactggtttatagcctccaaaaacactgagggctgctttagatagtaggattgaaaaaatgaagaaatagaaaaaaaaacataggattttaataggaatgtaagtgtaaaacagatggatgcaaaacacaggaatagtcgtttgactgaaccttatgaaaaacacagaaattgaatgagagtgatagactcaaaagtaaattttttaagaggtttgagctcttgctaagttttcctcaaactctatatgcaatgagccgttccatcggaattttaagatttggaaagcctcaatcctttgaatcaaatgaccacatagaaaacattaattcctatagaatttgaatcctacgaaattcttaaaaaaaaaattcttttgattcaaagagcactattttggtacttgcgatttctcattaccttaaaaataagtcatataatgcattcacaatataatttagtccatgttggggggatggctccgggtagcggagccagcctccatcgtgtgatgcagcacctaccggagccatccaccctaggagaatgaccggaggaatctactgatctgggcttcagagctagccaaggcctccagagccgacctgggccttcggagccacctaggggctccggagtcatccaaggcctgccaaggcctccggagcaattcacaggctccgaaggaagccaagggctccggggtcgttcaaggtctctggagccgaccaaggcctccgagccatccataagctccggaactattcgagggctccggagccgaccaaggcctccgaagctctccgtacgctctggaaccatttgaggcttccagactctatcaaggcttctggggctggtcaaaggccccggaggaagccagggctcttggagccctggatataggatagaggatcaggcgcgtagtgggactacataaatacacactgcacgcctgccaaccacctctgacatcgttgacgagggcaagacggtgcatgctattatccggagcacggcattacccgagtaatagcgggcgccctcaggaatcggcgctgcttccttaatgggcgcagtcctcctatcactaggggaattacccgagagcccacaagctggcccactagccagccacttagattagttgataatatgggtagcagtgtaatttccctttgtacactctcgtataaatatgtaaacgttgcccgcgattgaggcatcgaatacaaaaaagaatacacactcaatcgttggattttgccccaacagtccaaaagcttaaaaattaaatatgtcagtgcaacaacttgacatgtgggtgcaatctactatagaaactaaggccctgtttagttccaggggtgaaaagtttggtcgtgtcatatcgaatatacgtacatacatttgaaatatcgaacgtagaccaataataaaacaaattacagattccgcctgtaaactgcgagacgaatttattaagcctaattaatccgtcattaacaaatgtttactgtagcaccacattgtcaaatcatggagcaattaagcttaaaagattcgtcgcaatttacacgtctgtgtaattagtttttttttgtttatatttaatactccatgcatatgtccaaacattctatgtaacagggtgaaatgtttttgcgtaggaactaaacagggcctaataagtgagtattcaacaacttagcaagataggtacaatttcggtacaataagcgatgcaacaactaattatttcaagcatttatctatacaagtttaggctgtgttggaaactaatccctgcgtacgtagaatggatcgacttattagcatatgattaattaagtataactaattatttttaaaaaaatggattaatatgatttttaaaacaactttcgtatagattttttaaaaacaaaacatatcgtttagcaattttgtgaaatgtacgcaccgaaaacgagggagatgagttggaaactcacacttaagaacacaaccttagtcttttaagtactcactatgtcaatatactttgctttaaaacagacgtcaatatatacttgcacacatttttataagcatacttaattcaaattgttgtccgtaactaaaattcaattaaattttacagtgtacaaaattttgtatttcatttgagatctaagaatgtgaaaaaaaaaccaatggttgggtttgctatgtggtggcagttgacatcatgaaaaaaaaattcacatagcactctttaactaaaatatagaattcttcttgtcctagatcacatccacccgcatacgatgtacgaaagaaataatggggactagctatattattataacataatttaaatttccatttatctttaaaaaaaatctggggcactaaattttccattaaaaacataagtttttaaccattcgtcttatttaaaatattactccctccatctacttttgatagttatatttccaaatctgaaaattttatttttgatagtcatatttcaatacaacaacctatcctcttaatggctttctcggatttaatgcgtaactctccattcttccacacaagattggttgcataggcatcgagaaatgtaaattttaatgaatcgcttgtttacaagaaataactagtaacatgtttaaatggatgataagtagaattacttttacttggactgtgtgccaagatgaaatatgatgatcaaaaatagatggagggagtatataactatcttgtgatttgttttatttgtagaggtactattggctgacttgtattatacatatttgcacaaaaagttgaattagacaaatgacgaaacgtgtatccaaaaatcaaatcctgtcgtatcatatgaaatccatataggacctgtttagatcacaccctaaaatttttcaccctgtcacatcaaaagtttaaacatctgcatgaagtattaaatatagacttaaaaaaaactaattacacatatttgtgactaatttgtgagatgaatattttaagcctaattgctccatgacctgacaatgtggtgctacagtaaacatttgctaatgatgaattaattaggcttataaattcgtcttgcggtttacagacgaattttataattagttttttattagtgtctgaatacccaatacgacatcctatataacacgccaaaactttacgccattgatctaaacacgggagggccattatagctgctacagcttgacagtggcaactcgtggtcagtggttacaaccgtccaatgtgagatccaaccgctcctaagcagcccccggtcacggtacaacagtagcagagtagcagtgggccccaccacttcatttgttcaccgttggatctgtaggactgtaaaaaatagctggaggcccatcagctactcaagctccacttgtcccgtactacccgtcgcaaaatacttgttgctttaaatttttatttgtaacatctgattatttgtcttattcaaaatattatgaaattattatttattttgtttgtggcctactttattatcaaaagtattttaagtgtgacttttctttttttatatttgcactaatttcttaactaaaataaaggaatagaaaaaacacatgattctaacaggaataaaagtgtaaaacagagaattgtaaaatacaagaatgaccatttgatcgaaccgtaggaaaaaacataggaatcagatgacagagatagactcaaaggaaattttccaagagctttgagctcttgataagttttctccaaaatctttataggattgtccatttccataggaatttatgtttataggaattttttctatgggattgaaatccttcaaaatttctatatgtgtttcctcctaatgaaaaggggccttaatgtgtagcgcactgataaccgactataacacatgtgttttgtaattctgatatacgctcttcttctgctcagggccagccctggggcagtgcgggaagtgcgaccgcactgggcctccaaaaattagggacctctaaaatatgtatactacggtaccaagcctgataggctactttgtgcattgagaagatgctggtaaataagattgttattgacactatcatcactgattgaatctagaactattagaagaaattggtttaaataatctagagatatttttttagtaattagtgtgaaattcgttaatgacaataagtttttaaatattatcttgtatttttatggtgaatcggggcttttatttttttttcgcactgggccaccaaaaagtcagggctagccctgcttctgcttcaactttgttcagtttggtttattgcagaattaatacatgtaaccgacaggacttatgctgtgtttagtttcacgctaaaattaaaagtttgaaaaaattaaaacgatgtgacgaaaaagttaaagtttatgtatgtagaaaaagttcgatgtgacgaaaaagttaaaaatttaaagaaaaaaagttggaatctaaacagggactagtattaaaattaaaactagtattaaaaggaagacagtgtgttgcttaaatagaagggatcgagctacagtacctcttagtttgcaggtattgtttgatgtcgtaagccagcgcgcagtcatcgccgtccaaggtggccgcgtccgcctgcgacccggtgatctgcgacatgatgtgccggaggagcttgtcgttgtgaggcggccttgcggagagcctggccaccgcgcggcactggaactgcccttcgatctggcggaagacatccatggccagtgtcgtcttgcccatcccagctggtccgacaacagagagcaccttcagctgcgcctccccatcgtcggaggccgtgagccatctggccagcttcttccttgggacgtcgatgccgacaagaatactgggagggccaacgtcgacgacgacgtcgggcgctgccggcggcgcgtcggtcacaagcagaagctgctcgatccaggcaaggttcagctcccggagctctgtctcggccttatctggtgcgtagccatcgatgaggtcatcgatccatctagccagatctatcaagtaggcgcagtggttcacggtctgggagtcgacatgccccggaccaattcgctcggccgatgccagcagctgccgcagtgctgcaacaaggctgctcagctccgtctccgtgaagacgaagccacggcgggcgaggacggagaggccggcgtgcccacgctccgaccggagcagatcggatatcctaccgggaagacgatccatcgcccttagtactccctccatctcctccttcgcggctgccgccattctggcatctcgttgtctctccaactcgcgcgctatcctgacctctctctttctcccaatctctttctccctcctcgacatccacccgttccaagcatcccaatcccgatccccctcaataacatccacctgacgagaaggcgaaggaaaacaagggaagccgactcctctccccatgaatgtgatgaacagcagttatcatacactaagggcccttttgaatcacaggaatgaaaaaacagaggaataagaaaaacgtaggatttttgtaggaatgaaactgtaaaaacagaggattgcaaaacataggaaagttatgttactagccctttgaatgggtataggaatttcacaggaaagagagtgtcaggaagtgtattaatacatgtcactttggccttatccacaatatcacaatgtatattttcttctaaaagaacaacaatgatgcatatgtctgtcatttatctccatcctacgcacacatgatggaaaaaagaggttagggtggatgttttcttttcctatgttttccctgtgaaatgagttccaaaggaaaatttcctctaactttcctatgccctactcctatgaatcaaaggctgctacagtgcccaatcctaaatcctacatttttcccatgaaattcctatgaatcaaaggaggcctaaattctgagatttgtctgtgcataagccttatccagctgtataagccggctgctagctcatacgcgctcggcacagtgccagccactgtctgggcgagcgtacctgggagagggcaccgcctcggtgagcgtgcgagctagctcttggcgtcctgttcatcgattaaaaaactctatgagctagctaagagctgcccattggagacggctttaggaaagagaaaagccagcgggctacagatttgtaatcagctatagcacagactttaagacacagtgtatgtatgacaggtgggaccaggtattaatagtgtagtatgtaactattgtatgaatgagttattaaattacctatagatgaattagagctagtagttggctgtactattgaacttgctcttaagagggggtgagcaaatgtactgtatataattttagagagggtcctaagcgtggggtccattaaagaatagtgctaggaggaatgtactatggtgggaccatcttaataaaatactgtaatctttatgattcttttctcttcaccaagctctgtcgtgatgtgttcaaacacacaggccacaggctcgcatataatacacctggatttttcatattttggttcttttcaaaaacctatttcataaatagacctaaaaaaacttatctcagaaatagtctttttaggacgccaaagtg

SEQ ID NO: 7812 - DNA, 9404 bp, Oryza sativa
aaacaggccccaagtgtcaaaagtggagagctctcaaaaaaaaaaaagtgtctagccgccgggggaggggggcgcattttcacgaggcggcgtcgcggcgacgaggagggagggaaaagggtggccgttagttacgcactacgccgtcacatgggggaggccgatgtgcggctgacgcgcgcacggttgtgctcgcgcggcgtgcctaccctaatgttttacacacgtatatatacgtatgaggatatttgtatatacaaaatttatacgtatataaagtatatgcatacatgtgtatgtatatatttttgatatgtaagaaaatataaacacgtatacaaaattagtatacgtatatctttacctattataaaaattaaagatgattccgtactaatagagtgtttcatccgtctttcttcccatgtttccaaagtcaacgttcgtccatcaaaagctagtccgcatcggtcacgagcaaacgagagcacatcttccggtatttttggtcttttttttgctagtattgttcccgatcactttctattttttcttcttcccagtggtggagccaggatctcgatacgtctgggctcaaattgaaggcttgtcaggactatgaataccacgtatctaatagtagttgactaaatttcggcaggacctaccacatactatgtcttataggagaagttccgcataaagaatgatgaatagagttctacatataaacgacaaggacttacgccaagacaagcttagtagtccccatacggtacctacgactaccgtcaggacggatctagcgctatctttgatctcgccggacatggattcgaggaggaagactaccctgttgtcgattacgtgttagcacttcagaccgccatattgataacagatagataggctaccccaaatattgtactggtgtgattataatgaataagagcaatgaccggcttcggccaacaggagtagggttattacctgacaatttaagagctcgaacctgtataagaatcctcgtccccatctcttttacctcagtctcgcatataccttggtgccaactatccccatactacgcaaaaccgtagtcgtgacatcaaacgtcgacagtagcgcgccaggtagagggattttggtgcttcaggattttgacgagatgagttcaagagatggattcttcaacagcaaactactcaacgacttcgtatgttgagtgatatgacctgaacgaagtacgttctccggtggatcgggatctttgtcaagcttcgccaagtcgtcgtcactatggattttttgacaagggatacttcaactattttggatctggtaagtcaaacccaaccagagtacgtgccccgacaagatcggaaccatcatcgtcaacaatttggtctatcgagatcatccaagcctcaagatacgcggcgtaccaaaagacgtcagatcgtatgatgtcgaacgagtacgcagtaaggtaattggaggattggtttttaaaattaatctactaatttcatagatacatccggcatgtatctacaaaggtacgtaatattttatatgcaatttatcgtacctatacatatcgtacatcattgtcagatctataattttttatgtttacctagagcatgttttttatacaatatcaattatgcgagtgcttccgatgttaggccatctacggtttaatgctgagggctcgctctattttcttccgtataaatcatacttgtttacggtttacataatgcctgatattaaatctgctcgttatgtcatgataataatagaagattcatgcagttttctgagtacatactcaatatgacctgctatatgtcttgccttctagaaaaaaaatttcaggaacaattgagcactcgagtaggttgtggtcaaacacacacattatcgagaacgttatcgataaatgtggagttgtcgcacccaacctaccaacgaagaccgacgacctatctcatagcactggccatagctgggctatttgagaaaaggttgttaacggataattcctcgcgaacgttgtcggcttgatcacccgacataattgcacatggatatccggacatgctataagttgggtatgtgagtcatgctggccacatgagatgcacatgtaataaatcaactttagcgcccctataggtgattgagagacgcctactcgctggttctcaaccagtcaatcgtagcgatctgtcgcacctcaacttcaatcggtcgagagactcctactcctggttctcgaatcagtagtaagtagcgatctctcgcgccacgacttcagatggtcgaggtacgactacggcaatagcgtagcggtcctcgcaccacgacttcagatggtcgtacctcgacatcactctgtcgagagatgaggctactcctggttctcgaaccagtaggccgtagcgatctctcgtacctcgacatcactcggtcgagagatgaggctactcctggttttcggaccagtaggctatagcgatctctcgcacctccacttcaaatggtcgagttaaggctacacctagttctcgaccagcggtgtagcgattctcccactatttccacttcaactggtcgagttaaggttacacctggttctcgaccagcggtgtagcgattctcccactatttctactttaagtggtcgagttacgactaccacctggttctcaaccagcggtgtagcgattctcccactacatccacttcaagtggtcgagttatgactacccgtgatcctcgaccagcggtgtagcgattctcccactacctctactccagcaaagttgatatcaggtacacaacatcgccaagtgttttacccagagatcccttaccacgacaacacctagagttgaaaccaatcctactgtccctttacgccgccctggcaaggcctccgaggaacctaagggaacttcggctggggacgcccagagtggataaggccttgtcaggtaatgcagagacgaacgatcatgtaagatctggtcatgtaagagttctcaccgtgcgtattaaccaagacgtgtaatcggaaattgagtttttcaacttcacggctaggggctagggtaagcgctttttcaacccaaggcaggtcaagggtccaagagccttatcctctgagaacgattctccgacgacaaggcttgggggcaagggagagtgtatgactcaacaaaatggactgatcgaagtcggtaaaagagaagacgctcgtacacaaaacattggtctcttaatttaatttcatttttcagttttccatacatattataacatgtcaccctttgaggcgttcgctcggaggctatttctatcgaatattcttttatgagtattgatttcaggaaaattctactcgacattgtcgaagactccatgtctctatggttctacaccaagatcgactaaggcgagcacgacaaatgttgacaaggctccatcgcagactctgcgccttctcgatcactcgagaacggttgatggatatcgacaaggaatacggaatgaagaaatggtgtacccgccgagataaaatttctagacttcaatccaaattctcgattacagcaagacgggagacttagtcgtatgctctgtactttcttggttgatgtcagagattgactcagacaaatcctatacgatgcccgcacgaggctgataagggaagtctaacgttatctctgaactcagcgataatggtcacgtgagctcgataacagttattccgaggtcttcgaattgggaatatgaactcgttcatttgcgttgaagtcagggctactgtcaggattatggataccacatacctaatagtagttgactaaatctcggcaggacccaccacatactatgtcttatacggaaacaaccttcggatataggaggagttccgcataaggaaggatgaatagagttctacatggaaatgacaaggactactcggattgtattcatattggtttccctagttctacttggactagggtacacctataggtataaatacaagaccctctaggaggagaggggacatgaaacaatagatcaacatacaagccaacatacgccaagacaagtgactggatatcaacatcggagataagcttagttgtcacaccctgaagttcttctcccaagcctaaattaattaataaatggtctcgagaaattacctatgtaaaagtaagagagaaaccctaattgaattaatgcaaataataatcggaaatggcatgtgggatttttcttgagttctacatgtcaaaatatgctaacaggatttttagaggaattttcagagctctacaaataattataaccaattaaaaatgagcacgagcaattatttaatccctgaaaattcatttcccctttttctttttcttttttccctcgttttccctaatgggtcgccggcccattctctttccccctccgcctccccgctgggccggccgaaggctaaggcccagcagccggccgcccgagcccctcctcccctcgggtcaccgacaggtgggcccacctgccgggcccgtccccaaacctccggccggcgcggcccgcgcccgcaaccgccgctcccgcctctcccgtgcctcccgggccacgccgcccacgtcgccgccttccccgcgcctccccgcacccactcactctctctagcccacacccgcgccgaaacggccgagattcaatttttgaatcccgccggccactccctctctccacctccccactactccggtgaaatcgagccactcctagcttccccgagccccctcttcccctatttaagcaccactgcccctccctctctatttttccccatttcgcagagctcccccgtgccctcctccgccctagcgccatcgccctcctctccgtcgccgccgccaccgctccggtcgccgctagccgccgcgccgagcctcgccatcgccgccgtcgggttcacgagcccaagggccacgctgtccgctcctccgccgccgatttctgccgccggagccccgttcgcaccgcacgccggtgagcttcgccatggccgccaccttcagctggcgtccccgccctctatgatctctctctctccctctctaatctttcccattgtgttccttaggtgatcccgaatctcgaccgctcgtcgccatcatcccgccgctcactgtcattgatcatcgccggtgaggaactcctccccttcctctctctctctcccacgccgcttagccgccgcctagccgctcagccgcccgcgccgctaccactgcgccgccgctgcgtcgagccgcgccaccgcgcgccatggccgccgggccggcttgagctgggcccgtgcgtgccggccgcgtgccgccccctccgccgtccgatccaccccgagtggattggggccatccatccggccgcccgcgtggtcgccacgtgtgcgccacgtggtggatccctcctccccggtcccgtggactcagtccaccgtggactggcgcccttgagcctatgacatgtggggctcgcatgttggcgccgcccccctctctccagggtttaattgttgcacaataaatcaattaaggatttttctgtttatagtaaaaacatagtgaatcttctaaaattcatagaaaattcatccgtgctccgtttaagcccattcaagtctcagtaaatcaagaaaaatacaaagaatccattaaaaatggttttattctctgtttcagtagtcttatagcctgtttgtattgtttgctttgtatatcgcatagattccggctctcccgacgctccagtgtactttgacatagtcgctgagtttcctccagccgcagggcaaggcaagtcatgcttgtcacttgaacatgttgatcccatattgcaaatgctctattgttttcctttaaatacaacattgttttacaatgatatcatgggatgattaccttctgtctcagccatactatttgttaccttgttcctttgttagcttggggatataacatgattagatgttgggttagggattgcttagccatgcttagttcaactagcacacaatgggggaactacattaatgcatagttttcagattctagtattggtgttggactagaaccattgctctggtgttggttaactaaaatatactaaatggtggactgtgggtgcatggttttgatggtcgctcccatggcaattaaggaccggttcgcgggatgccctggaagaacttaccgtacttactacatgccagtgtgggcaacggttgggcttgtagtgtagctttcctctagctgacgcatccaggcaagggtgagcgtgatgaagttcggatgggccctgtgacggcctatgcggctttcagattcacctaggcacgagaggggactgcccgctgccttgcgaggagtgggggtgaaacctgaggtgtggtgtgtttggttagagcgggttatgcgaagggtcctgtcacggcctctttccggtatgtcgtgttggcatgccggcgcacggtaacgtgtcgtggggctgtgtcttgtgggtacagttgaacacctttgatcagaggaaaagtattcgaatagccatgcccgcggttatgggcggtcaaccagattcaccgtgattagtctcaccctagcttagtctaatggaattgattagttcaggtggttggttggtcctgttgcaatgtggtgtagcgttggacagtggatggttaatattaactaattattacaactattttactgttttcaactactgtttataaatgctagctttatgcaaatgatcgaaagcaatattaaaaaattgaaaacaaagaaagcaatacgcatgtgcatcttttctagtatattgaaaaactgaaaaccaagtggtttcattccgtttgtcacgctagagacgacaaagaaaagggtaaggcgaacagatagctcgccgacgcattgtgaagaagaggatagctagaagatgcagcttaaggcggaggcggagtgcagccagcttgggagaggaaatggaaagaaagcgacgtttccggtgggcgcagagatgagtggataagggtggggaagagataaggtgttccctgctttagttgcgcacgaacattagtgaaagagacttatactcgcctagcttgcattcggcatgcatctacaaccagtatagttgtttcttgaaataattctgttctgcagcgctacctagctcttgagtccttaccagctagccgtacagtcttgcaggcgtgcggcggggatcatgtcgaagggagcgatgggaagaacttccatcatggagaagcaggaggaggcgttgaaggagtgggagcccctccatgagagtatctctaagctgctgaagggtggacgcatcaccgacgcccgcgaaaggcacagcttggcattcatggagatggaactgggcgtcattgtcgcatacctgaggatgccgctgccaccacacacagattgtcctggtgtcgatctcatcgataaccagatccagtaccactggagttactacagggatgtcgtgatatctctgtataatcagtacggagaagaagcacctaatgcggggctgctgcgaaaagccatgcggtgcttccgccgccgaaggtctttagagtataacattccgaggacagcgtacagtctctaccgtgagtgctccagtgatccacgcctcgagctcccaagctcggagctcatgccatcgccgcatcaagcagcccaagttgaggctggtgccctcaatgatcatcttgttggcatcgacagcatggcaaacgagatgctcagatggctcatggccaccgacaagggtctccgggtcatggccattgctggacccgccggcattggcaagaccacccttgccatggagctccaccgtcgactcaggtgccaaactcaagaatattatttccagtgccacgttgtggccgctaacttcccccggaggccttacaggagcaagcttgttcttcaaaccatcctgaagcagatcatggagcaactggatgcaccatcaccaaacagctcggaaatcaccatgtccatgttggaggacaacccggagctgttgactcgcaacatatcagaacacctcaaggataagaggtaaacagcattcagctgctatatgtatacagtacttatttaggacttctctaccagtgcagcatcagacctcggattcttttaatattttctcttcgtattctccctccagatactttgttttgattgatgatatattagacgaatcagatttggaaataatcaagggtgcatttcctaataataactgtggtagtagaatattgtttacggcacaacatgagtggatagctgggtggtttttgtctaattataatggggttgtgcataagatgaagcctctgaatgactcggattcagagaagctacttcgcacaaaagcttttagttccatggatgatttacttccagacaatcttaggctattatgtgatgaaatcttgaacaagtgtagaggaataccattgttcataactggtatggcagattggttgaaacaacagcaacacggcagctctgcagttcttagggtggaacaagtacgcctactgctgaaacagtttgaatactggctatcatttgattacagttatgaattgagcctatcgtcactctatctaagcatgtttccacagggatatgtgtttgataaggatcatcttgtcatgaaatgggaaaacgatgggttgatccgtatattggagtctagttcagaatatggagagttgtatttctctgagttggtcaacacgaacatcattaccccagtaggagagaactatggacccaatcttgatgaagatgaattgtgccagtggcaggtcaatcctttcgttctgagttttcttgcctccagagcagccgagaagggtcttgtttttaccagctcaacactcacctcattaccaagctgtggtggcaacaacactcggataaaacggcgcctagctctccaccaccctgatccgctactccccgaaatgctgcaacaaatggatttgtctcatactcgttcactactcatatctggtgcagtcgacagaacaacagtccctctagacaagtttggatatttggtgtttttggatcttcaaggctgggagaatttgaaggatgaggacctactgcagatatgcaaaatgtttatgctgagttatttgagcgtcaggaacacaagggtcagcaagctcccaccgcaaatcaaggagctgtgcaacctgaaggcattggacgtcagccaaacccacatatttaagatcccatcagaag

SEQ ID NO: 7813 - DNA, 1886 bp, Oryza sativa
ccgcagtcctccggcgccgccatcacggggaagggtaccgttgctgccgacataatcctcggttgcttggcgtttctgatcatattggccgccgcgaccagtcttctgctgcactggcacatgagaagaattaacaacaacgaccatgacattgtgagacacttcaccaagaaggagctccaccgagccaccaatggctttcaaaggttgctaggaagaggaggcttcggggaggtctaccatggggtggccaagtcgctacacccacctgacatcgcggtgaagaagctcgtcacctccaacgagtacagcgagagggagttcgcgaacgaggtgcagtccatcgggcggattcaccaccggaacctggtccgcatgttgggatactgtaaggagagggagcagcggatgctggtattcgagttcatgccgggcggctcccttcggagcttcctcttccagaccccacggccgccgtggagctggcgtgccgaggccgcactcggtatcgccaaggggatcgagtacctacacgaagggtgcaccttaccgatcatccactgcgatatcaagcccgacaacatattgttggatgataggaacaatccaaagattaccgactttgggatcgccaggctcctcggtgaccagcagatgtacacgacggtgaccaatgtgagaggaaccagagggtacattgcccctgagtggttccacagcgagaggcgcatcgacaccaaggtggacgtgtatagcttcggcgtcgtgctgctggagatgatatgctgcaggaggtgccaagacccagtaaccagccgtggcgagggcggtgacgatcatgacaactccgtggtcacactgtttggatgggcaagccagttggtcaaccatggcagagtcgaggttatcctgcatagcgatgacgacgctgtggaggatctggagagagtggagcggttcgttcgtgtggctttcttgtgtatcgagacgaatccgtcgcttcggccgatgatgcatcaggtggtgcagatgctggagggtgtggttgaggtccacgcgatgcctcatcttccgagctctatagatacattaccgtccatctctaaggattcacgtactcccaggttcttcttctccagttgaactcgatttgatttctcacaagaacgtactgcagccttcatctcatggcttcacttatttctgataccataccgtgactagtctcagcctatgtgaacatagaaggcaagcaaaagcatacactgtgtgaaatcttactactttgatatgcgcttcatattctgtgtatttaagtttgtttttttttttgagcatttacggttttatggtgtggtaaacaagacacgtcgttgtaataaataacagccgcatacatcaaactagatgatacccatgcgttgctgtgggaatttgtgcatataatttgtatatgactttttaagatatattagtaagggcaatgaaaatattgaacaaaatgtcaagtaatgttgattgtaatacggtaaattatagcatgtactattcgtatgatttaagtaaatgcatgcagtaacagaaaaacatgtaattgtgtaatattgtaaagtataagacagtagttgaaatgtaggagggatactaattcctatctttttctttataaaaaaatatgtttgtttgtgatgctgcaaacctgactaaattgtacgaagattgttactgtttttttatcggccattcattgttgatagttatacaacacaaattggactttcggttctttaattgcatccatgtatcttctttggatcttctcatggaactagcatagtaatcaacatcatctagtgttttgcctggaatcctgaaggaaatagttg

SEQ ID NO: 7814 - DNA, 13115 bp, Oryza sativa
catagccgcaccgccgagtcgagccacgccggcaccgccccccgtctgcaacggagaggagaaagagagaaggagagattagaataggatccaagggtatttttggtcatctccacaaaaaaaaattacaaaaatcattaaagtgagaaggaatggatgaaatggcattgcaacatgttgccttgtttgaggatggcattttaacgaaaccacttttggaagtggcattccagcgaaaccccgttttgacaatggcaaaatatcaattttctctctctaacagcaggacaccgaagctttacatgtatgccttggtatgtatgtgcacatcgccgttggagccactctggcgcgatgtactctgtggtacccctcacatcggtcaccgtggtgtgcacggtgtggtcgtcgaggagcttagcgatccccaagcagtgatcctcgagttgttcatgtcatcaaggtgtatgttgtctggcttgatatcacagtgggtgatcagtgagtagtacccttcgtgtaggtactcgatccccttggcgatgccgagtgcggcctctctacgctagctccatgatggcctgaagaggacgccgcggagcgagccgcctagcatgaacttgaacactagcatccgctcagtgccttcggtgcatgtatccgatcatgtggagtaagttccagtgggggacctcgttggtgaactcccactcgttgcacacatttgaaccaatcagtctctaattcaccggatgagccgtggctccgacgatctcaccgtcccttggtacaccccgccaaagcttcctttgccaagcagcttcaaaaatccattggtggtttggtggagctttttgctgctgaaagctctcacgctcgtcattatcaccaattgccggctctgtgtgtacttactgagccagttgtgtgccagaaagcctccgacgatgacggtggctagcaacatgaaggacaaacaaacggtggcgagtaagtgttgtccaggctattgttggtgacgaggtcgatgttgccgtcggtccggatgccatgctgaagcgatcggtggtgggagtacttgtgtttggattgtgttggttgggtgagattatgtcaaaaaatgctaattcacacgtgctttcgttcactacgaatagttcccagcagtcattgtttgcgatccgtggtgcaactggtcgattcaattcccagatagatgagggttacaaggtaggtgggaagtgcggctagaggggaaggggaagtgggggagaggacggatgatggcaacaaggcagggggtggggttggagagatggagaaggtggtttggagagctgtttgagctatcagcatcatcgaggaggtcgagctcatcggtgttgttagggacttttctagcacagagtgacaaaaccatcttgattttttctaggcgtactttctcgtgtgcagataacattggagttggcgagaggataaggtggagcgggacataggtcgtgggcaggaaacacatgcggtgaggtgggacgtgtgcgatacttatgcatgccatgagcttttatgaattagcatcacccgagatcgtgagctttcacaattttaaaccatactttccatcgacaggtcatcacaatctcaagcacatatacaaatttgtcaataattcatggttcaatgcttgggaatttcaagaaacgggggggggggggaggggggttaagaagacttgcacacaagagagttcaagaaggccaagagaaccctaaactcatattctttccacagtggtgtttcattgacaattttgctatatttttggcatcccttgattgtagttattttgtcaaaccttcattcagggagaaatcaaatcgagttcaactggagattaggaaagaacctgggagcatgtgattccatagagataggcaacgatgtatccgtggagctcggaaattgaggcagtgcatggacctcaaccgaaccctccagcatctgcaccacctgatgcatcgtcggccgaagtgatggattcctctcgatgcacatgaaagccacgcgagcaaagcgctccaccctctccagatcctccatggcatcgtcgtcgctatgcggaagaacctcaactctgccatgcttgactagctggcctgcccatccgaacaatgtggcggaatcatcctcgccgtcctcaccatggccggataccggatcctggcaccttctgcaacatatcatatccagtagcacgacaccaaagctgtacacgtctaccttggtgtcgatgcacctctcgctatgaaaccactcaggggtgatgtaacctctggttcccctaacattggtcactgtcgtgtgtatctattggtcgccaagtagcttggcgatcccaaagtcggtgatcttggggttgttcttgtcatccaacagtatgttgtcgggcttgatgtcacagtggatgataggagaggtgcacccttcgtgcaggtactcaatccccttggcaatgccaagtgcggcctcggtgcgccagctccatggtggacgtggagtctggaagaggatgcttcggagggaaccacccggcatgaactcgaataccagcatccgctgctcccgctccttgcagtatccaaccatgcggactaggttccggtggtggatccgcccgatggactgcacctcgttcaggaattccctctcgctgtactcgttggaggtgatgagcttcttcaccgcgatgtcaggtggttgcagtgacttggccatgccatggtagacctccccgaagcctccccttcctagcaacctttgaaagccattggtggctcggtggagctccttcttggtgaagtgtctcacaatgtcatggtcgttgttgttaattcttctcatgtgccagtgcagcagaagactggtcgcggcggccaatatgatcagaaacgccaagcaaccgaggattatgtacggcagcaacggtacccttccccgtgatggcggcgccggaggactgcggctcgtccgaaccttgatcaacgctttctgcgtgacgcttctctcttgccgtccggagcccgccagcaacgccatcttggtgcagcgggttgcgccgggctcgaacagcgccgccacgcagaagcagtcacgcaagcaaatgtcggcgcactgctcctccgccatgcgttcgtagatcacgtacggtgaggtcgtccaagtggtgttgggcagcttggtgatctcgaattcggcggagctgttcaccacgtcacagctctgcggtgcgaacgctgggcggcagccctcgtagcgtatattcttgtcgatgaaggagtagttgctcgggcacgcacagtcgagcctgctgtcggcgccggacacgacgcagtacgagttggggccgcagaagccgtccaaggcacgggttgacatgccacaacctacggctgggaacagatcggcgacggtccacgacgcgttggcggagctcctcgggcggatgtacacgcggacgatgccgtccgggtcgagcgttgcgcgccggtagctgccgccggcggtggagatcgccacgggaggtgtcaggtcgtacaacgagccattcttgatctggtattggatgctccccgtcgaggcgaagaagagagtcgtgttgccgtccggggtgttgccgggctgttgggtccgggttgcccagtacgctttgctggagtcggcattgccgccgccggcgaggtttatgaggtacaggacgatgttgccgtcggcctgcacgaagaggccgaagcagccagcggagaaatccgcatccaagcgcttggaccgaaggattgctccagcgcccatggactgaccagggaggagcgtgtcggtcgggtgccggaagctctcccacaccacggagttgtcgccggcggcgaggaactggaggttgcccgagtccagcagcacgagcaagaacccgttcggctgtcctggattcgagctcgtccaaacgttgccgcccacgccgccgccggtggtggtgtccgcgaggaggagctggccgagggtgacgctgaacacggactgcgccgtggctgtcactgccgacgcagagctcggatccgtcgcgtaccataccaccaccgccttgtgctcgtcgtcgtcgttattgaaccatacggcgaggaggaacaggccggcgtcgatggcgcggaagccgaaggcgaagtcgtcggacgagctggtgatgtactgaggaggcctcagagtggatccggccgtgaggttgaggttatccgcttcaagcagacggggttggtggtgcagcacgatcagcagcaacagcaaccgagcgaacgacgagagggacattcctgcaaatggcttcatttctgctctcaataaagctacggcacgcgcgccttgttgtgatgagttgtagtaatacgcttaataggtttcctcataggcatgcaaccttgcattgccacaacggatttgctatactactgtcgacagttaacaggggtgaaaactttcaaattttaagccgtctaatatgctggactgctggtgaaggaaaacgaaaaaaaaatcagacgcgtacagcaggtatggaatcgaacccaacacctccaacttggatttttttcaactaaccaattgctccatcatgcttttttgagttacacttgagttacatatcaattacatagtagttacatagtagttacaacgtaattacatagtagttacatttgaaagtttttcatcccaaaaactgtcgacagttctatagctactcccttggcacaattctacatcaatttattgctgacagattaatatgaaagcgaaattgcgtgttcacatatctatttatctatcttatgacccacataagatatacgaaagaaatgcaaggatattcaaccggaaagaaacagtccattaagtaatcaaccacatataagatgagtttggatttttcaatttttgtcccttgtgaaaacttattttacaaacagatcctaaaaaaacttatttcgggaatgaaactttttcgtgagcgccaacgtcattggtgtcgtggtcttgatggtgagctctgcgtagcgaagggcaacgagctccatggtggatgtgctcctcgatggtgcacggtggcggtggatctctattttcttccccctctctttttccactttctgaccacatttttctcatcgaagccattgtttcctatctgcacttgcccagttcgtgtgtccaagcagtgttgctgcagtccccgagttaaggtgcggcaagaccactgcgacctccacaagcatggcaaggcgtcgtgaggccccggttcccactaccacgaacgctcggctccaacgtgcatgctcaagaccactatccaccgtgattcctcgtcatccgcactggtcatcttcagccgtcaggttcttcttcgtttacttcgagcatcgccgccgcgtctccaagttgccaccttcgccgctctgggttggtggtctcgctacctctacatggctaccgacgacgtcgtcccggccgttggtcccactacttcgccttcgtcttcatccagcatgtctcatcactagcgttgttgtatcttcctcgactacacttcgctcctctctgacaacaccgcgctgctccggcaattctccttctatgccgttctcgtgtcgtgaccgtcttggaggccttctctgctagtttcctccgacattggagtatgattcatggtggtctccaacctcgcccgcgcggtattggcaacaccattgcgcgcgttcgtcccaagttgtccccaggtctggcaaacccggcatgacgtctcatcctccacggttcgacagcatagactctttggtgtcatcttcctcaacgattgccttgatcgcgtcaccgtcatcatcttcagcgcgtcctcacgcacgactactctatggcgccccatgcgcaccttgtagctcggctatctcgacatcaacacacccgatttcggctacatcgaccatggctactttacgcacggcttcatcgactacggctccctcgcaccctttgcttcgactacgtaaactatggcacaaagggctatcatccttattgagcactcttgtcggtttcttctccagtccaagtgtccacgctgctcacgtttggacgtctgcattgctcatgtttggactgcggagggatattagagtatatggtagttatagtcatattattaggataggattgatttgtgtggattacttccatatctataatccttccttatctcctacccaagtactcctatatgtaccggccctttgagactcaatacaataatccacgttacgcagtatacctctcctcttatatttgtttacttaaacattgtgggattgctggagagttaggggggccacgtcagatgccacttttgcaaaaaaaaaagccccacagttctgttaattacgcattggtccccgctgctatccaccgtaaaccgtccgatctcgatctagggtagatctggccatacacgtgtccaactgtggtggcccttccgcacccgtgaaatcgttggatccgcaacggacggtgcggatttcgctggcatgtaccaaaccctagcctctgcgcatcgccacgctctcctccctctgtgcaccaccatgctctcctcctcagctcctcccctcacatgcgccgccgccaccacatgcgaggggagccggatcggatggctgcgggtgaaggggagccggcctgcacgggtggcgcgagcacacaatggcgtgcgggtcccaaaggataccggtgacgagcggcggtaaacgctgcggaaggagacgggggatgcagggagttggaggctctctaggcatgcaaggtgagggacgacggtcggaggagttcggcggcgccctcaggtcgacgacgatgacgggagtccggtggttttctgtgggaggcgaaaggcggacgggggcgaccatgacctggggaaggaagtggagtgattagagagggaaggcgtggttcgggttgcgggaaaacacggccagagcggcggcggcgaggggtgagctcacctccgtgaggaaaaagctatcctggcagtgggttggggaagcagagtggttggaggtggcggcggcactgttgcgcgaggccccacccatcggcggcgagcggctggatatgacgaatacgacagtggcctcgggtcaatagggaaggcggctttagctttacggtggcagtttggaggagcggaggggttgccgcggtggctcttggcacggagatgccagtggtgcaagtggcggcaacaagcgatggatgggcggagtgcagcggggagtaaaagggagcgcgcagtgagctcgggcgaatgaggaaaatgagagagcgggaaccgggagggagttttatgggctcgaaaggcgaagatcatggccggagaggggcggaaaagccggtgatgtgggggaggtgagagatacagcggcgatggattcgaaaatcgaatcccaagagtggagagcgggcatgggaggtgcgggggagtgggtgcacgtgtagcagttgcgggtgacgcggggaagtcggcaaagtgggggcgccggggtgcacgggatggtgttgcccgtggccggctggaggtaggagatggccacgatagatgggccccacctgtcggtggcactagggaaggaacaggcgggccaaggagggaggtgggccggcggatggaagagagatgagggtggcctagcctgagggaagagaggaaggaggggagagcgggctgtgagggacgtaaagcgaacttcggccgaaacggcccaaaggcggggaagggaaagattttaatttgttttcgagtaaatttcagaaaactgcaactatagtgacaaaattatcagtttgctgcaacgatagcgtaggaaatcatcaaaaaaaaactgctacaggacatgtaggtgacaactatagcaacatatcacgtaaaagttgtagttttgtgataattttccacgctatcgttgcagcaaactgaaatatgttgctaatgttgtagcaaactgatagttttgtcactatagttgcagttttctgaaatgtactctttgtttttttattttaatggattaaatgttgtttgtgcctttaaaattattacttgagttttgaaaattcacaaaaaaaatccagagagtattttaggacatggagaatatcacaaaaatatttccagccatgattttaaaggaaattttaattctctcattaatttcacttcattaatttaatttttagtataatttctagaaatgaattattaaatgatttttaatcccatacgaaaatcgggacgtgacatcttctcctcgtccttttggccatgctgatctagtggtagccagagtaggcattgagggaactcaacaactcacaacgcggttaaatccaccagttggtcaatgagaggaagatggaagtggtccttggggcactctttgttaaggtcggtgaagtctacgcacatcctccacttgtcgttggccttgtgcaccattactaggttagcgagctgctttggatggaatacttctatgatgaagccgaccttgaggagcttgttgaactcttctcagatagcctcttttctatcctagtcgaatttacgcagcatttgcttgactgactttgcattggaatgcaaagacgaagaaaaaaaatctaatcacctcctcaatttgatcatctcaatacaagcaagcaatgaatgtgattgaggggcttgattgtagaggatttaaaataaaccaaatttagagaaccaagaggtgttaattaatgtatgtatgcatgcacgtcttatattatgatatatgagaaaaatggttgccttatattttgggatgaagagagtaggggtggaaaaaaaactcgaggagagctcggcttgggcttggtttgggctcgcatagctcggctcggtcgaaagccaaacgagccaagcccaagcctctttcctagctcatcctatatacttatatagttcatccccactaagtgtagtcaatgctatttctctcttctctcattaagccacatcaccctaattatttctaacctttggatgatagatctatgatccaaattgtctcttcttttttctctcttaaaaacatacaatctcaattacttttaggctcaaaaatgtatcaaattgttttagttctgtacatattatgcaacttaatttttcacagcaacgcgacggggtattcatctagtttctaaaacgagccaagcctgagctgtctcacgagccactcgcgagctcatttggctcagtataatagggtcatatacaataattttgcatcttttcaagatatttattaggttatgaagttgcgcatctgcgcgactttaaccattttgttatgtgctttgtgaagataagatatatacagaaaagagcatttagaatattcagtgatatacactcaaattggaaatgacatttgtttgcatgccttagttactgtaattgaagaagatattactccagtaaataaatttgggactgcttttagtgtcaatcaaaagcagatgagctaacttgttttgctttaatttgatccctcggcacaattaatggttctagctgaaaaagtggtcatgaatacatcacataagcatggtcttaaccatgtttagaatttcgtcactactatatctgtcgccctgtgtggacattcgtactctcctacctcaacacacgctgtagtctgctgccctgcgtgacaggttaacagaaagtcaaattccatatataaaatgcttttgattcaaatatgcgcaaattttatgcaagccaaaccatctcttatgatagtttccccctaattttttccagtaaaccaaatcacgctgactggctcatcttatttccttgtcatcattcattcaaagtagtttcccctatccttctttgagatgtcatacaggcaaacataatataacagtgattgtcttaccggcatatttttaaaaatagatctgatatttaccggtatcccaatagcccaggatttggccggccacaacaataacagctttattcacaatgctgtatcatcttttgcatcatcctcaaatcgaggggaggtaggcactgagcaaccattctgcaatagacgatttggtaagcaatccatcttctagaagatgttaaactggaggaaaggctggcaaaattttcctggccatcaatgaagggatcagctatcttgagcgtctccacgccaagaacggagcaaccaatggctgaatgcctgaatcttcatcagaatcaagtgatcgatcactcatcagcgaagatagggaggcaagacacatcgatcgctgttggttagaaaatccaattttatgtgactggatgataccctcgaggggcacgccgtcgtctgcaacgccatcattgcggcaggaagtgacggggtggcaaggagcaggtaggggttgacgctgccatggcggcatgcaaggtggcttggaagggtagcctccgtgcggagacggagccgtcgacgacctgcctcaccagtagcatcgttgcatcgtttcctcctccctctcctctctgttgggtggtggggttgttcgtgacgaacacccacggtggctgtattcgatggccagatttgatgcctccaactctccatgatcctgtgggaggacaaccgtcgatggggaagaggatagggaggcagcagtcgaaacggaggcggcggcggcacagggccggccctaggggggtcaggccgtgcggccgcccgaggctcccaaaatctaggggccccctacacacatatagtgtatatatactacatattgtataattttaatctatgggccatgtgcctatattaagttagacagctgaatagcccaattcagaaaatgaattttagtccatcgccaggcatgtttcagtgaagccgaagagatattcatctgactcccgtcgcttcgtctcgatcacatcacgccactcgcgtcgcgccgcctcgatcacatcacactactcgctgctcttgcgctcgcggcgacttctcagtctcgtaaatgaaaacagcaagtggacacagcaaatcgtagctcgccagtagccacgctcgtgtcaataagggcctccatataagtttttgccctgaggccccaaaaccccagtaccggccctgcagcggcggcaacggacgggcggtccacacggatggacgcatcgcggcgccgccgcgtgcggtgaagatggggaagcgacaattttttttctcgtacgaacgtggaggtggagggacctgtgtgcaaaaaaaacttcttaaaggatcgagaagatatttcacgaatcaagcaatgtgacggccagtagcgtccaaatgtagaatctgacggcttatgtttactgaatggcgtggcgctacaattttacattttgggggttcaactttcatatattaagatttgttgaaaatgataatcttgattaccatgttgtctattcatgtgttaggatgacatattgaagaaaaaatcactttactacacattctatgtgttaaaatgttgctcgatttctccttgacctgcttcaggtttacttgttgctagggcttgcgagacagcttgatctggctcgagcctattaacaagccatgacgtccagggcgcgaaaacagtattagatccatctcatttagttggaccacacttacactattaactctcttacgtttttgtcctcgctttcacgaaaaagttcgaaccggaaatcagactcccatccttataagctggtgctgctctagctgaactagcgatccgagccaagctgagttttccttccaccaaacttccacgagaactgatattcaatttggaagaatgcattatgcattagtattgagaattgatggatgtctgacataagcttagcaagcttcgatatttgtggatgtattgatgtacatgttatggtacgtggttaatgttcatttactatttcaagttgcaatgtgaattgtattatgtttatatatattttttgtccttaagtcaatttttctgacggtgtgaacattttttccctgtcggttagcacgtcagaaatttatctcacaaacttgatgaccgtggatttttctatgttgcatccacaggaaaaagccgtcggagatgatttttctgtaggaaaacccataggaaaattgatttttccgtggaccgttttatctgttggcgattcctgtcgtccatccacaaaaaataatttctgatgttaaaacgaattttcctgtgggtttcgcgcccacaggatagctgccaagtctgctagtgatcgcattatctatcaaaatcatctgctataattttcaaccttggcctcgatcttgagttagtttcactgtttcttcttcctgattatattcgtttattccactgtcgatttctaacaacaatacgtgatgacgcatcgacgagtgccgtcttggaacccaatcatctatagttcgattgcgcagcggaagaaaattcaatgtgacgtggcctcaaaactcgcatctcctagtacgtgctacctgccacagccccctcttggcctctttagaatttttctgatgcattaaaaaaatttcttttgcagcgcagtcagtgtgggcctatcagattttgacgactttaactagtctttaaaaaagggcgaggaaggggacagcagtgttccatacttatgtatgaagaaggatagagagtatgaagaagggaaagcgttttcatgcctaaagaaagtatctactcatttctggtatattacttgaatagttataaaaaaatgatattatagattaatatgacatatcattatgcaaacatgtaatttaaaattcaacttctacaaattataacaaaaataacaaatataaccgtgaatttacgttaacttgttttagttttatttattgtttttgctacaacatatgcaagtcgaatttgatcttacatgtttatgaaatgagggctgcaggaat

SEQ ID NO: 7815 - DNA, 1182 bp, Oryza sativa
attcctgcagccccggtgcttctcaaacttccataggtgtgtccatgatcctgaataaattcatgagctatccacatattcaccaatatgccaggctcaaaataatagccttttgggaacaaaccacagaatgaaaaacattgctgaaggtgctctggcaagcattcatagcttagacgtaaaattgtcataatatctttctcatttgataaaccattttttagaactcgattccattcatcatagttgaagtttaaactaagatgcccagcaacggcctttattgctaatgctgagccattcaacttttgcacaatgcattcacctatagacttcatttcttgatgttcatttggatctctagtgctgaatgcacatcttctgaaaagttcccagctatcttcactctctagaccactcaaagagaacggagtggtacagcctaatgtatttgcaacaatatccattcgagttgtaactaaaatcttgactcctttcaccccatgccgtaaaggagcaaataattctctccatctatcagcatttataggccctccaaccttttcatcataccaaacgtcatccaacacaagtaaaaacttcttcatttttactttgttcttgagttcttcttggagcatgctaaaattgaaatttgttaggtcaatggtcttatcaatagatgttagaatttctttggtgattctgaccttatcaaagacatgtgagacacatatccatgccctcaaatcataattatcctctattcttttatcattgtaaataagttgagctaaagtagtttttccaattccaccagtaccgactatggttattacctctgatgatgttggtcttgctccttcgcttcttgacttaggtatgcctacctgttctaacaattggttcactagttcatctcgctccttctgacgaccgaccacaaactcaccaagtgaaaatgagctggtaatacgccattggagcggctcaggcaacatgtgtgagctacagttttctggtccaatcactctgacaagcatgtcagcacattcttttactctactcaagcttttaagcatctttcttaacttggatctaaacttatcatggccaaccaaacgcttagcaatggaaatagaactggagcctaagcttctaagatttcggggctgcaggaat

SEQ ID NO: 7816 - DNA, 2169 bp, Oryza sativa
cttcttgatagaaggccatccattattaggcaagcagtttgagctgaaaaatggtcctgactacaacaaggttgctgccctttctggatgcatgcgtcatacaaatcagagtaatattactttttattcactgttctgaatttagtattggaatttggaaattgaatatgtcatttatttattctggaatgtcaaatttctcgttgatacatagtacatagatctaattctagtgccatgacccgttccttgtagggaaagtttgggagtactggtcgaaattctgaactggcaaccaagcgaaactgttgtggacaagttctgatctggcaaccaagctaaactactgtgagtataatagttccgagttcgtaagaagtgatactccgtattacacataccgacacacctacacgcaccaattacatgaccattttgaaacgcaagttagcgcttacattttatatatttttgtatgcagatcgcttcttagcgtttacattgactgtttatggggatcggagaatttgaagatcaccagagtggtcagcacttgttaagttgcatgttttcatgaggattatgatgggttgcactggcttgaggagcgatctagttacccagataaatttgggtgtcagggtggcaaatggcatgcgtcccctgcgttgtgctgctgttcctgtgcaaattccaattgcatgctgcaatttgggttttccatgtgccaatgttactgaaatggtgcaccgttcggtttctgattatgcaaatgtgctcatgattcaatcggcaaaatccaatgcccacgttgttctcttcgctctatattgttcctgtttaaaatgtagaaaagctcagttgttgctaaagtggaattactggatttcaattcaatggctataatgattattctaggggtatgcaactaacaaatgttgatatttagaaataatgggtagaaatccgaactctatatccacaaatggatactccctccgtactcgtaaaggaagttgtttaggacaatgtttaagtcaaaccttgggaatataaatcatgaataactcttaagttgttgagtttgaaaatataaaaattatgtgaatatatttgtcttgaaaaaagtatacatatattacctttcaataaatatttttatagaaacaagaagtcaaagttgtgttttggagaccgtgtcgctgtccaaaacgactttctttacgagtacggagggagtatactctatcaataaatattgatagcagctgtctatgcgacgatcgtactcttgacaggcaaagtaaatgagaaatttctctcaattctaaggcatttagctttttaccacttttaagatgtggtagttaagaatatgccactcacagtatatgacatgtgggccctcatgtgtctgtaacatataagttcagtggcaatttcttaatggccacttatgaaagtggtaagccgatagttaaatactccctccgtactcgtaaaggaagtcgttttgacatggacacgatctccaaaacacaattttgacttcttgtttctataaaaatatttattgaaaagtgatatatatatatatatatatatatatatatatatatatatttttatgaaagtattttttcaagacaaatatattcatataatttttacattttcaaacttaacaacttgaaagttatttatgatttatatttttaaggtttgacttaaacattgtcctaaacgactttctttacgaatatgaatggagtatctctgtaaactcccaatacctccttaggaactgtccttcagtcagtgtcgtctgtcgtgtcgtccccttccttgatcctctgctctctttcccatccagcctccgggactccggtctcgcgtcaaacgcggattgatcgacaaggagattggagttctgatcctgccaatcaggtatggcgtttgtttcccctgtaacctagcttcattaagttatcctaggactcgtcgcgccgccgcgaaatcgtgcttaggtactccagtggcgcaggattcagtccttataatatcctctatttttttttaaatttttcggaggaaatacagatacttcgggttttcgggatagtacttcatacatgaagcaacgaagtttttgagaacttagtttatctg

SEQ ID NO: 7817 - DNA, 2064 bp, Oryza sativa
aattgaggaccaaattgttgaaaacctaaaaggctcagctctagccattaaggtgactggaggccatttaagtggcaaatacaacgctctggaatggaacaaaattcttcagaaaagtgtactcaaccctaatgacattatgacaatcttacgctcaagttatgaaagcttaccaaattatcttcagcagtgttttacgtactgcagtttattccctaaaggttaccgcattgatccaaacaggctgatccatatgtggcagctcagggttttgttcattcagacagaaatatcaatactagtctggaggatattggcagaggctatttcaatgatttgctacagcgctcatttttccaagtgttccgatgtggagaccaaatttactatattatgcatgatgtattgaatgatctggcacttcatgtttctgggggcgaatgccataggattgaacatggcagtccgagtgagttaccccatcatattaggcatttgtctgtttctgctgaactcctggaaaattttgtgagttttggtagtttgggaagattgcgttcactactagtttttaacaagtcttggttttgctcaaaactcagcctcactcatggtatacttgccaagctgaagggggtgcgggtgctggatgtaagtggctgttgcatgaaacgcttgcctgatgctgtgtacaatctcattcacctccgtttcctagctatacagcggacatgttacacactacctaaaacaatttctagacttcatcatctaagggccttgtttgtacagtatcattcatgttattcctctggaaaatttagctcacattgttcctctcacaaacttttgaatctttcatgggggcaagtgaacatagctggaggttgtttcagtcttcctgaaagcattaacagactcagtaacttggtgcatgttgatatagagaagtcatatgctctcatgctaacaggcatgcatcaacttccatgtgttgaaggttcaggagaatttcatgttggcaagaaggggcaaagtattgttgggctgaaggatctgaatgaacttcgtggagagcttgcaattagattgctggagaatgtgaaaacaaaagaggaagctgctaaggccaatcttgagctaaagaagcacataagaaagctggagctagaatggggatcgggtgaccatgatggtcacactagcaatggttgtgatgtgcttaatgtgctaaagccgcaccctaatcttgtcgagctaactataagtggatatccaggtgctacttctcccacctggttgaattctggttggctgagcagtttgcaattgatttgcttacgtgattgtaaaaaatgggaggtacttccacctttaggggatctaccattgcttaaagctcttgaagttcggagaatggatgaattaaaaatactagatcaggagttcttgggccgtaaaggattcccctcattggagagactgctgctggaacgcttgcccaaactagaatggagtattgtagagaacgaccagttgtttcctgctctcagagatctctcattttctggatgcccaaggttaagagaatacccgacctatgtgcgtaccctcagacatattgctatacttgataaggaacaaatccacttcaaggtttttatggacaactttgaactcacaagatcattttgctgcctgttgtcaagcttcttctatgtcttgcgtgttcatcacctagagtttgttgaaaagctgaagatctacgtagatcatttgagagacattcctaaggtagccttcaataatatgaagcaactcacagagctcacaatatttggtttaggatcatcttgggagaatacataccccataattagcacattgtgggatgaggatggggttactgtgcttcctacatcacttcaacgtcttgaactaataaagtgtcagtgtgcgagcaagttctttatccaagttgctgaacaacctcgtatgcctcacacactagaccttggaccttgtgatacaggaggaatgccatctcaattatcattaagcatg

SEQ ID NO: 7818 - DNA, 30397 bp, Oryza sativa
  unsure (1)..(30397): unsure at all n locations
taggatatggttaaatcaggcaacaaataaagaaacagttgaacacatcaaccgagcacaaacttgtggaaacatttgattgcattgatcttctggttcaacttctgaatattttggtgattggcatacagagattatttttacagtctagtctaccaccttaatttccttattcttaagtatggagaatacaggctggttatccaccagtaaggtttgtttggattcctcggtgtcagtagatctcagcattgccatattccacgttgctacacgctccatgcgaccatgccctgttcctgcctcctgctctactgttgtatccatccttctcggaagaacaaccattttttttttcgaaaataggaagaacagcctttgttcccatgaggccatgacagccatgccgacatctctacgaagttgctagcacatccgtttcataacaactgatactaaacggtgaatgcttcactatagccaatgtaatagctaattcatacaatagtatagcccactactagctctatatcttctatagctaatgtaatagccaattcatacaatagttacttactgtactagtaatacctggtcctacatgtcatacacacattatgtcttgaagtccgtgcgtccgatttcgattattatttgcatttattaatttgaggaattagctctagattaaattgaacaatttcttcggacgatttattttacaaattttaaagctggaaaggggaacttcagggcgtgacacccgctgctcttctctctcttcctttatctctttaaaatatgtttatagctggcttatagcctgctattgtacctgctcttaaactttaaccactcatctttcttcttaaataattatgaacgctagaaatgatgttatggtattaaaatgggttatttcctaaatatacacataaaaaaaagtccatttcgatccaacaatatataggtaattaattgatggttaaagtttaaatgagaaagtcgaaattatcagttgctaaaacttggaagggggagtatgttttggacgtctaaaacttgctggcggtcatgaatgaattcagcccactattttctcgtcaatgaattcggtccactgactgattccaatgaattcggcttggttagttcatgtcagcaatttgggcccagaagtgaattcagcccacaaacatcccatcaacaaagtcagcccaataaaggctaaaatgaattcggcccacttaaattcccataacaaattcagcctacaaaagaaattggcccagctactgcgtatgaacgaattaggcccatgaatattattggcccaactttaattccaatctacgaactgggccaagaataaatatggcccacctaattgcagtcgacaatttggcccaccaatgaatttggtccactgaattctcgtcagcaaatgcagcccacgagggaatttggaccacaaaattcccgtcaccaaattcagcccactggaaaatttggtccacctgtctcgtcaacagatttcatcgcccgcggccaccggcggccggcgaacgcctccgtcgcggccggcgcaggctggggaattccaccggcgggttcgcccatggcctcccctcgcgaaccgagatccgggagcgctgcaccgccgaaagggaagaaggcggcggcggcgatggcggcgcctcccaattcaccgattgggtggtggcgcgaggtgagagcgcgcttgtggctgcacacggtgnaagtatgtcccccagaccaatggcttgtttggcgccgctcggctccgccgtgccgccgccaccgccctcgttttgcagagccggctggcccgccctggtaacgctttttcttaatcttagggtanagtctccgtagagtttttaaatgtcgcacatcggtgaagtcaatcatgtgttgtcctaagggaatgattagtggattagtggattattgagagggaatgaactaataggagttgagcgggtttgatgttattattaacatttttttttcttgtcagtggatggatgtaggaatttaacagggatggaaaatataagggattgatacaccatcatttcaataccattttttttcttgtctgttgatggatgtaggaattcaacagggatggaaatataagggatcaacaccatcatttcaatacaggagagaaatcctttttttttaaagcagagagatgagtagatcttagctccttatgatactacatccaagctaatttttttataaccaaccagatattttatattgtagttgcttggtaaaacgcaatcagcattacacacagagctaggattggtaatagaagatagactttaatcccacaccaacactttcatctaaactcctccccttcctcaagactctaagtggcaaaacagtctgtatattattttcttggcatctcatacggaacaatttgttagtaaaactttctccacagaccgactgccactgcctgctttgatgcatcggaagccaaaccgctggaatttcacggtgattccacctattctgctaggtggagtgtacctacctccgctctccagctgttataagatttggttggtcgtctctttggtcaacccggctaataaagccctccagctgttgtttgtgtgagaacgtgggatgcatacaagatacggagtaattctttactcaaagttgaaaaaacctctccttttttctttgtttgaagaggtggaagtcaactttcttgcacatccatttgtggtttactcccatttccctctgtttgaatctggctctcctcctagtttctctctgaaagcagccttgcatttgatcagcaagaagaaagatcaagggcctcttcttctaggagtgagctgcagttctgatcttactactagtcaggtaaacaatatttcaataatcactagctggcagttgtcctattctgttttctgactgcatcattgaagaatgaagacaatatttactcttactcgtgtatccaatttttgccgttaaagttgcaaatttgtgtttgaggcccatatttcggtcttcttatacatggcctgatagagtttaagagtagagtagcccatattgactgcatctttgagcaataatttcttattttggttagttctaattattttcaatgtttattaggtgaatggattattgagtttcaagctgtatggtcatttgaagaaaacagtatattttgaaaaaaagggaaataggtttgtacattgaccaacatggctacactaccaatagccaccggcattgggtgggtagtttgtcctatcatcaagcttatctttgagaaggtccaatcttatacatcaacccagtacaagtggcaatctgacttggaggatgatctaaaaaagatcgaatccactttgataaaaatccaattggtgctgggtgctgctgaaaggtcgcaaatgctagattgcaaccaagaagctctactttgccaaaatgaaagattctgcctatgatgccgacgacgtcatggatgaatttgattacctgattctgaaggcaaatgctcagcagaagagcaagctaagtagcttggcctccagttctcttgccataggaaagcgtttggttggccaagacaagttcagatccaagttaaggagggtcctcaatagcctgattagagtaaaagaatgtgctgacatgctcatcaaagtgattggggctgaaaactctaattcatatatgcctcctcagccacttcaatggcgtgtcaccagctcaatttctcctggccaaattatcattggccgacaaaatgagcaggatgatctagtgcaccgacttctgagagaagctgatggaccagagccaagcagaggactaacaatatcaccaacaccatctataattaccatagttggcagtggtggcattgggaaaactgcattagctcagcttatttacaatgacagaagaatagtcagtggttttgatctgaggacatggatatatgtttcaaatatcttcaataaggtcaaaatcaccaaagagattttgaaatcaattgatagaaacagtgatataacaaatttcagttttaacatgctccaggaagatcttaagaacaagttaacagcaaagaagtttctacttgtgctagatgatgtgtggtatgatgaaaagattggtgagcttacaaatgctgatagatggagagaattgtttgctcctctatgctatggagctaaaggaagcaaaattcttgttactgctcgaacaaatattgtttcaaggattttgggttgcccagcaccattccatttggagggtctgaagggtgaagatagttggaacctcttcaggatctgcgcatttggcgctgaagatccaggaaattatccagaactagagtctatcggtgaatgtattgtccaaaagttgaatggctcagcattagtcataaaggttgttggtgcacatttgaatgctaacctcaacgttgaagagtggacacgagttatgaaaagtagttcatcaaacaaggaagacattatgcaaattttgcgtctgagctatgaatgcttgccaggtcacctccagcaatgttttactttttgcagcctgttccccaaaggctattctcttgagcctgacttgttggtgaatatgtggatagcccataaatttgttcatggtcatataggcacatatgaaagtatgagagaaactggtagaagttatttcaatgaactattatctagatcattttttcaggaacttcagtatggccatacaatacgttatgttatgcatgacctcatgaatgaccttgcttctcacatttccagaggtgagtactccagaatagaaagagatggtaatcttgcagaaatttcaggaacaactcggcatctgtctatacctgtcgaaagagtaaatgaactccatggattccataacttgcaaaggctgcgcacgctaatagtttctgaacgaaggcaggtctctttgctcaaaactttgtctgcaggcggatgtttttaaggaattcaagtgcataagagtattggatttaagtggctgttgcttagaatttctgcctacatatattgatcatttgatacatctcagatttctttatctccaacatgttggataagtctttgtgatccttggttgtgattcttctttttgcttttggatagtttcacctttttcaggacagcatctaccctttagcatatttttcaggtgctaggacagctgcggttagtaggacagcaacagttagcatcttctttatgcctcctttatgctttattcagtttggatgccctctaggacagcatcccattcaaatttcgaattttagactaggagggtgtagcaataggctagcagccagctctggctatatatatgtatccaacctccctcgggtaggtatggcttttgtgtttttgtgaatgaagaaaaccagaaaattgccccatctcgagtgccatcctcttctcaatgagagtaaccattgaaattctaacatctggtatcagagccacactttcctgtaggctaaacatctcttgttccaccccttcccaagctcggttgagctctcagccagcagcagcagcactggttgctcctccttcccctttcccttccccctctccacgcagcagccccccggaggtgcgccatgtccgacgctcggtctcggcgtttggtcgcctcgagcacttggcgtcagcaggacgccgagctcgccgcagcagaagagcgcaggcgagcaacggctcagaccgctgcagcagcagcagcgagggtggccaaactggcggcagtggagttggcagcagccagggcggaggcggaggcggaggcggcggaagatgcggcacgtgcggcggaggtagaggttgagaccttgcgcagcagcatcaacggctccatcgccggcgacatcaccgccgacagggagcttgaggagttggcaagaggaagggcatgggagcgggcagagcggtgggcagcagcccacctccacggcggcggcggcggcccaagggaccgcgcgcccgccgacgggaacccagacgggcgctggcgtgccggcggcagcccggagcccgcacgcggccctcgcaggcagcgcggctctctctcccctgactggcgccatggtcaccacggcgtccagacggtggtcagggactttggtcccggcggtgggtggcctaccctcaccaaaaccaactacatcgagtgggccgcggtgatgagggtgaggctccaggtgcggcacatgtgggaggcagtccggtacgggcgacgtcgactacgacgaggatcggcgggcactggatgccctcatcgctgcagtcccgcccgagatgcagttctcgctttcccagaagcggactgccaaggaggcctgggacgccatcgctgcggcacgcatcggcagcgaccgcgcccgcaagtccacactgcaggcactccgcaaggagtgggagaacctgcccttcaagccaggtgaggatgttgatgactttgctctccgtctcaacactctcttgcagaaaatggtgcagtacggcgacgacacctacgacgaggagagagctgtcgagaagctcttccgctgtgtccctgagaagtacaggcagatcgctcgctcgatcgaatctctgctggacctctccacgatgtcgatcgaggaggcgttaggtcgcctcaaggtcgtcgatggtgatgagccacagcctctctcggggcccatcaccatcggcgggaagctcaatctcactcgggagcagtgggaggcctctcagggtgacgggaggaagggggagtcatcttccccgacaggcggccgtaagccgcgcaaggcgcggggaggtgtccagctacggtgggcgcgaagacgtgccgagggtggcgcccgcagaggcgcccagggcgttgccaccggcaaccacaagccggcacgagacaacgcctgccgcaactgtggcaagcttggccattgggccaaagactgtcgacagccacgacgtggccaggcccacgtcgcacgggtggaggaggaagagccggctctgctcctggctcatgcaagcatcgagctacctccagcggcaccggccgcagcggctttcctccaccttgatgagccgaaggtactcgtctccctctgcaacggctccagcaacgacaaggctgatgggtggtacctcgacaccggcgccacccatcacatgaccggctgacgggagttcttcaccgagttcgactccagcgtccaaggctccgtcaagttcggggacgcctccggcgtggagatcaagggtgttggctccgtcaccttcactgccaagtccggtgagcacaggctgctcaccggagtctactacatccccgcgttgaggaattctatcatcagcgtgggacagctggatgagaacggctcacgcgtgttggtcgaggacggactcatgaggatttgggatcgccgtcgtcgccttcttgccaaggtaaccagaggcactaatcaactctacatcctcagcgcgcaggtcgcacaaccagtttgcctcgccgctcgtcgggacgacgaggcgtggcagtggcacgagcgcttcgggcacctccacttcgaggccctgaagcagctcagtgctaaggagatggtgcgaggcatgccgtgcctggaccacgtggagcagctctgcgacgtttgcgtggtgacgaagcagcggcggctcccctttccccagcagacgagcttccgagccaaggagcggctcgagctcgtgcacggggacttgtgtggcccagtgacagcggccacaccaggaggacgacgttacttcctgctgctcgtcgacgacctctcccgttacatgtgggtgatggtcctcggcagcaagggagaggctgcggacgccatcaggcatgcgcaagctactgcagaggcggagtgcgaccgcaagctgcgcgtgctgcgcaccgacaacggcggcaaattcagttcgcgtcgtactgcgctgatgagggcattcagcgccactacaccacgccgtacagcccgcagtagaacggcgtcgtcgagcggcgcaaccagacggttgtggggatggctcgggccctcctcaagcagagggggatgccggccatcttttggggggaggcggtggtgacggccgcctacatcctcaaccgctcgcctaccaaggccctcgatggcaggacaccgtacgaggcttggcatgggcgcaagccggcggtctcccacctatgggtcttcggctgcctcgcgttcgccaaggagcttggccacatcggcaagctcgacgacaggagcaccccaggggtgttcatcggctacgcggagggctcgaaggcctaccgcatcctcgacctggagacacagcgtgtgcgcactgcgcgcgacgttgtgttcgacgaagggcgagggtgggtatgggacaaggcggtggacgatggttcgactccgatgtacgacgacttcaccgtcgagtacgtccacttcgagggagctgggggagtaggcagctcttcttcatcgagcgtgtctaccccagcccccgaatctccaccgactccgacaccaacacaccctcgggccacgacttcgactacgacgagctcttcgtcgacaccaccccagccagtgactccacatgctccagcaccaacagtcactcctccaagcacgtctacttcgacgccagctcgtgttgagcgcagcccggtggagttcgctactccgctctcccacgacggggagcgcatcgcataccacgacggtgagcagctacggtaccgtacgatggaggatcttctcggcgaccagccggtgccgggactggtgcctcgcgacctagaggcgcagttgcaccttgcgtgcgacgacggtgagcctcggtcttttgcagaggccgagaaacacgcggcatggcgtgccgcgatgcagtcggagatggacgcggttcaggagaaccgcacctgggagcttgctgacctccctcgtggtcaccgcgcgatcacccttaagtgggtgttcaagctgaagagggatgaagccggagccatcgtcaagcacaaggctcgcttggtggcacgcggtttcgtgcagcaggaggggatcgactacgacgatgccttcgctcccgtggcacggatggagtccgtgcgactccttcatgcgctggctgctcaggaaggctggggcgtccatcacatggacgtcaagtcggcgtttctgaacggcgacttgaaggaggaggtctacgtgcaccagccgccgggatttgtgatccccggcaaggagggcaaggtgctacgcctgcacaaggccctctacggcttgcggcaggcaccgagggcgtggaatgccaagttggattccacgctcaaggggatgggcttcgagcaaagcccacacgaggcggccatctaccggcggggcaatggaggaaatgccttgctggtgggtgtctacgtcgacgacttggtgatcaccggcaccaaggatgcggaggtcgcggcgttcaaggaggagatgaaggccaccttctagatgagtgatctggggcctctctccttctacctggggatcgaagtgcaccaggacgactccgggatcacgcttcgacagaccgcctacgccaagcgcgtcgttgagctggctgggctcaccgattgcaacccagctctcactccgatggaggagagactgaagctgagccgcgacagcacggcggaggaggtggatgctacacagtaccggcgtcttgtggggagccttcgctacctcacccacacacggccggacttggccttctccgtcggctacgtcagtcggttcatgcagcgaccgacgacggagcaccagcaggctgtgaagaggatcatccgctacgttgcggggactctcgaccacggtctctactacccaaggtgtcctggcaaggcacacttcgtcgggtacagcgacagcgaccacgccggcgacatcgacaccagcaagagcacgagcgggattctcttcttcctcggcaagtgctcgttagctggcagtcggtcaagcagcaggtggtggccctgtccagctgcgaggccgagtacatggcggcctccgccgcttcgacccaggcgctctggcttgctcgactgcttagtgatctcctcggcagagacactggaacggtggagctcagggtggatagcaagtccgctctggccctgacaaagaaccccgtttttcacgaacggagcaagcacatccgggtgaggtaccacttcatccgaagctacttggaagaagggagcatcaaggcgagctacatcaacaccaaggaccagcttgcggacttgctcaccaagcctcttgggaggatcaagttcctcgagctctgctccaggatcgggatggcccaacttccccacaagacgacgcacaagacttagggggagaatgttggataagtctttgtgatccttggtcgtgattcttctttttgcttttgggtagtttcacctttttcaggacagcatctaccctttagcatatttttcagttgctaggacagctgcggttagtaggacagcagcagttagcatctcctttatgcctcctttatgctttattcagtttggatgccttctaggacaacatcccattcaaattttgaattttagactaggagggtgcagcaataggctagcagccagctatggctatatatatgtatccaacctccctcgggtaggtatggcttttgtgtttttgtgaatgaagaaaaccagaaaattgccccatctcgagtgccatcctcttctcaatgagagtaaccattgaaattctaacacaacatacgcaaaactcgcttccaaattcactctgtaaacttcaccatttacttgtgttgtccatacgctggcattcatgtttcatggacaggcgacttgttacttttcctaagtgcttgggcaccttgagcagcattttgtgtattgatgttcatcgtatgtgcactgttgatttagctgccagcagccatatgccatgtcttcgagcggctggggaattctgtgttgataagagtaaagtgcagggactagaggtgctgaagcagatgaatgaacttcaggggtcgcttgctattacatctcttgagaatgtgaaaagcagggatgaggcaactgatgctcaactattcagaaagagtcaaatctttaaactgaaactgcaatggggttcttctaatgcttctagcaagtctgacaaagcgaatgatgtgttcgatgctttaagacctcactcgggccttgaggaattgattgttcagggatatccagggtgtgtgtccccatcttggttggagtcagagtggctctctagactgagacacattagcatttctgattgcaagtgttggaagttgcttccatctttaggccaaatacaatctctcaggacacttcgtattgctagactgaatgcagtggtttgtataggccccgagttttatgggactgctggctttccctcactggagattctggaaatgatagagttgccagaattggcagaatggtcttctgtggactgtttttttcctgctcttcttgaggtgtgcatcagaggatgccccaagctgaaacaattgccaccagttgttctcccacctgtaagaatgagtatatatgtatctaccgaagtttgcaggctgcgaaatcataatcgcctggagacatgttttactcaggaggtgagcttaagcacactcttggatatgttgcatcttcgtcgtctggaacctgtgaaatgtgtaaatatcatctttgaaggagcaaacactctggaagatggacttaaagatgtaacaacaaatctgccatcccttgaagagttggttatcaggggatgttctgatctgcagcatgcttttgcagctagtaaacagcgggaagaggatgggaatgtcttttcttcggcatctattcaatgtctcaaaatgattggctgcaacctgacagtggacatttttcttagtgtgtttcagaacattagtttcctttcattgtggataaacgattgcaacatcacttattcaactcctgaacgtgtgttggccatgccaaagtcagtgactggagtacttgagaagctgtgtattttaagctgtgatgggttgacagctttcatgggcctagaaacattcttaaggttaagcacaatagaaattgcaagttgccccaagttaacgtcagtgccagactttaggtgtcttccagccctccagaacttgatcataaagaattgccctgagctcaaggaactacctgaaaatggtaacctaacaacattaactgcactggttgtggaacactgcaacgcgctaatatcactgaggaacctgcgagacctttctttcctctcaaaactggtggtcagaaattgtatgaagttaatggctttgcctcagatgattagtttctcttccctcagagtcttgatcataaaaaactgccctgaagtagtttctttaccagaagatggtcttcctgtgtcccttaattgtttgtatttggctggatgccatccagtgctggaggaacagtttgaccagaaaaatggtagtgaatgggagaagtatgaagtgttgccgttttgtttctttgctgataaatcaatagaagatatcgaaggtaaacatctcccatcctcggattgctgtctgtgaaattcaggcacataatatttgaattttgatgatgatgaatctacaatttctttgttgcaaaaataaaacgtcaattgactgactcctattgattccaatctactgcagagatagccaaagaagtacttatggcggatgatcttaccaggatttccattcagggcaatcgagttcatgcaactgattctgcagcaagctcgtccagtttcccttagtaagctctccgagggtaatatgagctgttgtgatatgttgatcattttgcatcatggccctacctgcgcaactgtgcaactgctgaaattcatgtgcttgtatatttgttccattttaaaccggactcgtttttcctaaaagacaggaaatcgaacatcgtattaccaatttatcatgctggtgcatttacggatgttaacacattggatgcaccacacactgttcaaccgaataatgattgtgcaactcattaaagttagtcacggttattcctcatcaaggaaattattttttattcttgaaggataacttgattgtgattctggaagaacacattggatgcaccacacacgttgcaacttatgctttattagtatcagttgatgtaacagccctatagaaccgcgtagcctagcccaaccgacgggtgggcccaattacacataccatttcacacttacattttcgtcctcgcttcgtgtaaaagggttaacccgagagtggcatggttgaagagacaaggcttataagttggtttcacctttactaaattagcaatgtgttaataaacatacgcacacagctctcatgggccacacatgccgcatcttaattggaccagaatgtcacgtacacctccctcaaaggacttatgtcctgtcggtccaactcaccacatagccacacaagcatataggcaaatgtacaggaacacgctccctcttagcattggaccaactcacccacataaccaccaagaagataggcaaatgtccagaaacatgccccctcttagcactggaccaactcacccacataaccacacatgcaaatgtccagaaacatgccccctcttagcactggaccaactcaccacatagccacacatgcataatgtccagaaacatgccccctcttaggaacacatgcatacatctcacccacatagccacacatgcatataaactcacccacatagccacacatgcatataaactcacccacgtagccacacatgcatataggcaaatatccagcaacacgccccctcttagcacacgtccaatgctggtgctatatgtcatgccatgtgtctcacatagaagccacatgcgccatgcaccataacacactaacccgcgcaaccgcgagggtcggctctgataccatttgtaatagccctatctccagaaccgcatagcccagcccaaccgacaggctggtctacttacacataccactccacttacacattcgtcctcacttcgtgtaaaagggttaacctggaagtggcatagttagagggacaaggccttataagttgtttcaccttgctaaactagtaaggtggtaataaacatgcgtacacagcttttatgggccacgccgcatctaattgggttaggatgtcacggttgattggttggtctcctagcggttgtatcataatttctccataaattggtcatgtgctgtcattttttttctgtacgattgatttaagtttttgtgcatgtagttactcaaagtcataatgaacgtctgatccatctcttgcaaattacaagggcgttatgatcaacgcgataagttttcccccctgcagatatgcagaattcttatggtttaattgcacggtgatactgagataaataccatagcagacgtagttttgcacttttgctcatgtttatccatatagcttatcaaaaacttaataatactgaatttctgagtaaaacttttatatatatgccatgattaaaaattcaaaagttaatgtagtaaaataaactatgattaaaaatcataaaattaactcatgagatttaaaatttggcttataggtataggcacaattaaaatgatgctcattaaacccagtgtaacagtgcaatatggcaggatcagttatccatgaaggcttaatagttctttgagcactcttgccccagaaacaggagaccatctgttcgtggcatgtcattttactaagcaagtaaaacgagaatctgctaacaacttttcctctagcgtcgtctcctctcgggcggcacgggaggtgcccaggccgccgtcgcccgccctccctccctcctcctctgcctccgccgcccgaccggccgccagtaaagccgcgcagcggcaaggacagcggcggcggggcttcgcttcgtctcgccgcacaagggcagggggaggtctgccggcatcgggaggcagaaaccgcccagatctgcgtcggccagccggagttcgcggggagttaagccggcggtggggcagtgtgctcgggcgcggcctttggcggggatggcggcggagctttggaggcgctggcggcggtggaagaggccgccagatccggcgcggatctggcggggaggtttccggcggcccccggtgggggtccggcgccggcggaggaggtcggcgtcctcagggcgatagcgacgacggtgccggtgccacggcggccggaactggcggcggtggagccggacgacgactgccgaggaggcggccggatccggcggcgacgggcgtgacggcgcggagacgctggagaaggaggtgcggtggctgcgacgacggtcgaggggtggccgggtttggtggtcggctggcgacagcagcagcggcggcgtcggctggcgacgacggcggagggcatggaggcggcatcggggcgttgctggctccttggtggcggagagcgacggtgcagcagcggtctgcggaggcgatgactggtgccggtggcagcggcgacggcggccgtgactgtggaggcggtggtgacgtcggcggcggggaaggagtcgggtgcgagtggctgggcgttcgacaacagtggctgtggtggtggtgactgcgactgcggtcaccggaggcatgacagtctcggacggctagccgagggcgtgggagacggctgcttctggcaggcgcggcatcgttcggtggaggggtcggagaccggcttggcgcagagagtcgcagtcgatggtagcggaggccggctcggcgcgagaggcgcgggcagcggagatggaggctggcttggcgcgagaggcgtggccggcagtggaggaggcgacctaggtgtgaggaggagttgccggtggatgtggcgtggtcttcgacgcatgaaagatggccggcgggggatgccggtgtaggggtcccacatgtcggcaaagcttatgtggtggtggagcatcggtgcgtcagccgtagatttgcagccggtgagcggcgggtgaaaacccagtccggccttggctggaccgacaacgatcctcttgagggcgttgtcgtgctgtctcacccctcaagggtgatagccgggcgaaagcccagtcttgattgagtcccgacggacggcggcggcggtttttccgtcgcttctcttcttgcagacatcgttttggcattccttagggggcgatctcgtctgtgtccctttgttggtctagtggcggtcggtcacgcttagcggtggccgctccggtgctagccttctcctgggcttgtgtgttggcgatgtcggtgtgtgggtggtggtattcttttttctttttcctggttacgatcctacagggttgtaatctcgtttttttttcctgctctatcaatataacttcgcaccgtctcgcgcgagccgttaaaaaaaaatttactaagcaagtttggacctttgaggggtcttccaccgagggtatgccaccttctcaaccacctgatgccatcgatcttgcatcttgaggcctgtttagtttgcaaaaagaaaattttggggtgtcacatctgatgtttgactgagggtataccaccttctcaaccacctgatgccattgatcttgcatcttgaggcctgtttagttcgcgaaaagaaaattttaggttgccatatcggatgtttgactgtatgtcggaagaggtttttggacacgaatgaaaaaactaatttcatagcttgcctggaaatcgtgagacgaatcttttgagcctaattaattcgtcattagcacatgtgggttactgtagcacttatagctaatcattggctaattaggctcaaaagattcgtcttgcgattttcatgtaaactgtgcaattagtttttttgtttaatctatatttaatgctatatacatgtgtccaaagattcgatgcgatggttttgggaaaaaatttggggaactaaaccatgccttggtggctggatgcacgtgcagggcttgacaagctgggcaagaaggcgtttgatgcggccttttccctgttttgatggatgatctggaaggaatgcaatgcgcgagtgatgctccgccctttggtctatgtttttttggcttgtgattgtgctccatagtatcttagcaccttgatactaagattttcttttcatcaactgtgttgttgttcacagcaaccaaatttctctttaatcttaataaattttggccggtttctctttgcggacccgacaaaattttttttaataaattggattaatttgatcgtaccattgtaaatgtgccaattcctataaatatcattacaattcgtctattcgtaaccgcatcactcaaattttacaaagtcggaaccatgccttcgctgtcacattttgcatcttcttcctcatctacacgtggggcccatctgttagattcatcttctttctccatcattccctcttctcttggggcatgtggggcgcactcagaacgccacgggggcgtgaccgtcccggcatagctcccgcgtcgacgacagcgaggcggagcgatggggacgacatggaaggatcgcgaggcgtgcacaatttcgcttcggatttctgttgcaccggagcgcgctgcccaccgatgggtggtgatgttgttgcgagccgtgggaagatgatagattggtggagaggaggctaagaaggagagagatgggaaaaaagagaagaggcggggatggaggaagaagatgaatctgacaggtggtcccacctacgaatggggaagaggaggaaaacatgacgacgatggcatcattctaattttataaaattttagtgccacaactacgaatagatgaattgtaacattttaatatatgacgacgttgacgactattcgtcttattaaaaaaatttatataataataatttattttattgtgacttgatctatcatcaaatattatttaaacatgacataaatatttttatatctaaaatggtccaacgttaaagaaaaccaggggagggagtaacatttatcatctggatatacacatttgcagtggcaatggttcaaatagttaaatgcccgggttcatcgcctggcgctgcgccgccccggccaacggcggcgggcgaacgcctccgtcgcaactcgcaagccgggggatccgggagcgctgcgctgcccgacatggatacatggaacgggagctccggttcaccggctggccggcggcgaggggagcggccgcatcgatcctccgcttacgccggaagcaatgtcttgtgtggtgtcgctcggccgtggtaagggtttcgactgcaatcaatctctccacccgtattttaatgatctaatcaactgcgtagacagcttttcagggcccagcgaagcaaccactacattggcgtcgtcccgctgccatttacgaccagatcgggttcttcgccctggcggctagcgcacgggccatgaatttcggtgattttcaatcgctctccctgtctcataaaaaatacctaacctcatagtaaaatgagacgcatcctagtaccagtggcaaagccagaacaaattgaagggggtgcaccactcaactgtacatgtagtggcacgtagaattttcaagccatgatatataaaacgtacgatgaaatgtgattaaaaattcctacttaaaaatgtaaaatcaagggagccataataaaagagatactcagtattgcatcgaaccattaaataagggtgtgtttttgtgaggagaggaaagtagaagaaagcgtatgattaattaaatattaattattttaaacttggaaaatgaattaatatgatttttaaagtaacttttctatagaagatctttgcaaaaacacacggttggggaagtatgtgcgcaaaaaacaagggatttttctccatgcttcaaaccaacgcactctaaaactggtggagtatgaatactagatattagaatgtgataaaattcaaaagtcagggagctagtgccataacttctcaaattgaaattttagtacttaattaggatcaatatacaattactccactttcctaaatcccaacgtaaatcctaaactagtatgtagaaccattaaaataataactgaaattgaactctatatttaaactttaactctttaaggtttgaagtgaagaattcagataaattgaggaaatacgatgaggaagatctatgcccttgcctctatgtcattaacataagcacatacgggagatacacatgatcaataaaacgataaaacaaatgaacaaagcagtacgctgatgcagcaaattgggcaccaactgaacgcgtgcggccaagtgacctcgcggccgtgcgtccgtcgtcctgccgcgctttggccagccgtcggggggtgcacgtaagggagctgaggggggtgcacatgtggcaaaaacaggatatcaagcactgtacagccaatataacttcgcccctgcctagtacaacgaatttagacgtagagtatatctagatttattgtatgaggttggtttttttttttgggatagggagtatgcccccatctctgcactattcaattcgagtctattctcacttattaaattgttcacactccacactgcaaactaatcatgcgccattgtgaggattctccacctaacctcaacttggtctggttccgagttgcttagtgctattgctactagctagaaccagaacacgctctgcctttctcctgctggctgctgctctttggcctgcttcagccttcagcttctccatggttttctttttgtttgctccagcttctccatggttttttttgtttttgttctgagaggaaaaagggattttatatattgataaggtattattcttggtttctttcacttgatagcatgagttcagcatttgtaggctgtcaaatttttaaggatttctcaccatagtaaaacgattatattgaatttacttggtggatcttgatccgtatgtagctcctctttgcttcccaggcatatgagttatctatgtttcccttttgctgaaatacatatggagttaattttgcaaaaccatagatatttttgtcaaaactatagatttatgccgctgtattgcaaaaccacgtactccctccattctaaaatataatggatttttggagggatgtgacgcatcatagtattacaaatctagaacatagtattaccacgaatccggacagcctctctatccagattctagaactagaactaggatgtgtcacatccctccaaaatcgcttatatgggacatagggagtatttagcatatggagttccataattcttgacgtttggacaaaattgagggctatctataacttttaaaatatttagtttgaagaagctagaacatgatatagattattcttaaaagtattttaacaaaattaaatatttcataatttccctcctaggaaattttaggaactgaagtctacttaacaaaagacaactgcagctgagacacagagagtccgagatagctgcaacattagtactaatttttttggtgtctaggggtctactggtttaactaattaatggaatcaaggaataatgggaaattttatatagttccatctctgatagtaatcttacatgcatttgaataatgcggattttatttctgaattgttctattaaatgtactgactaatggacaccagtatgcctcacttcgacatgttttctttatgttcttatatttaattaattatcttatcaatgctaggtacatcagttgaaagctgtaaggagaaactgaagagccaagagacagtatattgagcaacatggccactttaccactagccactggagttggatgggtagtatctcctgtcatcaagcttatgtttgagaaggtccaatcatatatatcaactcagtacaagtggcagtccaatttggtggatgaccttaaaaagctggagactattttaactgaaattctcttggtagtaggcactgcagaaaggcggagaacacttgattgcaatcagcaagctttactccgccagctgaaagatgctgtctacgatgccgaggacatcatggatgaatttgattacatgtttctgaaagcgaatgctcaaaagagaaagctaagaagcttaggctccagttctatctctattgccaagcgtttggttggccatgacaagtttcggtccaaattgggaaagatgctcaaaagcttgagtacagtaaaggaatgtgcccatatgctcgtcagggtgatgggagtagaaaactttagttcacacatgttacctgagccccttcaatggcgtatctccagctcgatttcaattggtgagtttgtagttggtcgtcagaaggaacgggaagaactagtgcaccaattgctggaacaatctgacaaacctgaatctagaagcaaaggagcaaggtcaacatcattagaggtaattactatagtcggcaatggcggaattggaaaaactactttagctcaacttatttacaatgataaaagaatcgaggataattttgatatgagggcatgggtatgtgtatcacatgtctttgataaggtcagaatcaccaaagaaatcctaacaactattgataaaagcattgacctaacgaattttaattttagcatgctgcaagaagaactcaagaacaaaataaccatgaagaagtttctacttgtattggatgatgtttggtatgatgaaaaggttggggtacccataaatgctgatagatggagagaattgtttgctcctttatggcatggggcgaaagtaatcaagattttagttacaactcgaatgggtattgttgcaaatacattaggatgtgccactccattctgtttgagtggtctagagagtaaagatagctgggaacttttcagaagatgtgcatttagcactagagatccaaatgaacatctcgaattgaagtctataggtgaacacattgtgcaaaaattgaatggatcggcattagctataaaggctgttggtgggcatcttagttcaaacttcaactatgaagaatggaatcgagttctaaaaagtggtctatcgaatgagaaagatattatgacaattttacgcctaagctatgaatgcttgccagagcaccttcagcaatgcttttcgttctgtggtttgttcccaaaaggttattatttcgagcctgacatgttggttaacatgtggatagctcatgaatttattcaggatcgtggacgcacctatggaagcttgacaagcactgggaaaagttattttgatgagttgttatcaagatcatttttccaggcacttcgatatggaggtacagtgcattatgttatgcatgacctcatgaatgatcttgctgtccacgtgtccaatggtaagtgttacagagtagaagccaatgaacctcaagagatttttccagaagttcaacatctgtctatactggctgaaagagttgaccttcttcgtgcctgtaagttgcaaaggctgcgcaccctaataatttggaataaagaaagatgttattgctaacgagtttgtgtgggagtagattttttcaaagagttcaagagcttgagattattggatttgactggttgctgcttaagatatttgccggacttaaatcacatgatacaccttaggtgcttaattctcccaaatactaaccgtcctctacctgattcactctgcagtctttaccatttacaaatgttgtttctacaccggcattcatgttttatatgtgcaaaacatgtcatcttccccaaaaacctggataacctgagcaatattttgactattgatgttcatagggatcttactgttgatttggcttctgtggggcatatgccatacctccgggctgcaggggaattctgtgttgagaagaggaaagcgcaggggctagaggtgctgcatgacatgaatgaaaaaaaaaactagaatattagggaaggacctaatatcaaataattaggaggggtgaggctttgaacccaggtcgtctagcccaccaccttgtggagctagccggaagacccctgggcatttctcctgcatgacatgaatgaactccgagggtttcttatatttacatctctcgagaatgtgaaaaacaaggatgaagcaattgatgctcagttagtcaacaagagtcaaatatctaggttggacctacaatggagtttttctaatgcagatagccaatctgacaaagaatatgatgtgctcaatgctttaacacctcatccttgccttgaggaattgaatgttgaaggatactcaggctgtacatctccatgttggctggagtccaagtggctatctagattgcaacacatcagcattcatgattgcacatgttggaagttgcttccacctttaggtcagttaccatctctcagggaacttcatattgatggaatgaaatcattagagtgcatcggcacatctttctatggagatgctggctttccctccctgaaaacactagaattgacagaattgccagaattggcagattggtcttcaatcgattatgcttttcctgttcttcacgatgtactcatcagtaggtgtccaaagctgaaagaactgccaccagtctttcctccacctgtaaaaatggaagtgctcccatccaccatcgtttacacacagcatactgatcatcgcctggacacatgtattactcaaaaggaggttagcttaactagcctttcgggtatttttcacgtatgtcaccaggaatctgtggaaattgcagaaattagctttgacggagcagacatggtgaatgatgggcttagagatctaggccccaatcttccatcccaccaaggaccatttatctgctggtatgctgatttacaccgtgcgtttgcgagtttaacagaaatgaaaattgttggttgccccaacataacatcgttgttggacttcagatattttcctgtcctcaagaacttgatcatacaagattgccccgaattgaatgaactacaagaggatggacacctaacaaccttgacagaggttcttatagagcactgcaacaaactggtatcactgaggagcttgagaaacctttctttcctttccaaactggagatcagaaattgcctgaagttagtggctttgcctgagatgtttgacttcttctccctcagagtcatgatcatacacaaatgccctgaaattgtttctttaccggaagatggtcttcctctgacccttaaatttttgtatttgaatggatgccatccattgctagaggagcagtttgaatggcaacatggtgttgagtgggagaagtatgccatgttgccgtcatgtttgtttgctggtgaatcgataggatatggtcaaggtaattcacagcagcttgaattttgaaaaggataggtctagcaattatttgttgcaaaaatattaccacaatccactgatttgtgttagtgccaacctattgcagatatagctgaggaaatacttcgcgagaatgatataatccagcggtcaattcaatccagtctactgcatccaactgattcttcagcaagttcttccagttttcttcagtaaactatctgggctgtcctccgaagctgtaggcctgccggtgatcacctacagcttcatcacatctacctgtgtggctgtgctgacctggccaaaaaaaaaaaaattccacctgtgggttctattttaatcaagccaacttattatgaggcttgtgcattttcacatctaaacctattatttatgcattacagaacattcaccattcattgcttgcgttttatactttttctacaagatgcaatgttgccatctgctcaccaggagtatctttcttgtggagttattttttcccttttctttggaataatcagatatgtatcacacaatatgtatgctggcttttgagataaataccggagattgaaatgacattttgagatttgagcatatcacattaagttgagaaaactcggcagccttttttgcctgcatcatggtctttctaaccatactttctatgctactaatgtattatatatgatatactgctagtatgtgatcatgagggatccaagctgcatttatagaagtcgtagctagttcgcaacattcttactgtttgtcattcacagaagtcatttatatcatttacagaagttatactaggcttgtccgtgtagttgtagcctgtttattttgctgccatgttattagtagctttcagtatgaggatcagcaaaaagatgatggtccccccttgcaaaatacagtgatcactgatcaggttgatctcctgaatcctgggtaaggtcaattttgttgtctgcccggctttttttttttggttgtctgctcaattttcagggaaaatacctctcggctcgttaaaacacttgccaattctgatggtttttattgcacggcgtgatatatagctagatatatagcttttgctcgttaaacccgttataatggcaggatcagtcaacaggcaacccaatcctccatccgttaacatatacgagtatatgattcaagaaataggtaaggcagaagaaaatttaagaaacagctgagcaaatcaaccaagcagcaaccttttcgaactatatttgacgaagcgaatactttgccattttgccaactgacctatttctgccacctctttagtcgtaactacggtatggtcttctatgtttacataggggagatttgctctgaaccagtaaaaatatcttacggtaccaaatattcctctcaatatattcggcccacaaatgaacttggcccacctaatagccatcaaaggattcagcccaccactgataattcccgttaacaaattcagcctgcgagataatttggaccacctaataaccatgattgaatttggcccattactgaatttgcccccacttaattctcgtccataaatccagcctactaatctatttggcccatcagtttccagtaacgaatcaggcctactggattcagcccatctctttctcctcaacaaatttggcccacgtgttaaaaaaacaaaacggcccatatacagaagagagtgaactcatgggtgtattttttggcccacgagaacgtggccgacgtggccaccggcggcgggcgtacgcctccgccgcggccggcgcagaccgggcgaatactccggcgaggtcactggaggtccatggcctgccctcgtgagccgggatccggggggcgctgcaccgcctacgtggtgcgggtgctccggttcaccggcttggccgggcggccgctggcggcggggcgggcggccgtatcgatctacacgctttgtggcggaagcatggcttgtttggcgccgctccgccgatcgccgtggtagggtttcgaatgcaatcaattgctgcatcctttcccccattttctatatggatttcgagacaccacccgtattttaatgaattgcataatgtgcataggctttttcagggcccagctaagcaaaatcatacagctgcctttgaagactagatcggcgtcttcccgtgtggctggctgctggcgcgcttccgaccaaaccgcccagggattccgtgcatttgttatgtagaaaaatatatgtgagaggaagattgagattaatgggacaattgtggcttggtgatttagtgaccaatccaattctctaaagataagtaaagaccaaatcccatcaaattagaatcgatcataatctggtataatttatttattgaattagtgttcacatgacaaactaatcatgtgctgggggaagaaaatgacaactgtatggctcaccatttaaccccatcttgctttggccaatgcccaccactttgtcaatccccattgcttgcagtatcgctacagcttctttatggtttcttgttctggaagggaaaaaagaatttatgccataatactgatcaggtattattcttggtctctttcgcttgatagcaggagtttatgccataatattgatcaggtattcttcagagtttaaaggcttctaaatttcgaaggatttgttttttgaagcaggagcagtgctattcattagcttgacggaagtttatttacaaggaaaaacaaatcaactaagacatgtacttagaattgaagttcaacattgctacgctattgcttcctagaaggtttcaatttcttccttgatcatgaagcgctcatctaccatcttcagttgatgttcaacaattttcctatttgtctccttccattattccaaactgtgtatgttcctattgttattatcctccttctcctgctttatttttcctaccgtcagtgcattcccatgatgccagagtataaccataatttgttggatagagattaatgtccagccaaacagagatcttgggccaaagttgtttggagaatggccattgatgaagcaagtgttttgctttttcctgtacttgatcacataattgaaaaatatcatcattcagaaatcatcttgcttgtagtttgtgagctgttaatattttctcctgcaatagtagccacatgaagaacataaggttttgttatgtttccaacctccagatactagctaggcatgtttgctgaacagcgcaacaaattgtactctataatctgatctagcactgtggattccagaatggcagaatgatgtccatttccaggttatggagtttggatggtcattagaacttatattttgcaattttatccacaagtagaagattgccaggaagttaacatttttacttctatgcaatcctctcatccttttgttgcctgtaaaatttcgaaggatttctcagcataataaaactcacaaaatcgaaattttcgaaggatttttcaggacatatgaattatctatgagtgtgctggattgaagttggtatccccagcagttcatgttgtgcccatgcttttgttttgtttgggctgtataagactctctatttgttccttttggctttctccaaaaaaccgggtaattaaaattacctgttatctaaaataagtatgatttatctatgctttacttggtcgaagtatatatgttgaacctaattctgtcttttgattactcaaatagattttgtgaactataaggaacttgtgaacctgtgtggttttgcataatcaatatgattgcccttctgtctggactgtttcacggggagaggattatttatgtctcagtaacagttgctgacaattgaatttgttggtcccaatcatagtttagtatctttgttctgaaacacctaaatcaggcttacacaagcttttatattttacacattgggctcctaggttgtttcatcctctctagaaattaagcttctgaaaattctttgcatactgtgttttcggctattttggtccccatagttataacaattcattatttatgatatcatgcagggaatttctgattacatggctgagttttcagcaatgagttctgtaggatggattgtttcacctatcattcgtaaaatggtttctgtggtgcagtcctatatatcaagccagttcacctggaagtctgagatgatgtctgatctcaagaatttggagtccactttggtacagattttgttggtggttggcgcagcggaaagacgaagtagaaaagacagtagtcaagtgatgtcattgcaccaaatgaaagatgcagtctgtgaagctgatgatgtcttggatgagtttgactatctgatcaaagaaaagattgaagacctaggcatgttctcatctgttctctctattggcaagcgtttagttagcattgataagctcagatcaaaattacaagaagttataaaaacactgggcagagttagagcttccgcagagatgtttgctcaagttatggcaggggaggtctctagcttcagtcagtctcctgagtatgctccagcaagagccacaggatctcttttgcgtgaagatacaatttttggacggaagaatgagattgatgaactagtaagtatattggtgaaggattgtgatgaacatttgtcttatgattgtcagttatttaatacagtggtgcattctattgttggtgttgggggcatcggcaagactacactagcacaagctatttacaatgatgagcggattactgagatttttgatctgaagatatgggtttgtgtctcccataattttgacaaaactagactaactaaggagatcatagcatgcacagctggcacagaacatattgaattggccagtttcaatttcagtatgctccaagaaaagcttcgagatagactgatgtgcaaaaggtttcttctagtgctggatgatgtgtggtatgatgaaagagttggagagcacatgaacagagaaacgtggaaggagttgatagctcccataagaaatatatatataagttctgaggctttagagagaaagagaacaggaagcaaaatactagtgacaacccgggcagaattggtagcaaaaatgctagattcgagaagcttatttttcttgcagggccttggaaaagatgacagcagaatgctcttccggaaatgtgcatttggaaacaggaatccagaagattacccagagttgaagataattgaggaccaaattgttgaaaacctaaaaggctcagctctagccattaaggtgactggaggccatttaagtggcaaatacaacgctctggaatggaacaaaattcttcagaaaagtgtactcaaccctaatgacattatgacaatcttacgctcaagttatgaaagcttaccaaattatcttcagcagtgttttacgtactgcagttattccctaaaggttaccgcattgatccaaacaggctgatccatatgtgggcagctcagggttttgttcattcagacagaaatatcaatactagtctggaggatattggcagaggctatttcaatgatttgctacagcgctcatttttccaagtgttccgatgtggagaccaaatttactatattatgcatgatgtattgaatgatctggcacttcatggggctgcaggaat

SEQ ID NO: 7819 - DNA, 53187 bp, Oryza sativa
attcctgcagcccgtaacagtagtaagtgctggccattatattcctaggattaagactgagcatactcagtagcttttcaccttgcctggccaaattgatcgacctttttctatcaacttgtgccatgataagattgcttttactgccacttgctagagaaacggacgcagagtgaggagaatcgacggaagggggaaaagggaggggggagcgggacgacggcgcttggctcctgccctgctatgcgcgtcaaacgtggaaacgaccgggggagcaggaagtgatatgtatcgtttggaagttgggctcactttggcttggcccgttagacgaagacatcaggctttcaggtgttagctggacggaaaaagtacaccgaaggtccctcaacatcgagttacaaaatcatccttcaaccacaaaaccagatatatgacattcttcaacttacaaaaccgttcactttaggtcctccgacgtggcggctgagtcaatgtaggacccgcgtggaccccatatgtcagactgtccacgtcagccacttcttaccctcccccctcaactcacttcgtctctcctcccctctccacggacggtggccggtggagagcagccagggcacggcaggatggtgcggcaggcatggtcgccagtgcagaggagcacgttgcggtcgggcgccgccatggcctgccttgtctccgccgcgcttcgtccccgctatggcctcccttgtctcctcgccccaagggtcggcagcgagcacgactccgcgacgcggtgtgccccatcaaaggcctcccggccgaccagatcggcggatgcaagcggggaggggcgttagtggcgggaccataggggcagagcgaaggggagttggaggtgagcagcggtggcgaggcagaggaggaggacgccactctgattaaactcccatctagggtgaggaaggagcagaagacgaagacggcggcagcgggagggaggtggggatggaggcggcgaggagggaattggccggccgacacgctgtcgccaccgccgtcgttgtccttcctgcccttgctcatccgtgaggctgtccccaacgagccgccgctccagccgtcctcccccatccccgtaccaggcctaattaagccgtcattagcacatgtgggttactgtagcacttaaggctaatcatggactaattaggctcaaacgattcgtctcgcgacttacatgcaaactgtgtaattagtttttgtttttatctatatttaatgctccatacatatgttaaaagatttgatgtgatgtttttggaaaaaaaaaattttggaaactaaactgggtctcagaccgttgggattgggacaagaccggtcagatcgccattgcgccgccggtcatatactggtagttaagttgtggtccgaccggtcgtggcccagtcagaccttcacatgactagtagtctgacaggccttggtgtaaggctctgaatatttccaaatttaactcaaaatcgttctatattgagactgatgctaaatttggttgccgacaaatgccgagcggttaggaggtagtggggagacaacgaaggtgaggcaggacaggggagtctcgtcgccatgggagaacgacaagacagagaagaaggtcagcaaggttgctcgagaaagaagatgatctgatggtggagataaaagtgactgacaatcccacattcccactgggtgaaggcggtcttgcagccctctgaagttacgggagaattgttcagttatctccgtttggtccaatgcgttgttcattgggttgccatgagtcaaacaactgaacaaggtgaaagcgtatttaactgtagaatctgatagcaaagatgtgtacatataatttgaagaggtagaaactcaaaagggaaaagcaaaaaaaaaaaaggaaaactaataaaatgtatgatcacgatcaatgaaaaaaagacacagggcagtacttaggacttgtagcacaaaccgaggaacaactactaagattggagaaaatatataaataataaaccaaattgtgcccagtgatcagcctggtatgttcttcaactgcctgagttgtacataggttggttctatttaaaagatgagttctgcccactgtgatctccatgaagctctccaatcatgcaaggagtataaacaaatgactcatatataccatttgtatagtttcggtagtaacactttgggcgtgagtagcccagatattggaccttcgagctatccaaatgataggctactgttctgaatgtttcatccaagaaaatagcttccttataaggatgaaatccaagaatatctaagtgtgcataatcatgtactgattacttggtacttgtcatttgacagtgaaaacctgaaaaagaaaagatgagtcaatttacaacatataagtaattcatatgatatcttacaagttattaaaatattcagcgtatagaataacgtgagcataaacaaggataataaacacatccaacttgtatgtgcagtagtagcagtactgaagctaaatttgctaatcattaagcttccatagcatagcatttgtgtcctttactgaaaattatgaacactacctgattttggttgcaactgaaataacttctgtaagagtgctagcaggtttcaaatttcgaaagaagggtttctgccggaggggagcgaaataaccgaaatttcggatttttttctcgtaccaaaatatatactctcaccgtcccaaaatataacatgctagagcttagatgggatcctacgaatctagacaggctctgatacatctaatccggtcctaagttgctgaagatggattagaatctctctagtggacatcctaagttgctatatattttaggatcagtaaatgaaccaaatgtgaaataagaaacgagggcccaaggcgtgatctgctggcgatgaacttacctggtaacagaagtaccacgagaatgcacatacagtgctccctgccaggacacgctgtaccggtgtacccttggcgagggccttcaagaggacactcccatggttccatgtcatccaccgtcgtcgtcgccgccgccgtctcaccgccttccctgacgaaggccctctcctcccaccgcccgctcctcgacgagaacacgtacaccttgtacggcgacggcggccattccatcaaacggtacaggtcagcatcacccatggaggacgccggtggagatggtggcggcggcggctccacctcctccatagtccagcaggcgccgtccagcgatgcgagcagcgaatccaggcagaacggcggcgcggtgattgctttcgccttctgctttggtggtggcggcgggggcttctccggcaagccggggatcaagaacacctcgtagtgcggcggcgacgcggccgccggatcgaacgcgaggtacgcgccgccggtgccgtagcggatcggcttcggcgactccgggcatcggggcagcgtcgcccaccgccgcgtcgccgggttgcagacgcagagacgattcccccactcgacggcgcagaggaggaggccgtcgcagtggtccatgacgtgccaccagtccatgtcgcccttgggcggcaccgaggagaggttgccgtcgatatcccccccgccgctcgacgccgccggcgaggaggaggaccgggatcgggaccgggatcggcggcgggagaagaggtgggggcggtcgtggtcgatgtagttgatgaggacgccgtgcaccgagtggggcaggaggcgcgggaggagcagcgcgcggccgtcgacgaggtcgcgccacggcttgcagacgcaacgcgccgcggcgaggctgcgtggcggcaggcggcggaggatgtcggcgagggcgtcgtccggcaccggcagcgccatgggggatcgatcgatcgatcgatgggtacgagctgccgcagttgatcgatcgatgggtacttttttttttatcgttcttgttaagcagcatgatcagatcactcagactcagcatagttaatgggcccaggcccacaatataaaaaaaaaagaggaaaatgtctctcggcttcttcggtccaatgtaattgatgtgtccactggctcatgaaatgtcgctgataggtgaccatgctgcaattttttacttaaggtgaaaacttgaaaaccgatggtcaccggcgagcccttcgccaccggcatatggcgtcgttgacgaggccgagcccggcttcgtccgcgcggatcttgctctcgtccgccggctcgacgctctgcacgccgccggccgggcagctcaccctgacgccgttctgcgggcaggcgccgcacccgttggccacggtcacctcgtactccggcagcccctccaccaccttccctgtcctcgccgccgtgacggtgatgcccgacagcttgccgtcgccggcggcggtggcggcgttgcccgagcgtgctgcgtgacagctaatgacgatggcagcggcggcgaggaagaactaagaagaagacggtggcatttgccatgcatgccatttctgttttgcttctgatttgattttcgtttgatttggagtggaagaagaggattatatgtgggtgagaggattgatcattgatgtgtctgaggagaagaagatagaggagattggaaagatacacaaaacgagacgagccattagcgtatgattaattgagtactgccgtcccataatataaaggattttaattttttattgttttgtttgatcattcgtcttattcaaaaaaatttggaataattatttattttatctgtgacttactgtattatctaaagtactttaaacacaacttttcgttttttatatttgcataaattttgtgaataagacaagtggtcaaacagtaccagcaaaaagtcaaaaacccttatattataggacggaggaagtattaactattttaaacttcaaaaatagattaatatgattttttaaattaactttctatagaaaatttttacaaaaaacacatattttagtagttcgggaaacgtgcacgcaaaaaacgaaacaaactcactcaaaatcacccaggaaaaacacagccagtcaaatttggtgtgtgatgattcggaggagaaatgtgtcagaatgcactgattttctgtcgatcgctaccgctgctagttttctcgaattattgccttcctaaagtgtaaaagttcctgtattagttaaatttgaaaccagattcatccgtcttaattttagagaaaagctgaataccggccgactaaaaaaatggctacgccaggctgcaatacgacgatgtggcatagttttgcagctcgctgggttacaatagtagactactagaaaataagcgcgacagttggcgcgctcgatttatagcctatgtatgttatttttgtgttattaattaacgcatttttcataaaaaaaagttacagaaatcagtttagtttccttgaaactcatgtaaaaatcatagttgaacggaatttttagagttcctatttaacataatcaatcatattgtagagaaatttgtcaaactttctctcttttttccaaccatactattaattcttcttttgtttatctaaaattataattaaattgctattaattcttcttttatttgtctaaatttataattaaattgtttgctaatgataaaataggtgtcggtatttcttttattttaaaaaaacaaagtgttctagaatttcgttttgttaggagtcacaatgttttgtattgatggctaattagtggtaggtgatatataggttgaccatgagttatatatggtgatttaatctattcaaagagaaagtctattttaccctctgaactatttcgccagagcacttaacctcctaaacttttttttactcattttacatcctgaattattgaaaacagttcactttacttccctaatggtatttctctctcttttttaatttctctatactagtagcatgcccgtgctaacgctacggcgatattttattaattaaccaaaagataatgtatcttttgccaatcaaatataaaatgagataagttttaagaactaagaaatgtcaactaaagatctgtatagcattagtgtcaatccaaattgtcaaatcagccatactttgtaattgctatatacagaatgaaaattgttcatctccttgatacaatccatttatttttgttgcgtgacaccccatatttaacaatcacaaagaggatcaccttaggcaatccgatcgaaacaatgtcgtttgtcactacaagcatcacatgaaagagcagtatcttgatatagaactgttggaataatgttgcatgccctctctgagggcaccagcacaagctacaacatcatctgaagctacgcaattcttgctgaagatgtggtagatattgatgtccaagggaaagggggcggagatcgcatgtttctccgcatgggtaacgttacggtgatatttgatattgtaattcaaacatccaaagtataatataggttttggcaatcaaaactacgatgctccagatagtttatagattggaaaagaaaaagaacaagtgagataattatattgctcaaccatttatcaacctacagtgtgcataaacaggtccaaatatacgtattctataaaatacaaaaatatttgcaactaatgaaccgaccccatacccagaaaatattctatataaaaaatatttgaatccaaatggggcatataaagttaaaaaaaagaaaggaaaataaaatttgtgtgacacccaaaaaaaaagaatctggttgggggtgggggtggaggcgaccgaccattactttctcgcaattatatattaaaatcttgctatatgtagataatctgagctttgaactgctatattcatttatcagatcatctcatagagttgtaagcattcaaatttgtacaggactgtttatcaaattttatcgagcaacctatcaaagttcatccatcagtttgctataattttgatttgttaacaaattacttaggctgcattaagttgaacacattaattagtaaccccacaacacctgaacactgaatgaggatttatcggattagggccaactgataaatccagaaaatgcatgctattttatctaaaacagggaaagctgcaaaaaaatacttccaaaacagtagcagaggcaacatatcgtgcccatcttgccatccatatcaaggaaacatatgttttcaaatctgctttagaagaacatgtgagtaataaattagtggactacttacctccaaatctgaagagtaatctgcgattggattcaaaacaaacagaaagctctatgcataggggataaatatcacaacaatgaactgctaaaagctatattaaactgtttggtccactcgtcaagtaactataaagggcatgatataagaaaatattggacacgaaataatttcacaagattttgccggatcaaagggaaatcattagatagtatagcagaaaatcattggatttaatagtaatagattgcagcattatttgcataccaagaactcgtggtccttggtagccattggagattttccatcaggattgcgtaaaatttcaggtcaacacactgctcctcatccgccaaacaaaagcataaaaaggttgatgtataatgtaagcactaaaacagaaacaaagctagaaaacaatatgtaacatgagtaggtgtagaaaaaggagcaatctagttagatttgctatctgaattttgttcagtttatgcttgttgcaaacaatttaggggataggtaaggcaagctttacttcatgggatatctcggagctgatagtttgtcatctggctgattgcaaagtcattattctgattaaagaggtctccatcctcactgcgacaaaacattcagcaacaccagtgggcagcatcaccgcctagcaggtcaggtgtcaccgtagattcaattttctccaatggaaaatcacatcaattttgttaagtatttacatacagccaaatctaaatctaggataaatcagcactgaatgcctcagacactgaatgacgcttgaatattgtacagaggtaaacagatcgacaactacatctatattttttttaaagaaaaactcttcatgtactcaagagtgatatgaaataataccttggagctactattaccatgtgcaagctagttgccacccagaaaaaaacccagaactatatgtatatttttttcccaacttggacacaatacaccgtgatgccatggattacggtaccatttgtgtcctccatcaagatatgagaggaccgaggagagaaagtttgttgtttcagatactgaatcacactatacaccaaataaatctgagctgttgaaaacaccatgaactccgtatatacaggagattaattaaaccattgaatcatattatcgagcagtagggaagcatatacacaaagcaatgtacctggtggcaaactggatgatccagtgggctcagtgagcagtagagatgccatggaggacagccagcaatccaatctccattaccagaaattaaaatttttatttatgaagaatgaaaaagtaatgagttaatataacggatggtccaattagtaggtccaaaatcagtttttgacttcagctttgaagaaaggaacagaagatatgatgaagaaatgcatggcccgggtagcctcagttaccgtaggcacctgctggctgctgcactgttgacagatcgaagcattgctgctggctggcgacgacgacgggtcttggagaagaccttgtgccggcggtggtactcgtggccgcacagattggtggaatggtgggtgcaggactgcagggaggcagagcggctggcggcgttcttcctttttcacggatcgggggcggagcggtggagggagaggcggcgatggggagcggaggaggcggcgacaggagagggcgggcgggtgcgattgataagcgcgtggagcggttgtgggaaagaggcggcgaggaaggcggagaaaatcgcgtggcgtgtgggagggaagcgagatctgtgagggaggcggagaaacgtgcgtgggtgggagcgatctgcgaggggacgtccaagcaatctcggtcgttcgatcgaatacagataataccgtccgttagattcggacaatgatgaatgagtagatcagttggtgaagttagtgaattatagggtagataagtcatattttgcatgcatttacaaacatacatctcaacatttttttttattttttttctcattgtttatgtaggttgaaagcacttaagactaatttaaacatcacaatttaaagttcaagcaaacatccataacattttttttaaaaaaatgaactttaataatgatcccatgtatggttcagtttaaaagacaattaatacaaagagtaataaaattgagacgtgctattatggagtaaagtgaaccgagccaaaaattagatttttttaatagtgtctattgaattagtacgaagaaataaaatatgttttttattttaagatatgcagttcaatatttcaaaaatactcatagagatatgtatgaatatgagtagttgtatatatatgcattcaacattttttttttgtaaatgtactatagaatagtaatgactattgaacgtgtatatgtagggcaagtgggctgacataggcatttgctccttcccctaattttccataggaataagttcatccgaggtcccttaattttacatcgaatccaatttcatctttgaaccctaaaaccagatacagccggttcttgaactgtcaaaaccagtataaacaaagtcccttggtggtttggaaggcggttttgacggacgtggtgcccacgtggctagtttgactaggtctccatctgttaacaaccaaaattggtaaatcatgcatcggccgaggcggattcggaaggattttttcagatggagtcagcctcagtcctgccttccctctcccttctctcttcttcgtcctcacttctctcttcttcccccccccccctctctctctctctctcttcgtcttcccgggcggcggacggcgcgggtgggcggcggagcaggcgagcgaggcgggtgggcgagctccggcggcggcggggtggccttggccgggtgccttggtggatttggtgggtggcgcggtggccggacctggggtggtgggcgccgcggtgggggccagggtggcggggtggaggagaccgacagcgtggtggttggcgccgccgcgggggtgggcggagatggcggatttgggcgggaggccgctggcccgactcactccccgcccttcacgacgcgctcgccaccgcccacaaggagcgccgcaagctcagacccatgttcaacgtcgtgccggggctcgacgggaagcccggctccgtctcgctcgagctcgggagcaagcctgggtgcttcttgatcgccggcaccagcgcgaaggtgcaggttggttgcaggagccgcggcggcgacgggttaattaattctttgatcctttcgatgctcaatttagtaattagcatggcaattagcagttgaatgggaaaatgagttggatttacatatgtacactctgcctctcagtgtttactggagtagcagtgttgttactctgcaatgtcagctctttatcttgccattcttttcttagaaagagtatatacctcttgatgcagttgagtatactcgaaaagttctgcaaatgaaagagtaattaaggatcaaggatattcttgacctgattcctaaagcgcattttctgatgcctcattccaaatgcattatattagagcaagtacagtagcaggctataagtcagctgtagcacgcactctaagacgcagtgtgtgtatggcaagtgggaacatgtattaatagtgtgatatgaccaggtattaatagtgtgatatgtaactattgtatgaattagctattagactggctataaatgaattggagctagtagttggctatactattaaacttgcttttaccatcttggtgtataaaacattatctggaggccatgattacaacatactcctctctttcttagataactatggatcatattgcactaatctgattggtgcaaattgctgcaagtctgcaacttgtcgacgcgctccgggagcatggcctcacgctgcagaacttcgcgtccattcgggagcagcaggtcggcggatttgggcgggaggtcgtcggcgacggcgaggtcaatggaggaggcggtggcatgggcaccgacgcccagctcctctccgccgggtgccgcagccagggccacagccgccggagccgtgccaccgtcgctagagaggagaggggagagagagttgaagagagggagaaggggagagagagagaggaggaaggagagggggctgagaatgacatgtggggtccacgtgggccgtaccattttttattaatttctatgtgaaactgatatgtgggtctcataaggtttattattttttcgagattgaattgtcacgtaagcgccatgtcaataccacatcagatgaagactaagtcaaattagccacgtaggcgtcacgtcagctaaaaccacttttaaaaccgccgagggatctcatctgcactggctttgatagttgagggacctattgtatctggtttttcggtagaagaacgaaaatcggattcgttaacaagttaagggaccccatataaacttattccttttccataccgcagggcggctagataatgggcttcttatgcaggaggtgctttaggcccagatgcacgcgtacgtacgcgatggatagagaagaacagcagccgcgctggagaatcatctatacgttgttggttcacgccacgtgtctgaaaatacaagccgtcatctccaccaatcagctagcgggaagacccgccagctctagatagatagatagataagtcaactacaaacatattttaaaggcaacatatcctatacacataggccctcacgtgtacacacgtacacaccaactaaaaaatatcactaaaaaatttagaaaaaatcatacacatactttcaattgtattacacctagggttaaaattttaacgtcaaattcactgtattttagccgtaacaaaaaaaacaaaaaatctgacagttttaagattgcaattttgtcataattttatcttttttgttattctctatgtagaatgaatttgaagatgcgactttgcacgtagatgtaatactattgaaagtacatatatgaattttcctagaattttttgtgataatttttagttggtgtacacggtgtgtacacgcgagggcctgtgtgcataggatacactgcctattttaaaaagataaaagaaaaaagataagagcagcgggctacaaatttatagccggatgcagcacggacttcaaaacacatgtgtgtatgataggtgggaccagatattgattgtgtagtactatatgtttatatgtaactattgtatgaattagctattaagttaactatagatgatttggagccagtagttggctatagtattaaacttgcttgcttgaaaacttgctacagacccttgaactccttgaactctttttgggtgtcatgctttgctagattttattaaaaaacatcatagaaaggctgtgtttagttcacaccaaaattaaaagtttggttgaaattggaacgatgtgacggaaaagttggaagtttatgtgtgtaggaaactaaacacgaggtgtgtttagttcatgctaaaattagaagtttgattgaaattggaacgatgtgatggaaaagttggaagtttgtgtgtgtaggaaagttttgatttgatggaaaatttggaagtttgaagaaaaagtttgtaactaaactcggccacggtgaaactttaaacatcatatgttggacacgaaaacttatgactgcacttataattataagagcaggtacaatagctgactataagccagctataaccacatattgacgtgaagagagaagagagagaagaaagcatgctacatatttgtagccggccgcaagacggactccagacattatgtgtgtataagatgtgagaccagatattaatatgtattatagttttatagttaattattgtatgaatgggttattagattagtttatagatcatttgaagcccgtagttgattatattattaaacttgctctaatgggagtatgggacagagggagtagtacactactgatcgacctaccttaaaaatttgctacctttgacgagtcaaatttcaccgattgaagatagagacatttagtgcagctgtacacgttatacgagaaatctaatttgtgcagcttcgctacgtgccaacattttgagcccaacaggctcatggcatatctgtctattgatatggtcatacggagtagagcggatgcggtgtccgtgtagccgcgcctgatccttcgctctcattttatttttccaatgaaaaaatgtgaattgaaacttgaaaaagtgagttaacattcagtttaaatttcaaaaacttccaaccaagttttaaaactttcaactgaatatttaaaactttatactgaaaatttctgaacaattatttttaaaatttcaacaaaattttagaactttcacctcaaaattcaaaatgttaaccaaaatttaaactttcaactcaattttttataaaaacctttcaactggaattttaaagtttgaactcaatttcaaacgtttaactgaatttttaaaattttcttctgaaaattcaaaatttttgaaactttcaactttgtattaatatgtgtttagataataaaacttccgattcaactttatattattattttattgctgaaagaaattaaagaggtctaattggagatagaaataggggggttaacggggtgatagcgtgcagccggtgtactaagagcaaggtcaataatatagaccgctgttgactccaaaaaaaatagccatatcatctatataaaacagtgtagctaatgtctacaatagaaatattgtaacacgcatattttattgattcgtgggacccaccatcttctcctacctcacatcctctttctccctcctatcccctcacagttcgtcttcttctcctatcccctcgataacctatcactgacgatgaaatacggcggcggccgtgcggcagacgtcggagatagcggcagccgggccgcggcggaggcgaaagacgacgacggccatgtggcgagtgacgggggcagcggcagccaggccacacggcggaggcgaagtcggcagcgactgtgcggcgggtgacaggggtagcgacggccgggtcgctcggctgaggcagaagacggcggcgaccgtgcggcatacgtcggaagacggcgatggccaggccacgcggcggaagcgaaagacggtgacggccgtgcagtggacgacggggacagtggcggccagcccgctcagctgaggtggaagacggcggcggccgtgtcgggcggcgaaggcagcagtggccgggccgctcagctaaggcggaagacggcggtgggccgcgcagcagaggcggaagacggcggcgaccgtgcaagcgggggcgacggaggccatgcgccggatgtgggagacagcagaggtcgtgcgtcggcgccggcgaggctgtgggcggcggtccggtggccgtgggagttggtgacggaggcatgcagctcaaggcatggccgatgcttctccatgccttgcactttgctgtgagaagaggcagcacaaggtgggccccacaatctcgagcggcgcgtgcagcccggcgataaattagtcgccggctcacactctctctctcttcccctctctcctccaaatcatcccaaaatcctaggtggaactaccaccgcccattactgtacctgctctaagcgaactaacgcaattgcgccactgcgcgtattaggagtcctccccatcaacgttatttaataatgtgatgaatccaatatgcatgttagtatggcctcgtttagatctattggcaaaattttataccctatcgcatcaaaataactaattacacagattgcacgtaaaattgcgagacaaatattttaagcataattactctatgatttgacaatgtggtgctacagtaaacatttgctaatgacggattaattagacttaataaatttgtctcgcagtttacaagtggattttgtaattaattttgttattagtctacatttaatactttaaatgtgtgtctatatattcgatgtgacacgccaaaactttagactatggatctaacacagcctatgttacgaaatttatagtctgagaagatattcgagagttaccacattttcctcccagtactagcttagtttacgccctcaaatcaaatcgagttcgactggacaagaagagcctcttggcctgagagcaggtgaatccgtatggatgaacgaggacgacgatgaatccgtatagctcggaagatgaggcggcgcgtggacctcgaccacaccctccagcatctgcaccacttgatggatcgtcggccggagcgacggattgtgcacgatacaccagaaagccacacgagcgaaccgctccactctctccagatcctccgccgcatcatcgtcgctgcgcaggaggacctccaccctaccatggctgaccagcccggctgcccacccgaacagagtgacggtgtcatcatcgcaatcgccattgtcatcctgatgaagctggctggtgatcgggtcctggcatctcctgcagcaaatcatctccagcagcacgacgccgaagctgtacacgtccaccttggtgtcgatgcgcctgtcgccgtgcagccactcgggcgcgatgtaccctctggttcccctcacgttggtcaccgtggtgtgcagctgctcatcgccgaggagcctggagatcccgaagtcggctatctttgggttgttcttgtcatccagcagtatgttgtccggcttgatgtcgcagtggatgatcggcgaagcgcacccttcgtgcaggtactcgatgcccttagctatggcgagcgccgcctcggcgcgccaggtccatggcggcggcggcggccgtcgtcgaggctgctggtggaagaggaagctccggagcgagccccccggcatgaactcgaagacgagcatccgctgctcccgctccttgcagtagccgatcatgcggacaaggctccggtggtggatcctcccgatggactgcacctcgttcgcgaactccctctcggtgtactcgttggagacgatgagcttcttcaccgcgatgtcagtgtcaggtgagtgcagcagatgcagcgaattcgccacgccatggtagacctcgccgaagccacctcttcctagcaacctctggaaaccattggtggcatcgtaaagctccttcctggtgaagagtctcatcaccatgtcatggtcgctggagcttcttcttctaatgcggcggtgcaggagcacgaggctggtcgtagaggcgagcaggagaaacgccgagaaaccgaggaggagtatgtacggcagcggtggcgccctcctccgcgccaccgccgccgccggaggggtactgcgcgtccgaaccttgatcagcgccttccccgtgacgttactcccctgccgtccggcgcccgtgagggacgccatcttggtgcagcgggttccgtcgaacagcgccgccacgcagaagcagtcgttcaggcacaagccgccgcactgctcctccgccgtgtaggagtataccttgtacggcgaggccgtccaggtggtgttgggcagcttggcgatcacgaattcgccggagcggttggcgacatcgtccccgacgaagtcgcacctcggcggcgcgaacgccggcgagcagccgcggtaccgtagctgcgcgtcgacgaaggagtatccgctcgggcacgcacagtcgagccggccgtcgtcggacacgacgcagtacgagttggggccgcagaaaccgtccaggccacgggtccccatgctacagccgtcgccggggaacatgccggcgacggcccacgacgcgttggcggtggtggtggaagtggagctcgtcgggctccttcgccggacgtacacgcggacgacgccgtccgggtcgagcgtcgcgcgctggtagtagttcgccttcgccatgggagttgtcaggtcgtgcaccgtcccgtccttgacctggtaatagacgcgccccggcgaggcgaagaagagagtggtgttgccgtcctgggtgttgccgggctggttggtgccggtcgcccagtacgcgttgtacgggtcgacgttgccggcggcgaggttgaggtacaggacgacgttgccgtcggcctgcacgtacaggctgaagcggccagccgagaagtcggcatcggagcgcttggacacaagcgtagctccggctccggtggccatggactggccagggaggagcgtgtcggccgggtccctgaagctctcccacaccacggcgcggccaccggcggcgaggaactggaggttgccagagtcgagcagcacgagcacggagccgtactgctggcccgggttcgcgttcgtccagacgttgctgccggcggtgtcggcgagcgacagctggccggcgagggtgacgctgaacacagactgcgccgtggccgtcaccgccgacccggagcccgggtccctcgcgtaccataccaccgccttctcctgtacggcgtcgttgaaccaaacggcgaggagaaaccagccatccgggcggccggagccgagggcgcggaagccgaaggcgaagtcgccggacgggctggtgatgtagtgaggaggcctcagagtcgatcctgccgtcaggttttctgcttcaacttgaagcagacaggatgattgatgcagcagcagtgcgatcagaagcagcgggacgaacgagaatgacttcatttctgctcaataagctgctattgcagctggtcacaccaattttgtgattgtgattatagtggtgccagtgccagctttcttcatagtcatgtagtagtaacttgcattgattggccgaattttacatctccggacgtcctgtttcatcgtacttaaaaaaaatgtttctcccttcgtccacaaaagttacacgtattacttttgacaccaagaccagagagaaattaaatcaccttagatgttacaaaattaaagaatgaatgcaagcatgcaaccaatgagtatttagatgactccttcagttctaataaaatatttaatttatctcttcatttaagtcttgaatgtataaagactaaaaaaagaaacgacttatttagaaaaactttaatgtgaaataggtgtaactttgtggatggatagagtagtacgtactctctatcttaaaatataaagaattttaaatggaagtgacatattctaagattattaatctaaatagttttattataaaataatgttttcaataaaatcggatgcgcgtgatagttcatttgttcaatatacacgttagctgataaaaaaaatttgcatcggacggcggtttcgtcgtttgtatacgtggtctcatgtggttgtcaaggtcaagcatcacaattcacacccttggactccctctgtttcttttttaataattgctttttaatttgatcgcacgtttaactattcgtcatattcaaaaattttatacaaatacatcaaatataaatcatgcctaaattatatttagtacgaaaacaactcacaataaaataaaagataattacataatttttttataagataaatgatcaaatatgtgtccagaagttaacagtgtcacctattaaaaatagaggtggtataaaggccctctttgtttaggcttataagccaacttataagtcgaaaaatctaagtctaaacaaacaagtgacttttttgtttggctattttgaagctataaaccactctaacactattaagccaaaagctaggttagagaagcttttttgacttatgtgagatatatgcatgactccaccattaaacttacgacattaaatccaccggcttataaatcatataagccaacaagtaacttaaaatgctaagccaataagtctaagcgtaaataaagagagccaaagtatagacataaatataggcttaattggttattgctatttcctctgttttctaatacaggatgtcgttcattttttaacatatgtttagctattcgtctcatttaaagtaaattatgtaattatcatttattttgttgtaacttgatttatcactaaatactatttacacaatgattaaatgtatgttaaaaagttaatgacatcatatattaaaaaatagagatgatggtataatgcaaacttgcaatgcaattttactgtgcactcctcgactccctttataggaaactattttgattactctgattactcgagaggatgttccctcgttgtttacatcatgtcactcaagtggttatgaaaaaaattgaaaaaaatgagaagatgtattaacacggggtcaacgctataacaacgcttccaaggagaggaacgacgccgaaaggcgccgccgtcgtcaagccggccaacggcccggcaaagctttcgccagtgattccccattcaaatccacacaacccgcacaagaaggaacgtcgcaagccacatcaactcttcatcaatcagccctaggccaccgccacagatccgcccgaccggccgaccctgccgccaactcaagcaaggggggcaggacggagggggcggacggcacggcggccaggacagcgtcgccccatccaccgttgcactgtagagtcgccgacgccccccgccaacgacagcacggctccatgtcgggcgacgccttgcgcgccgcttgcgtgcaccggtgcacgcatcgacctcgcgagccgtctccgccgccatccatgccgcctccaatcgcgctgcgccacagcgccggccgcttcggccagatccggcttggaccaggccagatacggcgacggcagctgtggatccgtcgccgttttgctcagagagctcgccgccaccactccccgccgccggtgttcaccgcctcccccgcgccaagaggagatgctaccgcaggagaaggccccgccgccaccctcctagctcaccggcaggctttccggcggcggctggtgggggaaggggggcggcactaggtttcgccccccgtgtcacctgcgagtgggcgacgcgggggtcacgggagttctaatatgtgggctactggtaatcgtatgtagtaggtagtacttttaatttcgctggagcatatagtaaaagtagtccctcagtcccaaaaataagcgcatctatgagtttccgtgtccaactttgatcgtctattttatttgaattttttttatgattagtatttttattgttattagattacaaaacatgaatagtactttatgcgtgactaatgtctttttagtttttcaaaataattttaaataagacggacaattaaagttggatgtggaaactcttggttgcgtttattttgggatggagggagtataatagtagccttatcaggatggtttaagatattgttgatgctccaactaactctgaacctggaaagggacgcctggcttccattgttatacttgcgtaggctaaagaaaacttctgggtcattagacacaaacacaacgtaattaatgctaactaggacagttgtcttatatataaacatacacaggcatctaaacagaatggaacatggaagtaataattgtagcaatggaaacttcctaacagttgacacaaagaaccctataaggtctgttctccacatcttataaggaacataaacatagtagcaaactagcaaacaagaaatacaacagactatagtaaacttcagactcattcactcactcgatctggagaccaagacccgtggtgttgttgtgaacttgtgataggttccgctaccgccgtggaggtggagtaatgccgaaaagtcaggaggcctagataaggctggcagaggggcaacatccatgagcatgtgcaccacctcgcgtattgttggcctcatagatgggtccacctgtatgcaccatatacgccacacgtgcgtacctctcggcgctatcagccatgctcgagcctaacaccatgggtgccccggccctctctcttcttcccccacgagttgagacttcagacattctcccgtcctcgataaggctctcaacccagtttagcagcggcaccattgtgccgatcctatgattatcgggaggaagcctcccgcagcatattatctccacgaaccactcaggcgctgcgtagcccttggtgcccatgatcttggtgatggtgtagtgcacctgctggttgttaaggagcttggcgattcccaaagtcagtgatcttcggattctccatgtgatccatgagtatgttgtcgggcttgatgtcacagtggatgatcgggaaggtgcacccatagtgtaggtactctagccccttggcaattcctattgctgtctccgctcgccacctccatggaggcatctccggctggtcgaatatgaagctgccaagggagcctcctgggatgaactcaaacaccaatattctatgatttccctccttgcagtacccaatcattcgaactaggtttcggtggtggattggaccgatggattgtagttcgtttatgaactcctcttccttaaactcaccagggtggtcactggtcgagtaccttcactgcaatttcaggaggtcccagtgaatgcacaatccctttgaacactttgccaaaaccaccatgccccagcagctctgtaaacccgtttgttgctttggagagttccttgtgagtgaagactctcacgccaagcaaggttattttgggtttcatagaaaagtggcagcacaggatgatgctgatagagtttatgttgaatatgtaaacgtagtcggttatagtttaggacttggagttgtactaggtataggattagagtaagagtcagactctatcctaggatctctcataaatagaggggtgtacctgttgtaaccgtattgcgacttagcatagcgagagggagcggctgccagcggcgaccggccgtgagtcattgtaactctgatacgctgtaatatgctggatcggggaggagcgcccgtaatcagtcccccggagatgtaggcctcggctgaactccattatcaaatatcatgcctcggtgtcgtcaccgtgtttggatctcctatgacgttttcttccgagtttggtttccaatgtgatttcaagactagttttttaacaagtggtatcagagcttgcgggagatccatggtagaggtgcgagggaggtgctccacgccacgaaaactacacaggatgtccagggacggacaaggacgcaaggtagagcacgacagcggtcaacggaatttgatcggtggaatcggacacttcaggcagcggtttgaaccgttcgattgctgctttcaacagagagatgaccagacgtggtgctcgggttgatggcggcggaagcgattggcgattcaatcggtaggtcggacacttcaggcgggtgtcttgaactttccggtgagccactttcaacaaggagacatgaggcctcacgctcgggattgattgaagctggaggcgatcggtgttctcggtcgatggattcgaacactctaggcagggtggcctgggcctttcgatgagctgcgttcgatggggagatggctagacgtgacgctcgggtcgttcggtggctgggaagatggcatgcgacttgtcggcttcggctctcgactagattgatggcgttcaatcggaagtcggagcgggcggatccttggtactgatggagatgtgttgacgacaaggtggtgcacgatggatggctacaacaacggcgtacaatctacaagttctatattgttataggcacgagtcagatcgatgtcgttcgttgtcgatggaattgactggagctgctggacaatatattttaatttacaaacttctaatccctatatgttatttgggaaagatcaaattttttgaagtgatgttcaatttttgtccttaatgattacaacattataaataatgattactcttggaattgaatgaattttgtgtgtatatgtgatgtataggtgttattcttacataaatggtgtataagcgataattattcaatgtattaagtgaattttgtgttttaggagttgagtgcatattgttatgctcaaatatagtacttatgagtgatgtacatatgcataatgtgatgaatatatatctaattcctatatgttttcttgggaaagatcttttttttgaagtgatgttttgtgccgccgccgatatggttgcccatggccatgggctagggcaagcgtactgaaagccactgcggagcttcatcctcgccatcacacggaggagagcgagcgaaggatggaaagcagaggagacgcgagaggagggatggaggcgagacggcacgcgatggaggcgaggcagagcagatgagtcgtgggctcgcatccggtggtggtgggggggggggtaaaactgaaatttcacaccctcctggccatttgggcaacgtgggctgtgccatgcccactgttggccgagtagcctccatctgtgtcttcagactttgcaggtgcgaatttaagtcccatgtattgtggttcaagtgtcttttggtgttccttagtccagttggtagtccaggtgtagcaattttcaggacgcattgtgagtgccctaagaagcaggtacaataacttgactcggcgagctgcaaaactattccacatcatcatattgcagcctggcgatagcgatttttgtaagtcggtatcgctcgtttgcagctgctcccggtttactgctgaattaagttcgatttatattttggaataggttcagctctcctctaaaattaagacgaatgaatcagctggtttcaagttttcaactaatacaggaactttttcactttaggaaggcaataattcgagaaaactagcagcagtagcgatcggcagaaaatcagtgcattctgatacatttctcctccggatcatcacacaccaaatttgactctttaccacatcaatgatcaatccgctgtacatataatccccttcttccactccaaatcaaacgaaaatcaaatcagaatataatcacagcacagaatcagcaaaacagaaatggcatgcatggccaacgccaccgtcgtcttcttcttcctcgccgccgccgccgtcattagctgtcacgcagcacgcgcgggcaactccaccgccaccgccgccgccgccggcgactgcaagctgtcggacatcaccgtcacggcggcgaggacggggaaggtggtggaggggcagccggagtacgaggtggccgtgtccaacgggtgcgcgtgcccgcagaacggcgtcagggtgagctgccccggcggcggcggcggcggcgtgccgagcgtcgagccggtggacgagagcaagatccgcgccgacgaagccgggctctgcctcgtcaacgacgggatgccggtggcgaagggctcgccggtgacgttcgtctacgcgtggaagcagccgctggagttcgccgccgcgcaggcgacgccgcggtgctcgtgattggctgccccgtcgtcgccggcgatcgaggaggataggtccacgggtggggaatatgagtggtggcgggaaataacagggtttgattgttattcagagtttcagaccaccatacatcaagtgattgtttttgtttaatttcttttgtatcaatcacatttttcaatccatatatcatcgtgcattttcagtttttgttcttaatgtgagacaaatatgtttcaactcaaatacatgtctagaaatatttaaaacctccaccaatatgaatagagatacagcctggagaagcataaaaccccatttggacgaacccatgaaagcataaacaaaagcgaacaaaaagttagatttgctaattatagattatgtattgacttgtaagtaggaaaatttcagacggagtttgtaaggaattacacaacactctcttggtcctatgtactcccatatccccagtccactgaagaatcacatttcagaagcaattgaagtgcacgacaaggaacattatcatctgattttatacagacatgtctcaggtcgtaagacagcttgaaggcgatcgcggtgactaagtaacaaaaatgagatacagaaggcaaaatagcgatgatgtacgataagaacattcgtgtatccattggtcttcagttaatgccggacagacaagggcgaaggacagacatttggtatgcaacttcttgtccagcaatttaccacttccacaagaatatgaacgacatatatgcctaaatctcaaacctattccagtaataccgaataaatcgagttatgtagttctaaaataaggctgaaatatcacccgctgatgttgcctagccagaagagcatgggaaattgcacaaccgcgaggaaaagaagaaagtagtgattccggctggggtgtctctcatagctccttggtgcgcccagaagaaccctcttcatcgtcttgacaaggaaaactccggtgcagattgagaaccatggcagtacaaaataatatgacgggctccagaagacgcggacaagcattgcaagtgatgtaccagcaaatccatacccagcataggccacaatgtccagcaatggcgcttcaccacttcccagcgtgtacagtagaactctgatcaggattacttgcagaaaccagccaagtaatccttttgtgaactgtagagtgagtgcctctggggtaaacctgcaatcagcaaaaatgtgtttcatgcatgcatcactgaatcaagaatatcatgagtaaatgaatattatttaacacttgggcacttggttgaactagaaatatgtttcaagaattcatcattcaagaaaaacagtgcaccacagaagttaatttctagatactcccacgctttagcatttgtccattctccacacatccttctcttctcaaattctcaacataactactgttcttaccgtcactcaacacactatgcatagcgttctttctttactactaaagaagaagcaagtcagcactacaaagttgaatgagactaaatatgtcgttacctcccaagaacacccaaagcatatccagcaattacaacatacgtcccaaaagccatcagaggaatgtaaagatctggagcattgatatcttgaattggaggtttgtatgacaaccttcctcccaccggttcagttatccttgtccagtgcccctgaaggaagtaaattggtaaatggcttgtaagaaatttcacaataagcatataatacctacaaaaaggtggataaatcttacccggtgcaggaaagggaacaagatcaccttcaacttgtttctcacatactgactgttgacttgaaagtagtactgaggattggacagatactgagtgatctgtccatgtgatgaagcaaagttaagattcaatgtctccggggaaaacacgtgtgttgatgacaacgtggtacacaaaatatagaaagcatacatttgccttgatgaaattttaccaatgacttacattgctttgcataaactcagagcttgaacctaaaaacttctcgccgtatgctcctaacccacttcggatgagtccaggtccagctccatataaagcactttcaaaaggattagcttgtgaagtagcaggtctgcctcccagtcctcccagatcattgttcatcgctgccatgctaactgcataaacaaaaacgaactaaaaaaagactcaaaaaataatgtatcaatgttcaggtcagctcaaacgtcttatgtctacaaccttaacaaatatcccctacggtggctctcagaaacaaacggaaaataacatgctgaggaaccaattactaatgtcctatccattagatagacatattcaagctaccaactgagcatgatatgctgaggagaagatgtatcataaacatatacttgaataaggggaaattagcatagtaccataaccttcaccaagtgccattgccataaaataaaacaaaactagcaaatgcttttggagaaccaacgtggatttgcatatccatagtctactgaaataatggcaaatccagtgtcaattgaaacaacagcaggtcaaaaatgtttctgcactaccaccaaagcaaaatttttatcacgctgaccaaatcttcaaccaaaatatggcatctagccctaggtacggataaacggcaagtgaaatacctccttcaatgtaacactgagaacacgattattgataccactggacacagttgattaaaaaaaaaggcttagacacatgatgatcaacaggtagcctagaattgtactcaaaatagtaacacgtctaacatttaacattttcaatagacaactggagtggtgagatgtaccttctgaatgaatgtcattcaggacagtagctactaatgcactagactttcttggattaggattcaaaaatagcacaataatgcttgcctcttggggttgggaatgtaatgggaaaaatccaaaaaaacaaaagcaggaagaactattcccgttgcaattcgctccctctccaaatgatccttccatttgagctgtaagatcaatcactgcatccccaaccattctgagaccttcctgcgctttcctcacggcccaagattccgaccaaaacatctggaactcgctcaccgaccagatctgggaccgcatcccctcccccccccccctcccctcccccgaatctcggatggcaccggcgatcttggccggcctccctcgagaagaccgcgaccttgcgcacacgcagcaaagctcgcatcggccacgaaaccctcacgccgtcgcggcagtttactgctcgctcggccctcacgcgcactaggggatgatccccgcatttgggaccaatacctacggggagggcaaactaggtggacgaagagaagaaaccctcacctgcggcggcgcaccggcggcgtcgcggcgccgctgggattcgtcggcggcagcagtagagggaggcagcgcgtcgcagcgaagaggagcaaatcccacgtcgagtcgagcgaaccgacgaagacgacgctactcgggccggatggatatttctcgtgatgggcctaactataatgggcctgaaatgttagcggcccaaacattatgatgggtctaaaggatcgcaaccattgaatacgatccaaaattactgtgggcctttttggatctctttcttggatgagaactcgagcagttccaacgttgggctcagccctcgtcggcccgccgcgcccgcgccacggcccacgacgcgtgcgcgctctagcccatggtgttcgtcaggtgagagtgagcggcgacctactccatgatcctctcaggaggaggaagctgccgggcgcgcgagtccacgcgacttttatcccttgaccaacctcattttccaagaattttagtgagtagaaagtctcacctgcttggctgattcgcctccaggaatcatttctttttaccgcaaaaccgcgtgttaatccggcataaaaagctcgaaggcagagcacgccatggcgacgaccaccagcacagcagccaagaagaagaagagaactagagaagagaagcatctccggcgatgagcggcgggaggaagcgggagtggatacggaggaaggtggcggcggcggcggcggggagcgggtcgccgcggtggtcgcggcgtgtccgggcggtgtccacggcagtgctgcaccggaggcggcggcttgggctcgggctcgggcttgggcttgggcttgggcttggggtccgagtgtacgagaatgtggtgttctacgtgctgtgggtggtggagtcggtcgtcgtcctcgccaacctctgcttcttcttcctgcgcttcggttttcgcttgtgatcacaccaagggtccaagatgtgtagttggtgataccacagaggaacatctgctaaatcttctcaatttttttctctctcccccctttgaagaaatgtaaatcatatgtcctcagcttctaacagactgttatgcccagttgctgacttgtcagcaatggagattgacagacgcaaaagcttgaatctatcgtacaaaagcttttcaattaggatacaattttgacagaaaattatgatacaagaaaggcctgttcactttgataaaaaaaaaaccttttggcatagttaccaaaattttagtaggatttcttatatagctaccaaaatttggcagtaaactaaatatagccatttttttggtaattgtactaaaatttggtaaggttgaaaatgacatcaaagtgaacagtcccgaactcttaggctgggttcatctccacttctccacacataaaacggtgttgttcattaacatgtgattaattaagtattagctaaaaaactttaaaaatagattaatataatttttaaagcaactttcctatagaaaaacttttaaaaaacgcaccatttagtagtttgaaaaacgtgcatgtggaaaaagagaaaggtgagtcaggaaataatggggaagaacacatccaaaggtcataccagcaactaccacgaaagcttaagtaacactgagcatggagcatccaatttttgtcttcttccaacatcacaatcaaattgtccttcaagaagaaaagaaacatcccgcaccactatcgggatgcttacaactgtatggagcatcccttttttttttcccagacgagttgcaatgaaaatatgtcttcgatcgttttacaatttacagcacactgacaaagctgacatcgctgggactagggtgcacaacctcgacctgatgggctgcgctatgcgcgctcgctgggtctggtcagcccgcacagcggctgagaaaccgtggcaaggtctgtccatggcggtctctcaacgtgaaaaggaataagttcactttgggtctctttatttgtcgtccagtccgattttcgtcccttgaccataaaaccgggtacgacccatcccccaactttcgaaaaccgggcaaacgagatccttcggcggttttgaaggtggttttggctgacgtggcgtctacgtggcttgtttgactagttatccgtcccacgtggcattgatgtggcgctgacgtggcaattatatattggaaaaacattaaaaatcgtgggcccacatgtcagccacagaaaaaaaataatttaaaaatggtgggtcccacatgtcagctaaaaaaataaatatggtggggcccacgtgggcctcacatgccattctcaaatgaccaaatccaatcctcttcttcctcctctctccggctctccccatctctcctccctcctctcgccaggcggcgtccagcacggcaggcgacggcggaccacggcagcggcgggcggcgcggagatggacagcgcatggccagcggcgggcgacggcgcgcgaggcgtgtggggtggcggcggccatctctctcttgcgcgccactcgcctagccgtccgccgcccttctccccggtggtgaggcctacgccgttcgccgcgctctcagcctccacgtgcccgatggcgatggcctgcttcgccgcctccaccgccgtgtccccgccctcgccgtttggagatgaaaaggcccatgatcttgataccgacctactactacatccacggcagcaagctactccagccagcaacactagcaggctgcaacagccattgacttcgagttgctacggacaaacgagcgagccagacatcacctcggcaccaaactgttagcgtgatatatgtacatgtgtagtttccggcttccttcctatcctcccgattctgttgctataagtcggttgagtagatatggttggttatacctatatatgtacccactccgtgattaattcaatctattgcgttgagtcatttcttctcacatggtatcagattccatctagcttccgcacacttcctctctcccggcgtttctcatggcgccgcccaccctcctccctgactccgctcgcgcggccctcgacgacgccgtccaagccgtcgccgacgccgtccgcacgtcctttactccccgtgaaggcagcgccgtcgaccctgccaccgggtcctccgttgccaacctcgctgcaaaccgggcctccaaggcagcgcatgccgctctctccgacgccctcaccgcgtttgtcctctccaccaacatcgatggatcgccgatatctgcttcctcctcggcgtctacctccgatacggtgctctcttccttgacttcatcctcgacctcgacgtcggctccggtttcttcctcgactccgcccgccccggcagttcctcctccaacttcatcatcaccggatcctgcggtgttgctcctgccggccctggaagccatcctcgacccggtgcggtttcctggcactcctcaacagccttcacggtgcccacctgctgcgccggcgctcggccccgacgccctcgcggccctccatgcgcaggccgtctcagtcctcaacatcaaggccctagttcccatcaccctcgacgtcgctaccgccaacttcacgcgctggcgcggcctcttcctcatcgccctcggcaagtatgcgttgacggcacacgttctttccgacgagcgccgccccgacctcgctgaatggatccagatggactgcgtggtgctaggttggctctatggcaccatctcctccgatctgcttcaagaggtcatgtcgcacgacgccaccgcccgctcggtatggcgcgcccttgagctacagtttctcggctactgtgagcagcgcgccctcaacctcaccacggagttccggaccttccaccaaggcgacctttccgtcaacgactactgccggcgcatgaagacgatggcggactcacttggtgaccttggcgatcctctcaccgaccgtgctctggttcttgctactctcaatggtttgaatgaaaagtttgataccttgcgtagcctcgtaaccatgcagcgtcctttcccgtccttcgccgacgttcgctcgcaactcttgttagaagaactcaccaaggccagtcgcccctccgggcagtccaccgtcctcctcgccggcgcttctagaggcaagccgccatcgacgcccaaccctgcccacgtcaccggctacggcgcgggcgcgtccggcggctccggcaacagctccaacaacaagaatcgccgtcgtcgcggcggcggcagtggcaacagcggcggcgggacgaacaccggcggcggcggcggcggcggcaacacaccatgcggccccaagactccagcgcaaggctgtcacgcccagaaatttaccccaaatttccagaccattttgcgtattaaatccctgtccaggaccagccagggtacacaaaacgacaagtaatatacagttccaaacgtaaataaagcgtaaaatacttacagaagaggcacttagtcctcacacagaaacaaaagcagcaacagcggaaaaaggcgatcctagcggggcttcagctccactccacaggcaaaactcaactggggtctgagccttggtcctctaacttcgtcttcagctcagaagcactacacttctgaaaaggggggataatagcaaggctgagtacaaccaccgtacttagcaagccacaccaacgatgcagacgtgcaaggggatacaaggaggggtttgtggctatttgcataaaggcggttgtaaaatattttgttgagcaaaacagtaacactgttgaataattaaggtaaattagatctccactgatcaacgctacaccacgttgaacaggcccaaccaacccacctatactacagtgcattgggtcgatttattaagtgtgagactaatcacggtgaatctggtcaatcgcccataaccgcgggcacggctattcgaatagttttactctggccagaggtgcacaactgtacccacaagacacaacccaccgacatgtcaccgcgtcatcatgtgcccatgatgcacacgtcaccatgtcgagtgattgtgacgagacccttcgcataaccctcccctaaccatccacaccacgctaaggtttcacccccacccctcaaaaggcagtgggcggtcccctcttgcgccgcggtgaatccggcagctggacaaccggacaccccggccgacccaactccatcacgcccaccctcgccaccggtgcctaggaaagggtcgagctatacttcagatcaagcagtttacccactcccgcttgtggcaagcgctgtaagtcttccagggtttcccgtgaaccggtccttaattgccatgggtgcgactcacaaaaccatgcacccacagcccaccatttagtcgcattttagttggataattacgaccataaaacatggctagatgtctcgagcacgcggctcaacaagatactagaatgtctaatactgcaattatcccatcgactgagctagtggtaattaagcatggctaagcatatagttctagctaggtcatcaaagtaacacaagctaggcgatttattacccacggttgacaaaggacagatatcaagtaaacatggcacaagcgagcagataggtaaaccctgatcccatgtaattagcaaaacatgcatatttatttgcaaacggtaaaacatttataaattgggaacaacatgctcaaggggaatgtgtgacttgccttgcttcttcacttggattttctgaactcttttcctcgcgaccgcgatcttctgaaaggacggattctacacgctggcacgcaaaacgaggaaaaactctaataaaaaccaaggaaacagtacataaaaagtaaacaaacatgtagagctcaattttagatgaattttgcaagttgaatggctcaattcggagttcgaatgaattagatatgaattttagaaggttttgagccattaaattaatatctataattattaccgaattattgcgcaattattaaatattttcacaaaggaaaaggactgccgctgacgtcagcaagagagggggccggcgccgacaagcgggtcccaccggtcagcgacacaagggcgccggtccaccatggaccgggaccaccgaggcggtccaccgccggtccacgggaaccgacggtccggatcggcccaagccgatcgggcggccaggggcggcgcgactgggcacagcacggcacaaagccagctggccaaacgacggcgcgcggcggcgcggccacccgcggcgacggccggcaacagctcccgtgggcgaaagcggcgcacgcgagagagcagcggcgcggcgcggcaagggggaggcgacaccaccggcaacggcgcgggcacggagcgccggagcgcggcggcagcgacccggtcggacggccaccggcggcggcagcgcgtcgcgaggacgcccgggaggcggccgacgaaggggaggaaaagggagagggaggggagtgctcaccgagatgcacgacggcgaaggagcggccgacggcaaggaacggtggcgacggggctcctcaggaagacgacgcgacggagctccggcgacgggcgtcgctcgggatggggcggacgggctcggcctcgatctgaggtagataaaggaggggttagagaggggaggactggtgcgtggtgaccggtaacgactgccgaccgcgacaatatgagaaggatctcaccggcgaccgaggaaggaggagctccggcggatttccggcgaagaggggcggcggccgaggtcctcctcgtccttgcggagctgagggaggcaacggcgcgggtcggcgtcgaccgaggcggcggcgcgacgcggctggagtcggcggcggcggcggagagaggtggttcgcgtggctacggcgctacggaggtggaggggggaaatggagcggtggccgagcttgcccgggcggtggcaaagctggcggtggcggcggagcagtgtggcggcgaccctagcgacgggaaacggcggccggagttcgccgaagtgtggcggcgcgcgggagcggcgtggggagagcgagggagagagtgccgggctcgggaaacaaggggaaatggacgaggggagcacgggggtgcttgttatgggctcgggaaggcgggatcgaggctggacgtggcggaatcggccggcgaagtggggcgccgacgtggggtggtggaggggttaaccggcgccgattttcgcggggagagtggggggaaaggtggaggaggtggaggggatcgatttcacgcgctcgtggggcggggtggggcgcgggagccgcggcgtcgtggggcgaatccggcggccatggcggcggttggggcgacgggaggttggggaagaagatgacaggtggggcctcgggtcccacctgtcggggagagagagaggggaaaacgggcgagggaggtaaagcagacttgagggagagagagagccgagcgggccgagggagaaggccggcccgagagggagagaaaaggggcgcgcgggccgcgggagagaaggaagacttgggccgaaaatggcccaaagagaggaagggggattttatttgttttctttttattttaattgatgcaatgatctttgtgctattaaaactatttctcgagctccgaaaattcacggaaaattccggagagtacattagggcacaaagaatattacaaaatattcccggccaatgatttttaaagggaaaattttaattctcccaataattcacttggataaattgcttaactttttatttaatttctaggaaatgcattattaaatgatttttaattccgaacgaaaatcggggcgttacaaaggcgcaccgggccaggccggctggcccactcccgcgaacccctgggccggcactatccacatgtggccgggtccagcggggcgcggactgctcggcccacgaccacaaggcgctccttttgctggcgcggcgttcaatgggccgccgaacggcccaatcggcgtgacgccggttgcctaccaagccaccttcccgcaggcccagctccaagtcggcctgtcttcctcaagccagccgagcacacctcacgggccggcgcagcccatgggttggtttcctggtgcaccaacacaatgggaccaattcctatcctcccgattctgttgctataagtcggttgagtagatatggttggttatgcctatatatgtacgcactccgtgattaattcaatctattgcgttgagtcatatcttctcacacaaacaataatgcaccccgatggatagcaacggatacaattcgatgacgcgcaataatggcggcaacgacgtcccgccgtgtcgtcaggtcgccgcaggcgaccagacgatgtccttgagcgccggccggagctcttcgctgcaaaacgactggtactccatggcgtcgccgccatccctcttgacgtccaccaggaccaccacgagcaacgacggcgccatgctgaagacgtcgatcggccgccacggcgagccgcaccccgcgcgcgccgctcctcgtcacgcgcgtgggcgtggcgccgcccgttgtgagcgcatccagccgcgcgaccacgccgcttgccgcctcccgtgtcgcgaaccgcgtgccgcccgcgcgcgccgtggctcgccctggcaacgcggcggggtcatgctcgaacagcggcgacaggtcgaagccctcggacagggagatcaggtggaaccgcgtgcagacctcgggtggcattgccatgtgtgtaccggcgtcggcacgaggtcggcgatgatggggcgtaggacgggcgccgtcttccagaaccacggcgtctcgaagaggccagggatggtgatgcgggtgcccgggttgggatcgagcagcatcttgatgagcttttgccgtagcgctggctgccggacctccccagatctgccttcacgcggaccagtggcgctccggtcagggggcagcgtcgaccatgccctccgccaccgccggagctcgcctgctccgccgcccacctgcaccgtccgctgcccgggaaggggagagagagaggggaaagggaagaagaaaaagagggagagggaagaagagaggagtgtggctgacatgtggggccacatgggccccactattttaaaattatttttttacagctgacatgtggggccacgctttttattatttttccgagatataattgccacgtaagcgccacgtcaatgccacgtgagatgaagacctagtcaaacaagccacgtagatgccacgtcagccaaaaccgccttcaaaaccgccgaggaaccacgtttaacagattttcgtaagttgggggatgggtcatacccggttttgcggtcaagggacaaaaatcggactggacgacaaatagagggacctaaagtgaacttattccacgtgaaaaagatctggttgcagcctcaaccccttttctgggaagatcactggttgggaggaacaagcatcagatcgatcgcgccgtcgatttacgacatggttcccaagaggattcgccgtcaaatatcggtggctgatgctttgcgacacagaagttgggttcgctacggattgagggggcagattcttggaatacctgcacttatggtctgccgtctcaaccacgaccctgatcgtcaatcagccagataagttaatttggacttggacaaccacaggatgttacacggctcgatcggcgtatctggcaatgttcattcattggaagagaaaaattcccagtgaacttggtctggaggaacaaaacgccgcaccgctgccgatacttcatgtggcttgtggctcatcgtcgttgctggacagcggatcgactgaggccgcgaggcttgccttcctcacccggcgaggtgtgtgctttgcgaccagcacgacgaaacgattgaccacatcctgatcttctgcccggaatccgcacaattctgttggattgtgatgaatgccattgggcgcccggatctcttccccgcttcttgtcccagtctggaccttctttccgctgaaactgctcctccagcgcttgatggcatccaaacaagatgaatgtctcaagtgatacaagaagaccactccagggcagtgacctcaactgacggcactgatcgatcttcagaaaacgaagcgagcaaaagtcatccatatcatgaagctgcaacagatcagagcaatcaataacatacagctttgtaagggaaacaagatcacacaacccttccatagatgataggccaatgcaagatcataggttcagttccttcaacgttgtctggtggccagatgttgcatcacctgagggcagtggtacaaatctaatttctgaagtcatggcatgccacctagatctggtatgaagcagcttccaatttccgttcgagtgcatcttctccccgtcgactctagataaactctcccattttgcatatggaatcattcatgaaaacagaattgctgaacccgacaaatgttttcacgagcaccagaacctctttctgaaaattgacaagagaacaaaaaataattaaagcagagacatggaatcatggagaggaagatgctaaacacttaaactgagcacatagcatgaccttacacaggatgacaggaatcataagattaacctgtgcattgtattttgcagctgggagcctgcacttttttgcagatcactagatcaaaagcaacatggcaaaaaatgtacagggatattacacaacagtaatgagccaaatataatttctgtgaatggcagacaataggcatgttgagaattagccatccctctagcaatccagcacatattgtacattagttcgtacagacagtatggttaaaaaggccatctcatgtttgaatctctggtgtatttaactagtcagaaaaatacatatgatgtaatgcatacccgattatccatctgatttcaaacaaaaaatacatactcagttctttccaaaaaaaaataaaagaaactccaccagaaccatggtcctgatgttcaaaggtgcacatacattgcatcctgtggaagagtacaaactgtaagcaatgactgatgaatgttctgcagctcataaagagtagtttaggagcgaaaatgcacaaacctcataataaattggcctggttaaaatggaacgcataaatgaattttatgacagcttatctgcacagttaatgcccagccatgggcaagcacaagctgactaacagcaccggtgcgcagtgtgcccagtggccaagttgcaatcaatgccacaagtgctagattcccagataactcactgaagaaaactggaagagcttgctgcagaatcagttggatgcagtagactggtctggattgaccactcgatcatatcattctcgcgaagtacttcctcagctatatctgcaaaaggttggcactaacacgaatcagtcggttacttggttgtggtaatatttagcaacaaacaaatttctagatttatcctcatcaaaattgtagtggtgatggattaccttcagtatcttccatcgatttatcagcatagaaacatgacggcaacatggcatacttctcccactcaatgccatgttgccattcaaactgctcctctagcaatggatgacatccgctcaaatacaaaaagttaagggtcagaggaagaccgtcttcaggtaaagaaacaagttcagggcaattgtgtatgatcatgactctaagggagaagaagtcaaccatctcaggcagaaccactaacttcaggcaatttctgatctccagtttggtgaggaaagaaaggtttttcaggctcctcagtgataccagtttgttgcagtgctctataagcacctgtgtcaaggttgttaggtttccatcctcaggtagttccttcaattcggggcaattatttatgatcaagttctggagagcaggaaaacaaccaaagtccggtaacaatgttaagttggggcagcttataaattccattccagttatcctcagaaatgtgctaggagaatcagagaatccagggatatacggtccctttgggaggttgtgccttcgatctctaagcccatcgtttgatatgcctgctccatcaaagctgatgtctgcagattccatagattccagataatgaagacgtaaatccaaaaggccggttaagctaatctctcgagtaacacatgtgtccaagcgatgatcagtatgccacatgcaaatgatggattcgagcactttcaattttacaggtggagggaagactggtggcagctctttcagctttgggcacctcctgatgaatacaacctgaagaacaggaaaagcataatcgactgaacaccaatctgccagttctggcaattgtgttaattgtagtgtttccagggagggaaaaccaacatccccatagaaagatgtgtctatacactccaatgcgttcattgtatcaatatgaagctccttgagacatggtagctgacctaaaggtggaagcaacttccaacatgtgcaatcatggatgttaatgtgttccaatctagatagccagttgaactctagccaagacggagatttataacctgggtatccatcaacagtcagttccttaaggccagggtgaggtcttaaagcattgaacacatcatactctttatctgacttgctatctgcattagaagaatcccattgcagcttcaatctagatatttgactcttgttggctaactgagcattagctgcctcatccttgttattcacattctcaagagacgaaattacaagaaattcctggagttcattcatgtcctttagaatctctaatccctgcactttcgctttttcaacacaaaattctccgactgcccgaagaaatggtatattccccgcagaagccaaatcaacaagaaggtccgtatgaatatcaatataaaatatgctgctgaggttatccagattttttgggaagatgacaggtcctgtatccataaaacatgaatgtgggtgtacggataacatttgcaaatgataaagactgcagagtgattcaggtagaggatggttagtgtatgggagaattaagcacctaaggtgtatcatatgatttaagtcaggtgaatgtcttaagcagcaacctgtcaaatccaataatctcaagctcttgaactctttgaaaaaatttgcttccacacaaactcgtgggcaaaaacacctgtctttattccagattattagtgtgcgcagcctttgcaacttacaggtgcaaagtaggtcaattctttcagccagtatggacagatgccgaactgctggcgggatctcttcaggttcatcaacatctaatctgtagcactcaccattggatgtgtggaaagcaagatcgttcatgaggtcatgcataacataatgtactgtacctccgtactgaagtgcctggaaaaatgatctagaaaacaactcatcaaaataacttctcccggtgcttctcaaacttccataggtgtgtccatgatcctgaataaattcatgagctatccacatattcaccaatatgccaggctcaaaataatagccttttgggaacaaaccacagaatgaaaaacattgctgaaggtgctctggcaagcattcatagcttagacgtaaaattgtcataatatctttctcatttgataaaccattttttagaactcgattccattcatcatagttgaagtttaaactaagatgcccagcaacggcctttattgctaatgctgagccattcaacttttgcacaatgcattcacctatagacttcatttcttgatgttcatttggatctctagtgctgaatgcacatcttctgaaaagttcccagctatcttcactctctagaccactcaaagagaacggagtggtacagcctaatgtatttgcaacaatatccattcgagttgtaactaaaatcttgactcctttcaccccatgccgtaaaggagcaaataattctctccatctatcagcatttataggccctccaaccttttcatcataccaaacgtcatccaacacaagtaaaaacttcttcatttttactttgttcttgagttcttcttggagcatgctaaaattgaaatttgttaggtcaatggtcttatcaatagatgttagaatttctttggtgattctgaccttatcaaagacatgtgagacacatatccatgccctcatatcataattattctctattcgtttatcattgtaaataagttgagttaaagtagtttttcaattccaccagtaccgactatggttattacctctggtgatactgatattgctccttcagttcttgacttacgtatgtctgcttgttccaacaatcggttcactagttcatctcgctccttctgacgaccgaccacaaactcatcaattgaaaatgagctggtaatacgccattggagtggttctggcaacatgtgtgaactacagttttctggtccaatcactctgacaagcatttcagcacattcctttaccctaatcaagcttttaagcatctttcttaacttggacctaaacttgtcatggccaaccaaacgcttagcaatggaaatagaactggagcctaagcttctaaggtttcgcttttcagcattttctttcagaagcatgtagtcaaattcatccaagatgtcctcagcatcatagacagcatctttcagttggtggagtaaagtttgctgattgcaatcaagtgttctccgcctttctgcagtgcccaccaccaataaaatttcagttaaaatagtctcgagctttttaaggtcatcctccaaattggactgccacttgtactgggttgatatatatgactggaccttctcaaccataagcttgatgacaggagaaactacccatccaactcctgtggctagtgataaagtggccatgctgctcaatatactgtcttggctcttcaatttctccttacagctttcaactgatgtacctaatatgcattggtaagataattatttaaaggtaacaacataaggagaacatgtagaagtgaggcatattggtgcccattagtataattaatactcgaaagcatgtaagatcattgtcatagacaactatagaaattccccattattccttgatttgttgaaccagtacacataaaaaaattcacttaaccaggccggcctaagacagttatctttgatgaagtaacttcagtcccaaaactatcccaaaaaggaagccttttgacaatttgtcatacatgtattcaaattattggacctacaaaccgatatctcccgtcctaataattaattagataatatatgccttccatggatacggatcaaactgtggattatgcctcgatgctgctccaaataatcagtctcggaaacttcgttgatccaagcacaaaaatatccttaattcctcacagaaaagaaaaacacaaagcgtacaaaaaagacccaatccctgcagcaagatcgagttcttaggcgcgatttcgccgcacagcgacgagttctaggataaactagtgaagataggtcgtcgtacgcacagtcgcacacaggcatgaggtgaaggagcatgtctgcctgattggtattatgagagcacacagctaggaagctatcaacctaggtcgcaggtaaacaaacgtttagggtaactagtaaaaagtataaaacgacggtagtgaatgaacacctaccttattggtaggatcagtactccaatctcctccaagaagaagacgctcccaaaatatcttcttgtttatcaagctgcctttgtcgtgagaccagagcccggaggagaaaccggaaacagagctggatcaaaggggacgaacagaacacggaaggttctggctttcgactcttccaaatcttgaagaaccggagacatatagtgctggtttgtggtatgatattgcctaccaaaatttgacagggtcaagttgacatgtgtgatttgataaaaaaaaacaaatttgatgtactcctacaagatatataaatatatgggtaatactaaaagaatttatgaaatggtattgttttttttgttgtttatggtgtgtttagttggccacaaactacttaaaagaattttaacttttttttacactgtttgacaactcgtcttatttaaaaaatttgtacaaaaaacaaaagttatccttaaagtactttggataataaagtaagtcacagataaaataaataataattgtttgaataaaacaaatgatcaaacagtgtaagaaaaagttaaaatcccttatattatgggatggtatattatgggatggagggagtagaattttggtaaggtcggacggacggagggagtagaattttggtaaggtcagaccaagctagcccgtataaaacagaagagcggaagccagtgagatcagcaaatttttttcactaatattagaaaaaaaaggaaaatttgccattgtgaagccctcgagtaattggaacgaagtactaaaacttaccttgttgaactagactacggcggagggacgacgacaaacaggccatcgccgtcgccggggaggataacatgccgccgtatgcagcggataaggccgctcgcttcaccgccggccaggtgccaggtggggtgaactggagcgccccgattctacttcccgcgcgcttccgggactcccggccggcgagtgtcaccagcgacagcgagcatccagcgccgccgcctcccccattctggcttggaaaaagtacaccgaaggtccctcaacttgtcctcgagttacaaaatcgtccccttaccgcaaaacaggatataacgcatccaccgaagatccctcagcggttttgaccccggtttgtctgacgtggcggctgagtcagcgtaggacccacgtgggccccatacgtcaggatgccacgtcagcgaccagcctctcccttcctctcctttcctcccttctctctctcccactcttctctctggattgggcaggccggccggcggtggggaggtcgttgccggggcgaggaggtccgacggccggccgcgacgtggcggcggcggccgggacgaggacgttcttcttcacgggcatccccctaaagctcccgacccagcgcaaggcccccgatttgcgcgcacgccgagaacgccgcagcggcggcgacggtgtcgatgcacacgccgctatcatccgccatgaccgtacaagaaacgacgtcccggccagccggcggggaatccgtcgaagagcgcccacgcggaggcgagctcgacgcgcgcgaggtagagctcgacgagcccatcgcggacggcgaggcggtggtcgaggccgagcttggccgcgtgtgcgtgcacggccgacgcagcctcgtcgtggtcggcgaccaagcccttgataagggccctgaggcaaagcggcggcagtggcgctccggcgagctcctcgccggtgcccttatgcgagctgcggtagctgtactagattaacttcttgcttttttttttgcctaattgtgatttgccagtagaatgacactgattttctatggcctcttagttggatgagataagaagagatgagtatgatgagatggcatttgtagcacgagattaatttcttgcctgtttctgctggatgccaaaattgcaagctttgattcccgatttaatggctgcgatggccgtagataaatcccagctggtggatcccttgatgtgtctcgatcgagttccgggaggcagcagcagcaatgtccggcgccgccaacgcgacctcgttggccgccggcgctggcacgccgcggtcgcggctgccgcggtggacgcggcacaagacgctggtgttgcttgccggccgccagcgctggcacgccgttgtggacgcggcacaagacgctggtgttgctcctccgtgctcccgccgccgccgcccttcccttctgggtcgccgccgcctcattgccggccggccgtcggacctccatgccccggcgacctcgtccccaccgccggccgtccaaagccccacagaggagtgagagagagagagaggaggaagggagagaataggggaaatagagaagaggctgacgtggcatgctgacatatgggtccacgtgggtcccatgccgattcagccgccacgtagggtcaaaccgggatcaaaaccgaatttattgtgactgattttgattagttaagagacgtcggatatcttatttgcaggacgtttttgtaactcgatgacaagttcagggaccttcggtgtactttttccttctggcttccccgccggccagacgaactgcttcgccgtggaagtgtgcctagcccagtcacggcccaagtagagcccaaaccaactgttctctctctctctctctctctctctcacaacaatttcgctgacgtaaatcatcagatatttccatttcattgacaaagcatcttttggagtagttaatttcaaaggatatggtcataaaatctctacatttttttctgtaaaataaaattcacttgttccaaattgattcctaaattgtccggtctaaaatcaactctctatagataagggaagaccaaatcgtatcaaatcataacgatattaatatatctcggatacaatttcatactatatccgaacatgaaaataatgttctcagtttctttttattttcttttttttttcaaggaagagagagcttcattgataggtaacaaagttattacaatcgttgagaacaaagccttgtacgcaagtaggaacatgttcccgccaaactgcacaatacttcgttttgctagccagtggtgctaactcatgagctaccctgttgcctcatcttacctcatcttacaacatgacaaatcttcacctctgaaagcaactcctttgtacattgcacatcaatgataatatgacatcatttagatcgattctctttatgagaatttagtgcataactacggataaacaatctgtttctagcactactggcatatgaacccattcagtggccagagctaaacctccacgacaagccaatagtttcaattcttctgctgatgctccatgtcgaatgtacttccaggatgataacaagactgagccgaagttatcacgaataattatgccaatacctgcactgcctgagcctgcacaaaatacaaaatgttctcaatttcttatacatgaaagaattatatttaaaaaaatcagccatcagctgggaatcaaaagcaagggtgagcagatcactccccaaaacatgagagcactgcaacatattactacctccttttcattatttatcatattataagtagttttgttttttttcctagtcaaactttttaaatttaatcaagtttacagaaaaatataataatattttcaacacaaaacaaacttactaccaaaacatattaaataatatataaaatgttagttttaatgaaacattgttgctaaatttttttataagcttcatcaaaatgacttataattaatatataacggagagagtacgcattatactatttcagatctttttaactagtagcatagacttcaactcagaaatcagaatacatacaagagaattcaactgggaagcagcttccaattttccgttcaagggtatcttctcgtcgtcaactctagctgaactctcccaatatggaaacattcagcaaacagaattgctgaattggcccatgttttcacgagcacaaaatttccttctttttgtccctgaaattgcgcagagaataaaaaaattaagcaaagacattgagaagaagatgctaaacacagaaactgagcacatagcacgaccttacacaggaatcatgggatcaacctgtccattgtatttgtagaaccccagatacaaagctaataacatcccaaagaatgtacagtctacaaaattacatctaatgagcctaacgtatcttctgtaaatgacaaacagtaggcagtcgagaactagccatcactctagcaatctagtagcatacactaatattgtacacgtacagacagtatggttaaaaaggccatgtcctgtttatgggtatttacccgattatcgatctgatttctagaaaaaatacatacccgattgtttcagaaaaaaaaaaactccacaagaaccatgctcctgatgttcaaaggagcacatggctacattgcatcctacggcaagggtacaaactgtaagcaatgaccggtgaatgttctgtagtgctctaagagtaggtttagatgcgaaaatgcacagacctcatgataagttggcccgattaaaatggaatatgcaaatgaatttcatgccagggtggctgagctgcacaggcatgaatggccagccgtggccagctggccaacagcgtcggtgcgcggtgtgcccaatggccatgccgaagtcttgatcaatgcagataattcactgaagaaaactggaagagcttgctgcagaatcagttggatgcagtagactggtctgggttgaccactcaatcatatcattttcaagaagtatttcgtcagctatatctgcaaaaggacatgagttagtatgttgcggtaatattattgcaacaaatcaatttctaaacttatcctcatcaaaattcaagtcgtgatgggttaccttcagtatcttccatcgatttaccagcatagaagcatgacggcagcacggcatacttctcccactcaacaccatgttgccattcaaactgctcctctagcaatggatggcatccgctcaaatacaaaaagttaagggtcataggaagaccgtcttctggtaaacaaacaagttcagggcaatcttgtatgatcatgactctgagggagaagaagttaaccatttctggcaaagccactaacttcaggcaatgttttatctccagtttggagaggaaagaaaggtttctcaggctcctcagtgatactagtccgtagcaggactctataagcacctttgttaatgttgtcaggttgccattatcaggtagttccttcaatttggggcaatcccttatgatcaaattctggagggcaggaaaacacccaaagtccaccaatgatgttacattggggcaatctacaatttccatttcatttaacctcacaaatgcatggtgaaaatcagaacaccagccaataaatggtccttcaagggatggaagattggggcttgaatctctaagcccattgttcaacatgtttgctctgtcaaagctggtgtctgcgatttcctcagaatccaagtgccaaagatggaaaatacccacaaggctagttaaactaaccttttgaataatgcatgtgtccaagcgatgatcagtatgctgtgtgcaaacaatgttggatgaaagcactttcatttctacaggtggaggaaagactagtggaagttctttcagctttgggcaactgatgaatacatcacgaagaacaggaaaagcataatcgacagaagaccaatatactagttctggcaactgtgtcaattctagtgtttccagggagggaaaaccagcaatcccatagaaagatgtgtctatacattctaatgcatccattctatcaatatgaagtttcttgagagatggtatctggcctaaaggaggaaggaacttccaacatgtgcagttgtgaatgctgatgtgtcgcaatctagatagccactcggactccagccaagacggagatgaacaacctgggtatccatcaacagtcaattcctcaaggccagggtgaggtattaaagaattaagcacattctgttcatctgacttgctatctgcattacaagagccccattgcagcttcaacctagatatttgactcttgttgactagctgagcattagttgcttcatccttgtttttcacattctcgagagatgtaattgtaaggaacccctggagttcattcatgtcctttagcacctctagtccctgcatttttgtgtttccaacacagaattttccagctgcccaaagatatggcatattccccacagaagctaaatcaacaaaaaggtccttatgaacatcaatatgaaaaatacagctgaggttatccagattttttgggaagataataggtcttgtatccataaagcatgaatgtgggtgtacagataacattcgtaaatgatgaagactacagagtgaatcagatagtggatggttagtatttgggagagttaagcatcgaaggtgtatcatgtgatttaagtcaggtgaatgtcttaagcagcaaccagtcaaatccaatagtctcaagcccttcaactccttgaaaagatctgcatccacacaaactcgtgggcaaaaacacctgactttattccagattattagtgtgcggagcctttgcaacttacagacgcaaagtaggtcaactctttcagccagtatggacagatgtcgaactgctggcgggatctcttcaggttcatcaacatctaatctgtagcactcaccattggatgtgtggacagcaagatcgttcatgaggtcatgcataacgtaatgtactgtacctccatactgaagcgcctggaaaaatgatctagataacaactcatcaaaataacttcttccagtgcttttaagacttccataggtgtgcctaccatcctgaataaattcatgagctatccacatgttcaccaatacatcaggctcgaaataataaccttttgggaacaaaccacagaaagaaaaacattgttgaaggtgctctggcaagcattcatagcttaggcgtaaaattgtcatgatatctttctcatttgatagacccttatttagaactcgattccattcttgattgttgaagtttgaactaagatgaccaccaactgcttttatagctaatgctgagccattcaacctttgcacaatgtgttcacctatagactttaattccagatgttcttttggatctctagtgttaaatgcacatcttctgaaaagttcccagctatcttcactctctagaccactcaaagggaacggagtggtacagcctaatgtatttgcaacaatatccattcgagttgtaactaaaatcttgactcctttcaccccatgccataaaggagcaaataattctctccatctatcagcatttatagaccctccaaccttttcatcataccaaacgtcatccaacacaagtaaaaacttcttcatttttactttgttcttgagttcttcttggagcatgctaaaattgaaatttgttaggtcaatggtcttatcaatagatgttagaatttctttggtgattctgaccttatcaaagacatgtgagacacatatccatgccctcaaatcataattatcctctattcgtttatcattgtaaataagttgagctaaagtagtttttccaattccaccagtaccgactatggttattacctctgatgatgttggtattgctccttcgcttcttgacttaggtatgcctacctgttctaacaattggttcactagttcatctcgctccttctgacgaccgaccacaaactcatcaattgaaaatgagctggtaatacgccattggagcggctcaggcaacatgtgtgaactacagttttctggtccaatcactctgacaagcatgtcagcacattcttttaccctactcaagcttttaagcatctttcttaacttggatctaaacttatcatggccaaccaaacgcttagcaatggaaatagaactggagcctaagcttctaagatttcgcttttcagcattttctttcagaagcatgtagtcaaattcatccaagatgtcctcagcatcatagacagcatctttcagctggtggagcaaagcttgctgattgaaatcaagtgttctccgcctttctgcagtgcccaccaccaataaagtttcagttaaaatagtctcgagctttttaaggccatcatccaagttggactgccatctgtactgggttgatatatatgattggaccttctcaaacataagcttgatgacaggagaaaccacccatccaactccagtggctagtggtatagtggccatgttgctcaatatagtgtttaaggctcttcagtttctccgtgtagctttcaactgatctacctatcatgtattggtcagatcaattatccaaagagaaaaacataacgtgaacatgtagaagtggaacatattggtgctggttcatatagttgatagcacaattcagaaataaccttcgcattactcaaatgcatgtaagattactgccagagatactagaactataagtacataaatttcccattatgctctgattctgctgctttgttttatcagatcattaggcccctaggcaaaataagggtaggagtacaaatgatgtaactatctcgtttttttcccggttaaagaggctaaaagacaaatatccaaacagagaagaaacttaagttctttgggtggggggggtgggggggggttgataatttgtcatacacgcatccaaaattatttgcctccaaactggtaggagttccattcctaattagagcagatccctctccgaaatccaaataagcatcaactggagtatctctccatggcccatgctgccccagataaactaagttctcaaaaacttcgttgcttcatgtatgaagtactatcccgaaaacccgaagtatctgtatttcctccgaaaaatttaaaaaaaaatagaggatattataaggactgaatcctgcgccactggagtacctaagcacgatttcgcggcggcgc

SEQ ID NO: 7820 - DNA, 45916 bp, Oryza sativa
  unsure (1)..(45916): unsure at all n locations
catcatcaatagctgtaccctctgtaagttagagatgattccccccccctcattctttgatgtaatgttgcatctaccaatccatttagcctaggaagctattgctggtgaacctgtccagtatcggtggatgtatcccattgaaaggtttttgcgaaggttgaagtcatttgtaaaaaacaaagctcgccctgaaggatcgatagctgaggcatatattttgcaagaatgtgtaaatttttgttctatgtacctgcaaggggttgaaacaagaatcaatcgaccaaatcgaaacgaggatgtgcagagtgacaacagcagtacaaaatttcagatatttggtactgttggcaggccactccttggtaacaaatactgccagatggatatgaatgagttggagaaagctcggatatatgtactaaagaattgcgaagaaatatcagaatacgcagagtaaacaactactacttactctcattttctaatatgtaaatgctgtcaaaatttaacatacatgtgcatgtcttgcaacattcacaaagaccaacttagcatccagaacagtaaaggtgtggaaaagcgccatgacaaagaattttttgtatggttcaagaatcctgtatgtacacgccaaaataaaagtatttttttttacattttacaactatttataacctatataaacattcttccagatatttgagaaacattccaaaggatctccagatatatcagaagagttgtttgctctagcaagaggtcctgatgctcgagtaacccattacacaagttatatgattaatggatggagatttaacaccagggaccgagacatgttggttcaatcacaaaacagtggagtctttgttaaaggtgatgaagccagtggaagcaaagactattttggtgtcttgacagatgtttgttagcttgataatatctgtcaagacaccaaggtactttcagtgtcatattgtttaaatgtgaatggtgggatgtacacactaaaagggtagtaaaagaggacaagcatagatttaccttaattaatacttcccgtacattgccaattgatgagccatatattttggcaacacaagctgagcaagtatattatgtcaaagatactagagaccctaaatggtttgttgtagtcaagacgaagccacgtgatttgtatgactttcctcctaagaagaagaagaaaatgatccaactttatcaaataagtctagttctgaagcatgccaagagaatgagcatatcacggctgcattgaattacactacaattgatgatggtgacttccctacggttctcagtaaagatggagtcgaatgtgaacccattgaagcagaaccagtaacacattctgaagatgatatgtttgaagaggaagaagaagaggaagattctgaaagtgatggcgctgagtatacagatacagatgatgaaagtgacatccaaagtgaagaagatgtagatgacagttaatttataaactatattcatgttactgcaaatttacacacaaacacagcaaaaatatgttggcctgaaatacaattctttgatattgaggacattaattgcctatatgtttaatacaatatactaagtaaattaatttcttgcagattatgaaatgtaactaatccatattgagccctatttgactgattagtagaaactagcatgtactactaagtattgggccctgttgctactctgtaagtcacggtcagatatataatccatactccttgaccaactgaccatgctggataatagcttttttcagataaagaggatagggatctggagacatctgtatatccatctgctcaggagtatttctcccacgttcctcaccttaccccatgtttccctctcggtttccccttttggttttttgactgaactgactcccactcgaatctgttgttttggcttggctcacacagatccagccaatccatggtactaatcaacaaagcatcaagatatagtagccggcagcaccaagcagatgaaatggaacttaccacttctggttctgccgtcagtaagcccggggtgctccgatcgtgccgcgtcctgctaccactgctcaacctccctctgaaggtttggattgaactcgacgcaactcgaatgcaggatggatctcgccgcgaccccgccgcgccgtatcaagttcgccgtgctcccgccgttggatcgaggtcgcagagctcctgtagccaccattacggggcctgatgttgcagcagctctacctctaatagcagcctcagcgtcttggcctgcaatccttccgtcgtgccgaggctcacgccttcggccgccgggtgctgctgcctgctctgtgtgagcctgactgttgaataggcaaagcggtagagagggatgaaaaggaggttagtgatggtgtactgtactactagaaccaaacagtgaatacatttattcatcacaggtacttgtctcaacgatacaactttgttgccacaaggtatctgcaagatagcgagagcactctaattcatcaccattcactcctcacgattgatatgattagtgattacagggtagtttatcactaatttttaatatacaatagtgaccagacctgaaattctcacaactgggtcatcactgtttacatcttttgtgataaaaacacattttctcactagtaataggtgaaattgtgatggcagaacagtttgtcactagatatccgtccaatggtgacagcaaaataatttgtcactatacaaccacttactagtgagagaagtgagggtttcatcactagagttcatcactgaaagcctaatcccttgtagtggacaaatatacagatatgcaagtacttaataggatgtaattttacgggtcacctagtattttatatgtacaagatacacacttaattatttcattggcagtacaattattaagagcataagtacgtacataagtaggctcaatatgttttttctgctcaggtacataagttatcttgaaatcgcgaagaccccatatctaacagcacacatatataccaaccccatatatatatctggcagtacatacatatactatgggcgctgttctgatctttttgaagatgcattgtgttacactggcatttacgcacagctcgaagaaatgtgagtaactggacacacatttaggtcagagcatttagcagcaacaagaccgggcgactcctgcatatcaagatctttgtgcaacattccatcgggcagattccaatcaaaatggtagagaagattagccaaggcaaattccatgttggcccacccaagatttatcccaggacatattctacgaccagagccaaatggaagaaacttaaaattactccctttaagttctatatcattatcttcaaatctctctggcttgaactcctcggcattcttccaatacatactatccctgcatattgcccacacattcacaaatacagatgtacctttgggtacatcatagcccatgatcttacatgtctcacggcacttgcgaggggacaatagcggcactgggcaatgtaatcgaaacgattcctttaataccatctttagatagcttagttgggcaagatcatcttcagttatggtgtttttcccttggaaggcttgccgcatctcagcctgcacctttgccattactcttggggagcgcatgagctctgccatggtccaaatcagtgttgtagacgacgtatccgtgccagccccaaacatgtcctggaatgatggtttttgtaattaataatttactaatcaccagaaatcttttttatccattaccacctaaacttgcacaatacgcgcctgaacatacagcctaaacctgctgtacaaagcatgatgccattttttcagtaaaacattactatctttttgtatacaatattgttatatgtatgctttcttatttaatctcataggaggtcttgacccttattcgaggctatttatgtaaataaaactttatggttgggtttattctaaatagagaggttaggatgtaatcatcttgcttattttcttttaaaaaagctaactatgttttgtaggcgtaggttctctgtctatcttcatactacgagctcacaatgctccatcttacctcaggtaagtaagagctaaaaaatcaatcttgagcattgaactatttctttgtttcattgattttttttactcttaatacataaacgacagcaatgaaacgacgatgatgatgaggacaagggagggcgaggtgagtgtggaggaagatgggcctaagggcatgcacaatggagaccactgcaggcaccagtgatctcaagacgccacataggatagaaccacacaaaggtcacactactcacagcggaaaccactccaaaacgtattttgcattcagccactatctatttatatgtcagctctgatagtgtatcttattataaaacctattaaaactttatattttggtccttataacaattaaaagaagtatatatgcacccctaaacaccatatggacccactgtcagcctctccccctctcttttttattctctctcccgagccttctcgtcttctccatagaaaccatctattttattctctctccctctctctgctgagcattctcgtattcttcttctccaaagaaaccggcgctctccttcttctcctagtccaccttgccgaccagacccctcccctaccccgtgagctcgccggtgagacctattccctccttgtccctcacgccgccgcgagatccccatctcccctttccttctctctaggtgagcagagggcgacgggatcggcggcgctcgagctcgagctctccgacaacgagagagagttgggcagcgcggatacagcctcgtgctcgctggatctggcgacacaagccacaacagcagcggatttgccggcgagcggcgacgagaccacaacgacgacggcagttcctctccccctccgttcttcgcaagcgtcggcgacggtgcttctccgaccatgagctcaccggatctggcggcggatctggtgagcagcgacgcgaccacaatggcggcggtgagtggcgacgacaaccacagcgagatggggatttggggcaggtgcacgcggggaccgaccggacgaagcgatacgtggggctccgactcctccaatgctagtcttcgagtcgtggcttagcggctcccgagcctaggtgcggcgcttcaagcgttccctctgcaagcgcgcttccggcctgtggaacctcgttcggctacgagctcggctcggctctgacgtgggctcagctctgacgtgggagccgtgagaccacaggtcagagtggagcgttgtacatggcctatggacggcatggatgtggagcccgaggacgaggtcctggtcacggtgtgaaggcgaggtgccagagtgtggccggccagggcaactgaggcacagtaggtggggggccagagtgagaggctgtggagctgcaagacgaggtggaggccaccgaccagctgggaggggccgccggcacaagcggaggaagacgtaaagccacggcccatggccccgcctcctagcacgtactcctggatgggccagctgctagggccatgacaccagaccggcccaggcagtatgtaatttagggataaagttttgatttttaatatattgccatgttttatatgctagtaaatctttcgttcaaattaaaatatatgttaaatcttttgttgcaagtaataattccctccatcctaataaaatataagtacaactatatatattttttcaatgtttcaaaatacatggcgtgcgtgcaggcatgcatgcaagcaattaactagcacacccactcttctaaatccgtcgtttttaaaatccttcaccctcaagatttaatcccatcgggtgtacttattgtatttattgctgtgatgaaaatgagtaggagatagtaattcttttttggcctttgcattagtggttgttgcacgtcttatagtttgggatggaaggagtatatgttaaaactaaatatttaacccaaattaatatatgctgaatctaatctcttataatatggtatctagagtagtttacaagtggacgcatagaaattagtcttctcaatgacatgtggtctcaactggttttactttttattcaaaagtttatagaaattttgtacgaaggccgattgtgattaacaaaattccagagtgacccttactataattccttcaatttggttaggtcaataactccttcaactaataaatttaatactatgtattctcacaaatgtcatgatatctagcaagctaaggtcacatggtacgcatggtaacaatagagagtgacccttgtaatgaaagtattttaaggataaagatacctaaccaaaatgaagcacatgtagtaagtaccacatagataagtttttttaccttaatcagaatccatgtgaattctctatgaaattcatttttatcttagaattacatgcacatggagcctgcataattaggttgtccacctacgcaaatatttctaaatatttatggacaagcaagcccaccaatgcatgcaaccagcggtgcgcatctgcctctataaagtgtttccacggttggttgctaagtcattcgcatacgaaaagatttttaacttatagctgtatttcaaaagaagctgcatgcaaaaatcatttagacataataaatcgaccagagtggttcagtgatttaagtctaggagtagtattctatccgaaataaccagcaccaccatggttacccgctagatccacgagctccaccccggttgtccacttgctctgccaacgccgccattccctgcaagatctccactcatcctacttttcccatacgcctccggcaaaggtgatgcatccgcatctaagtgacaacctcctgcgggatgtcccaccataaccacaaaacatcctggtacattgtccttacactgctatcgacggctatcgtcggagatttaagcttgcttgtgtataatgacagttgcttgctttgttgcttatttgaacactgccgagggtgatttcatctggtggcatttagggtgttaatagatctactcggtctcttgcttctctagttgtatatattggatgcatgggaggtatagggaaattacagagaaatcagccataggaaaaattgcctgcgacaacaagcattagtgcttcatctatttttttcggagcagagccttttcacaatcttttcttatgtccatgttcccaacctcactctctcgtttaccacgcgcacgcttttcaaattgctaaacggtgtgtgttttgcaaaagttttttaaaaagattgctttaaaaaatcatattaattcatttttgaagtttttttaagctaattattaattaatcacgcattcatccattgctccgttttctgtgtcaaatgtgagggttcccaaccctcacctaagaaaccagccttagaagtgtagtggatcggtatgttgatgcaaaacaaagtgcttaattagctatatgcattgattcatattgagcaaatgtttagagaagacagcgtagatagaatttatgctatatatatatctcatgcgagccagatgtatagattggatttgtatgacttaaaactatcattnncnngnggggttttgcatccaaagtggatatggataatatatatatatatatatatatatatatatatatatatatatatatatatatatatatatatatatatatatatatatatatatatgatcaacacaagtgtcacaatctataatgttcagttaatgtgaatgtggttaagaatttgtaatgtgattgacgtgaatatattctgacaagagatctcccaatggtttgtatgggctcgccgtgctacatggcagctagattttttttttgtgccggcggtttttctgaactgaaccgcctgcaaaaacttgtatccacaggtggccaccatatataagaaatcatcatttgtaaatgtattttgctgatgggaacataagatatacgtctgtctaaatccattttcacgtgtggttctttcatgagcctgcaaatgtacttcctttgttcaagccctcacaaggtgggtcaagaaacacccgtgaaaacatgttataagccacctagaaacatattttctgcacttgtgtcaatgacccataacaactctttctacatttcaatgacgcatccaagtaatgtgcaaaacaaatataatacttgcaagagaaataaatggttattttaaaaccacatattttaattaggtgtaagaaataaaattaaaatatttttggaattttaaaatatttcaatttaccataaccattaaactgaatatagtataacattgatgttctatgttaaacataatttctactccctccgtcccataatataaggtattttgaggttttttgcttgtaacgtttgaccactcgtcttattcaaaattttttgaaattattatttagtttatttgtgacttactttattatctaccgtactttaagcacaacttttcgttttctatatttgcaaaaaaaattgaataagacgagtggtcaaacgttgcaatcaaaaattcaaaatctcttatattgtgggacggagagagtagcaaatttcatacatattactccctccgtttcacaatgtaagactttcaagcattgtccacttatatatagatgttaatgaatatatatatatatatatattgtctagattcattaacatctaaatgaatgtggacaatactagaaagtcttacattgtgaaacggaggaagtagcacttaccgtaattttcattcccctattaatgttgtttctcatgattgaacattgcccctaatctaccatgaatacatagattgaatgagtatgcacatattaaagggaaagtttactcaattaatttaccaggttgttgttcccatatcttgttaaaaacacaatttcatggggcaagttttaaatggaaggatgtgttgggttcatttaagttaagttaaaacttaacttaagcatgtgttgggtttgttgaatggggtggattggacaagtcgaaacctcaaaactctttttgagggtgtttggcttggaacagttagactgtattcattcctaaaagggaatgtgtcactaagatctggatcaaccatatccctcaaaacctgacggactaatccaacccactttttttcttgtcactcatatgcgaatcataccatccatctcaaaaaaaaaaaaaaaaggtccatcccttaaaaaaaatggatagtctaacctataaataacaccctgttcctaaaccaaagacgacatgctaaatgattaaaaaacagtgatgtgaagcttactcacccataaaagaacggtgataacttggtttgtaattggaattggcgtgccgccttccttctggagcctgagcaacacgtcgagagagcatgacttgctctccaccgccgccttatcgccaacgtcgtcgttgccgctcatcatgtccgtttcgatttggttcttccgttcttggatgatctcctctatgatgcgctccactttgttgcggttcgcgagaacgttccgtggccctgtcgcgaccatcgacgcgagcttggaggacgggaagaggtcggcgacgctgagcgccgacgtctggtgtagtatggcgtgcagcgcggccaggaactcttcacggtacttgcaccggctcccgacggagcaccggagcacggtgtcgttgaccaacctgttcaccatgtcggtaaggttcacggtggcgccggacgctgcggcggccgacaggtcgcgcacgagccgcgccacctcctcttcgcggacgcgccggaatgaccgcacccgcgccacggtcagcagctcctgcgtgagcagcttgcggaggtggcgccaccgctcgccgtactgggccatcaccacgtccgtgccaccgaaggtgatagccgccgtggtgctggtcaagtggcggtcggcgaagatgaggtcgtggtccctgaggatctcctgcgccgcctccggcgacgacgcgaccaccgtgggcacctcgcctaaccagagctgcatgacggggccgtgctcccgggccagcttcccgatgacgctgtgcacgctctcgctccaggacacgaggtggtgggcgctgccgatcagcggcagcgtccatggccccggcggcaggttcagtctcggcttcttggcatatgatgatatcagcttggacaggaagaccaacacaagggatgcgcccacagcgagcaacaccttgtcctccatgcccgtaggatcgatgtgctgtactagtaggctggtagccactagtataaatagcgatgctgagccaaagccacagcatttctagtgtgagagtttgccgagattttttgagagattcgattgttgtggcgtgataacagtattggcgagacgccgtcacttctacggcatatacgacagtgaccgatggtggctagcatgcccaccacggaactctagggctatgttcacactaggggctaatgttctaaattaaccgtcaacctctcatcatatatgctgggctctaaacccaacgtagttagcggttcttaattagtggaatcaatgagcactattggagaaccgatcttcgctcgatcggccaaaatcgtaaatatctcggatgtaaaacgaatcggtgctaaaaatgatatttattactggttaaaatacccaacggcactttaaaatctttagccagttctaaaaatcatttttaggcccccgtgatattaattatgtattggctggtgtactaaagttcaacaccaactagtattaaaggtcatatcctttttataggtattcttgctcctccagctcaagcgattgctacaaagtgaaaggaggaggaatggatgtgctaccaaatttttttgtgaaaatattttgatgtatggttagcatattacatttctagctatatttttatacgtcttctctcttaaataagtttatggaaaaagagaaaataagagagatctaaaagatctaaaagtagtatttggaaaaaggatctgacagctaacctatagcacgtgaagatggttgttgacggtcattatagactaatttagaccatcaatatacttaaaataaagaagaagtagctatgcttgcaatgcatatttattttagaataatatttttccacttgtacttggagtattatttgtttgcagagattagcacataaattaatggagaagaaaaaaaaggaaaaactcactcttaagcaagctcaaggatagagaggcccacatgcaggtgaaaccatcctagaaaccgccataactgtcacaaccgtcatgagtacccatctgtcagcccttgtacaaagtttggaggcctgctgggccgctcaggttcggctgaaccaggggttcagccaaaccctggcaatgtcggttcagcctggccttacacgtggatgtccaggattgcttgctgatggccgttgcgggccatttccgacatttcgcatactctacaaccgtcatacctgcctatttaaggaggagctcattcacactccaacacacactcaagcaagaagctttgatctctctctcaagtttagttagtgctctagtgctaagtggaatggaataggatagttctcggagtcctcgagtctttggaagatttcggtatggctctagtagtttttccttccttttttgtaagaccctcggaattaatggaatattcttctttgtatacctacggtactttgcattgtctgagtactggttttactttatgtttgtgtcaatatagttgaatgactagcccaccagagaggtgcaatagtttgggtttaatgttcatgcaaatgattgctctatgttattctagaggacatagagtagtatttgataatgtatatatgctgcgagacagtagattattaaatatcattaattaggcatatatgctgcgagacagtagaggtggactattgatggtaacagttcagtacgtgtattcctacacgttagtatatatttctaagacaatttcctggggacggcactcctccgtatttaccccggttggacggccatgacagattgtcataagaaacttgacaacctagggtggtctctcgaagcaccaggagggcactgttacggggtattggtcagtacaactgtatactaacagatgtaaacgaaagttgagtctgtattagaattatatgaatgattacttttctatttcttcttccacattagtctagaattatttaagtgagagaatctaagtctttctgctctgtgtcactccacccatatgattaaagtaacccctgcatagactttgacatatatatatatatatatagatatatataacatatataagatattggcagagttctctcttttataaatcttcccttgggatcaaataaatatgatacattggaatacttctgggtgaaatgctacaatagtatattcatgcgcttgcggattacttctgtaaccataaatatatcagtgctattctgtgccattgctaggaattcgtatttttagtaatgtcattaagaaataccaacaatggtcacgttgcgatatggaagaagaagtttgtttttggagagttaccctattagaaagtcttagagatccgccatggaatcgacgtgatgcacttgactaagaacctgtgcatcaacctgcttgtattcctatgtgtatacgggaaatcgaaagatagacttgaaacacgtaatgatctcaagtatatgaatcaacgcgacggccttcatccggagccgaaggagaaaggaaaccattacttaagtccaaccagctatactttgagctaaggaaagaaggaacaaaccaagccggattacaggggataactcacatgcgataacagaataacaacctacacgctaatagcaacagaatgaatccttatcccatgtgagcagaaccgtgaatactcctaatccgaacctgcacattatctaacacgatcaatccttcaactggagtagtgtactcccgcgacagccgacgcaagaatgctcatcgacttcgtatcttcctgactgtgactggaccttgtttgaactttgaatgtttgatccaaattatttttattttgttaaaacataaagatgtttatttcatcgaccctagacatgtctactaggtatagagataggaaatatgattttggtgctgaaaagcgtaagggacaaatactagaaatacctcctctatttcacattataagtttgggtttttaatagatttatgtatggatgtgtgtttcatatatatgtctaaattaaatttagataaatattagtgaatctaaacgaaaatatagagttcaaagtgtcttataatatgaaagagagggagcaacatattagacatataatttagaaattttagacgcacaacttatatttcgcactagggcctcaaattcctgaagatggccctggagcttagatctggagttagtgaccaatgtacccagccccctcatcaccgacgtttgccctcccttccgccagcctggacgtggcgacagcgaggctaacaaggatgtcatcctggggttcgtcagggcggagctgacggccatgcatgccgcgctacgggacctcaccgacctgaccccagcgcagctcgacgagcaggccaaggctggggccagccacgccacgtcgaggacgccgtcgacgctttcatggtttggagcctagaatttatttatcaaattgtactatactcgattgatcaggcattctgttatttatcaattccctattttcaaatttatttctctaaaaaatgttttagctagtggttctctttagcttgccactagagaaattaaatcattttttttttgctagcggttgccgcgtcttaacctgtcacctacggaacttgtttttcactggcgtaaaatgcattattttcattagcgttaggtcgttggccgcacctctagccgctagcgagaacctatttttgtcatcggcgaaaattatttttttatagtgacatctcggtccctttttacgtactccctccgtcctaaaaaaaggcaaaccctgagtttgcgtgtccaactttgactgtccgtcttatatgaaatttttttataattcgtatttttattgttgttagatgataaaacatgattaatattttatgcgtgacttgtttttttattttttttataatttttttaaataagacggacggttaaatgttgggcacggaaaccaggatttgtcttttttttttttttttacggagggagtactctgctcgttctagcttgtctgtagtcaacggttaaggtcgccgggagtatggcaggcagtgaccttggaacgttcctatctttatccttttttttaccgagattgattgacaacttaaacaaatgatacgtttccataaaaagtcaagtcgacacgttttgtttttactaccacacatggactaataatttacataccacgaagaagattaaggccttctttagatttcaacttttttcttcaaatttccaacttttccatcatattgttctaatttttttcaaactttcaattttgacatggtactaaacacagcctaaatgaagtttgagctgtcaattttgtcaattgtttcttagcatgtgttgcatgcattgtcatttttttttctaacacgagcagagaaaacagaggcccagctgtattgtctttttagtagaactaggcaagtagcccgcgcacatgcgcaggcactttgtctaaagtggtatttaaatatttaattttagtttactattaattaaaattaggaaggtagcccgcgcattcacacggatatgtatcgtacgctaagtatgagacatttataagagcgaaatattaaccggagatcaattgtcacgatttctccataaattgttttcgtcggtattaattgcttatataatttttaacctattacttttatgttatataatatttaagtaatatctataagcaattatttataatcttcttcattatttgaaaagaatagtcttattttctatagaaaacatgtcaacgaaagtaaaaataatgtgttttctttttttaattgcatatatattatcatggtttgttagaggataaattgggtgggacatgaggcttcactaaatgtatgggtttatatagcctaatatgattgatgtaatttgagaggtgatccatccatgaacattttcatttagagtgggtcagaggatcacacaacctaacatgaatacaataatgacaaaatataattgcgtagtaatattttttaaatgtgatgtcccatgaatacacgctgttttttctatataacatagatctaacggttagaaataataatggttccaccagtttaaaagacatagtagtattccaaaaatgtagcttgaaaattatggttgtttcaatgtctaatattattacgaagtgagtgtagctcaactggttatgttccttgtgatggaacatgcctgcccggatttaagtcctagatttgacatgggtgctcgcatttatggttaactattatttcagtgttgacatacccattggtagcgaggcgctcgtggtgatttcgtcaatctcaaaaatatatcggcccagtctttagaagatactcataggggtaggatgtgcgtgtgtgtgtttataagggtgagtatgcatgcgttgtgagcgcctgcgtttgtatggtgtatcttaaacaaatacgcaattttatagattgtttctctatgtgtgttcttataagggtgagtgtgcgcgtactcaaagtgcatgtgttgtacggtgtttctaaaaaaaattgaatattattgattgtttcccttttagtataatagctaaaaaaaatagggaggggatggacgatgttttgtgcatgtgagggtgaggaggaggtggaggagattttattcttctattttttctatattatttaagtgaaagccggtgatggggtgtttcatttgtttctaagaatttcaatgattatttcctttttataggaggtgacacatggcgacttaagattttcataaaaatagatctaatagttaaaaataatggatacaagaatttaattggatttttttagaaatttaggacatgatacacggtgagtaatgagcattctggagggtgtttattgatttttgttatgtacaatgatttagtacagcatgatacatatttcaattatttttttgttgttatttagttgcaatgcaaattatagtgtctaccttcaaacgatgtattttttcttttatatagtaaaatatagctaatgtgatcttgatttatttatttagttataaaataaaacaatagctatgactgtttttatattatgttagttaaaaaaatagaagatgggataatttaattagagaggagaggatgggagagtcagagagggaaggtcggaggtatatgtaaggcaagaggatatgagagattattgtttttcaggatagatcgaatgatcctgtaaatacaattcatcttagggctattagaaataactttttctaatttaagtggatgttattaatcagaagggttaaaaatctatttgattttttcttaaaaatatatggatatgtggacaatagctagtccgtagaatatatgtcacaaaataatgaatttctataataatattagctatatgattttaataatattagttatttcaattttaaaatattttattttaaataatctaatggagtgcaccaataaaaaattagctatatgatttagataatatagttgtttaaaatttgttatcaaaaaaatattttttttccatctatctagaagaagaaaataggagagaaaggaaatagatagggaggtatgcacatatgtactggacgggaggggatgtgatatgcgagctttttctttatccttttctatttgactaaataaatctaatgacaaaaagataataggaaaataggagaaaaaggaaatacgtggtatgtactggatgggaggagttaggaatatgtgggcctttttatccttttttacttggataaataaatttaatgttagaaaacaatgggtctactgtatattagtgaaaatcgatgtatattagtgaaaatcgatggctaaatgtttagtttactcttaatttttttgtgaattttttaatttattaaaatgtcatgcgacggcgtaggagcatttgtaggagtgctacgtggtggcttaagtgtgttattattcggcttataagtgatggagatggttggagctaagcatgtggaagcgtttggtgattcggaattggtggtgcaacaagttgccggagtttacaaatgcttggacggaccactaaataagtatcttgactcatacttggatattattgtcaattttgataattntgctattagacatatngctaagcatgataattctaaaacaaatgatttggcacaataagcatctgcctataatgtgaaaaagggattattttttatattaaaagagtcggtcttgattttaaatctttgtgcgaaattgacaaaattgcagaccatgggcggtctgactggcgttgcgcggccggtctgaccggttaccaggggcggtatgaccggccacatgccgctggtctgacgggccaccccaggcggtctgaccggctgtatggccggtctgaccggttctagacagagcgctggggggcatgccacaatatataatatacgatattaaaaggcagcgggctaatgtaaaggtataaaataacggatcattaatttaaatgaaaatcgatagtgaaattatatagtgccacgtgatggtctaagagtgcttatacaagcaccacgtgactatatttgtggagcaataaattttatttttatagtacagaagatcctattttaaaaataccgtctatatttttttcgtcggttataacttcgtacgtatatttatcgtgcgttcaccgtacatacgtatgttcctttgtatttttccatccaagtgaactaatatttatcgtacatacgtacgttctttgtttcttctgtaataagcagtacctaaagatatactccatcatatacgtatgtaaatattttcatacgtatacgtatgtaagtatttccagtaaatggattctctagcacaaactttttaaatagatccaatctaacggtgtaaaataggcccaccaatttaaataaaaatcgatggtgggattatggaatgcccactacgccagatcctcacacctctgacgggatacctacgacgggcaaatgatttggtcactgatgaccgtcacctttgacgggtcatacgggatgtcgtcatcggtgaggcattctgccgcggcccgtcataggtatcctgttacctgtgataggccgaaaggaaaagctgtcacatgtgaggcagtgacgggtttttcttccaactcgtcaccggtatcccctcacctgtgacgggccgtcacaggtgatgggcagccacctgtgatggatttgttttccggcccatcacaggtgaggggataccagtgacgggcaactcaattgaagcccaccaaaggtatgaccaacacctttgacggactttttttacctaacctgtttgaggtgtgttgggtctataaataccccccaaaccgccaacggctttccatgccgaccagttcattgttcacaaatcggttgggggtcaaggggggcgaatttttgctaaaattcaaggtaaaaaacacattattcttcccttcattctcaatatatcgatcatcatatatttttcttcctatgttattgatttcagatgaatcgtagttggatgtaccatgttcatcgttcatctacagagtatagagagggggtcactgaatttgtcacatttgcggagaatgacagaaaaagtaggatgagcatatacatattgtgtccatgtagggactgtaagaatgaaaagatgatccttgatagctgagaagagcattctcatttaataacaaaaggattcataaagaaatatacttgctggaccaagcattgagcgcaagaggcgcctgatgccgcagctgaagaagtgttggatcagaatgtagagaacaccgccgcagctcgtgaaggcatgtttgtaccttctccgttaggtggagagaccatagatttggacactcaatgtctatctactatgttgcatgacattgaagacgcagaggacaatgacagagattttgagaagtttagtaagttggtataagattgtcagatgcccttgtatggtggatgcaagtcgaaccacaacaagttgtcatgcgtgttggaactcatgaagtttcaggctagtaatggctggtccgacaagagttttacataacttcttgagctgttaaaggacctgttgccagaggggaacaatttaccgcagacgacatatgaagcgaagcaagtattatgtccgttgagcctggaggtcagaggaattcatgcttgtccgaacgactgtattttgtactacaaggaatacgctgacttggatgtctgccctgtctgtggggcatctagatacaaacgagcaaagagcgaaaggtgaaggaagtaagtcaaataggggaggccccgcaaaggtggtgtggtatctcctaattgcggagcgtatgaagagaatgtttacgaataaggaacaagctaagctagtgcgctggcatgctgaagaacggaaagtagatagtatgcttaggtacctagctgattcagtacagtggaggacaatcaataggatttaccaggaattcttaaaggacccaagaaacatgcgtttcgcaatgtgtacggacggcattaatccatttggtgatttgagcagtcgtcacagtagatggccagttctgcttgttaactataacattcctccctagttgtgctttaaaagaaagtatattatgcttgctatgctcattcaaggaccgagacaacctggcaacgatatcgatgtgttccttgaaccgataatcgatgacttcgaaaggctatggaatgagggcacacgaacatgggacgcatatgcacaagagtatttcaatctccatatatgttaatgaatctaggcacacatatatgtctagattcattaacatatatatgaatgtaggcaatgctagaaagtcttataatatgaaatggaggaagtactctatacctgtgcacccaacatagagcaactgataaatcagatattaaacccgcaccattacacctctctggtagcctacccaaacaattaacataaagcagatataaagtaagaccagtactcgaactaaacaaagtaccgaagatatataaagaagagtatttcattaatttggaaggtattactgaagaggctacaaaaactgctagagtcataccaaaaactcttccgaggacttccgaacactattctatactactccacttagcactatgttgacggtcgttagcgatcattttcgcccgtcaatactacctaaataaaggagaactagttatgcttgcaatgcatatttatgctaaataataaatattctactagcactaggattactaacctcttgcagggaatgaacacaaaatggaggagaatcgatagcaatacggacgatcaatcaatcgaacgctgtcgagaattagacttgcggacaagtgggctgaaaacaccaaatcgacacgaccaaaacaacccaaaattcacaagtctacataaaggagcggaagaggaggccaccagctgaaaatgggccaggaaggcccatcccacggttcggccgaaccctccctggcgccgttggatacaagccttcttctgtacggcttggatcactccccaatggtgtttggagggaatttccgaccattctaaccatctcaaccatcattgaaaggctataaaaggacttcactctctctatttctccacacacctcaagcaagaagttcatttcatctcttaagtttagtatagtttctagagtatagtggaatagaaatataatagaatctcccccgcaaaaaaaatgaaatacaatagaatcttcagtcctcgagtcttcggaagaattcgggtatggctctactatattttccttctttttgtaagacttgtacttttattagaatactcctctttatactactttgatattatattattttgcgagtatatgaataccaactttattatatgtctatattcgttatgatgctagcttatctaggagattcaatggtgtgggtataatgatcgtatttacaatgactatatgttatgatgatgatattagagtagtatttggtaatttaagcgtggtgtttagattattggatatcattatttggggttatatgctgcggaagcgaggtgggccgctgatgatgacagctcagtacgggtattcctccgcgctatatagtcctatgttaattttctagggatggtactcctccaaatttagccccagttgtatggtcatgacggattgtcgtaaggaactcggcaatcaggggtggcttctcaaagcaccaagaggccattggaaagagggtattagctaagtaatgatataattaggatgtatgtataatatgtatgtatactaaaagtataggaataggatctttctatattctttccacttaatttgatatcatgagtaagcggatgaatgcttctgcttagtgtcaccctaccctttgaattgtattaacccttgcttagacttcgtttattacaagtaatatataaatttttagtacggttctctctattattatcttcccacgggattaaacaaatacgataccattcgaatactctcgggtgaaatgctataatggtatatccgtgcgcttgcggataaactctattaccataatataccaggagtatttttgcgccatggctaggaattatatttctagtaatgtcgttatgaaataccaataagcattcctggcgccgttgccggggaagatttataaaagagatcaccattactaatactttatatttacctctatataatcactgtcctttgcaggctggccttggttgttttcacatttattgtggaaaaagggtagtgcatgactggttttaacttttcggaaaatttcaaagaaaatctagaagttttctttcggagtgtcaagtcgcgagtcgttgctccgaagaaaactcttccaacacagaaaccagccattccagcgccaccaaccttcgagacttggctgataagaccctctgcaaattcgctgctcccttcgctgacaacatggccactgggccacaaatcaacatggaagacgtggatttcgatctgaagtccagcctcattacaatggcataggctagcccattctgtggcaagtcaaataaggatgccaacacacatctgcaatagttcctggagatctgcaacacatacacaatgaagggtgtcacgccagacgtcgtcaggctgtggctgtttccgttttccctccttgggaaagcgaaacaatggttttatgccaaccgtgccacgatcaacacctgggacaaatgctctaaggcattcctgtcaaacttcttcccgatgggtaagaccaacacccttcgcgaaagaatttcaagcttccagcagacaagggacgagtccattcctaagggatgggaacaacttcgggaatatatggccgcatgtcctcatcatgagatggatgattggctgatcccgcagaacttttacaatggactcactcccacgtcatgcgaccatctggacgcggcgactggaggtgcctttttcccaaaaactgttcgaggagccgtcgacttgatagaaaaaatggtctccagtatgggctagagcaaggaacgattctagacccgtcagcaaggcgtgcacaccgtcatggagacggagatgcttgctgccaagcaggatctcctcatgaaacgtttggacgatcacgagaagaggtcacaaggcaccgtcaaggccttggactcacacgttacgtgtgaagtctgcggcagcatgggtcattctggagcgactgcccagaaatccgtgaagaggcgatgtacatgggcaacaacaacgacggattctatccacaaggaggtcagtggtggaaccagccacgcccatatttccaaggaggcaataataacggtaacttttctaaccaaccctccttgaaagatcttgtctttgcgcaggctaaaaccatagatgctcttagcaaaaagctagctgctaatgacaaaatcttagaaaacataaatcttaagctagatggctttgcttctgcattccaaatgacaagatcttgtctttgctatgtagtgacagccatgactcccgtcctagtaatcctccacattcggatacatcatagagctatagccagaaccacgctggcagaccagtaggggtcggtgcccgaaacaacttattggaaattacctttacttagcttagataattaaaacacatagaaagtcctctctagcctagctagtctgccagtagttgttgtccttgtatagtcttaaccttatgaagattacacacgttccctaagttcgatatccttttggggtcacatgaaggtgaagtgctacagcggaatgtattccgtgcacttgcggatttatctgtggttgtaagaaataccaacagccagccttcttcggggtggaggagggtagaggagagtggaagggagttgggcccgaggggaagaaaaataaaaggaggcccatttgaacagtgacatttctaattttctctggaattttgaggaaacttggaaggatttgaatttgaattttgacctagagtttgacaataatttgagggggtttctttaagggaggatttgagatctaatttggcacaaaatcaagtaagcaccaaatttaaactccagatttttaaatgacagattttttaaataaacgaaaaattcaagggtgctacattaagactgcctatctattggtataaatatggtagaggtgttgaggtttctacatatcgattttgtgataattgagtttaaaggaaaattaaggtttcgggtttagtcgagatttgtgagaggagtgctgttattacactttgtaaacacgaatggaggcaataaagtttaatgcactttcaagagttcttcgatttatgttttctcaagttcgacggtcacaccagtaaatacatggcagttagacccaatcagaccgatagcatttcagcggttggatcggtgaaggtgacaggcgacggtggctcaacggactgttagactggagcttctacaccagtcagactagaggcatccatgcggtcagactggcgcatcaactccggtcaaaccgatccttatcaattcgagggtatttttaattacgtaagaagttttggtttttagtgatccaaccatttacctctctctggttggggttctatcctactcactactcacagaaatatttctccatggacgactgtatttctccatggacgactgacttagcgtctgtgtaaataccttatttatgtcgacattgcttgcatgtaggagtgaaaatggggccggtatttcccgaccatccgcccgacccgaggctagtaggaggaatatgggagaaaaaataggatacccaatactatctgagttcgaatccgaattcgttagaaaatagggttaattggatccatgccactgcaactttaccaaattaaaaaaataccactactattcatcatatcggttacatgccactgaaaatttctaaaattgaaacaatgccactgccgtcccttttcccatccacctctctcacgccgtcctcatcccgcttcctccttgttccatcgtccatccatccatggccgctggaggtcgttgcgaggaggtcagcgcgatggtggcagtggaggaggacgcgcgcacgggctgccgttcccggtgctcgcgcgtgcggcgttcagggtgcgcagcgcgcacttgccggcggtcatccgcgcgctcgtcagctgcgggtggttctgcatcgagtcctggatcggtggccgcgcaacatggtggcgccggcaaacgcgctcgtcagcatgagcccgcggaagttcacgttcgccaaggggcgctggtcactgcgttgcttggcatcgccttccagccatggcggctgctcagctcctgcgagagcttcgtctacacatggccgttcgagctctcctccgccgcccgtggccgctgcgctccccggcgacctacaactccgacgaccgcgagggcgaggtcgtgcacctgcatcgtcgaggacggcggcggcggcagctcccgagaccgagctcgcccggcgcatcgtcgagcacggcggtgtcgccatgtgcgacggcggcggcgccacgctgcgccggccgggcacgtagcagctgcggcgtgacgggggcggggggatgtcggcgaccagaaagtcgccgtcctcatcatcatcgcggatctccaggggaaggaactctcgtcaccgtcgtcatcgtcgtcgtctccggcgaattcgaaggtggcttacggccagcgttggccgtcggcccgcgacttccactccccgacgctctcctgccgcggtggagcatgaggagtgagcccggggggaggtggcggctgtcacgcccggaaattcactagtaatttccgaactaatttgtgcataaaaccctcgtccaggaatcagccgaggtacacaaactgacaatttaatatacaaatccatcataataataacgttacatacttacaaaagaaaagaaaaaaaaaacagcagcggaattaacggtctagcgatggcttcagctccactcccataggcagctcaactggggtataagccaaacgtcttctccttctggatcctttatcttcaactgaggtttgattattattgcaagaatgagcatatgacatactcaacaagccacacagcaaatatgcaagtgcacaaggataccaaaggatggcataatataggctcatttgcaaaagcagcatttagcaaagatttaagataagtaaaacagtagagtaattaattagaaattttaatcaacactgaacagcacacccatgctgtacaggcccaaccatcctgaacaaccatacccggctgtacagatctaactccaaaccaggagctaaacaaattattaccaattataacatccataattattgtgaaaggtgtgagactaatcacgaaaaacattgctcaacccgcctataaccgcgggcacggctattcgaatagttttactctggccagaggtgtaccactgtacccacaagacacgatttcgcacatgttgccatgccccgaaataccaccacggcattgcaaagggggaaaatcgtgacaataccctttgcacaacacaactcaaaacagtgcaccgttcctggatcataatcacccccttataaaacaaggcatggactccccagcgacccccacggacttctcgccgcttctcagtctggcacactataatgaaccatgctatacaaaaggtaaagtcgttgcccacgctggcttgtggttggcacggtaaatgtttcacaacagtagctcgcgaaccggtccttaattgtcatgagcacaaccatcaaaaccatatgctcacaacccaccttaaccaggttttaattatcaattaattaacatcacacgattaaccatcgtgagcgaccattaaatataaccataaataataatgtagtatatatgattcatcccattaatgagctaatgtttctaagctttgctaagcaattatatctaacatttagctgaaccaaaccaatacataaggttcaagctaatcaatttattacccaaggtatcaaggaatagagtattcaatgcaaattggccataacaaaggaataggttcacaccacccggtgacattcgaaaataaatgcacagttgaaataaatagagaatttaaatataggatcaacatgctcaaaggattgtgcttaggatctgtgtgacttgccttgcaataatcgatcttcaattaatcttcttgatcactttcgacgcactcacgaaccttcgcaacgacggaaacgacaagctaacacgcaaaacgaagaaaaagactaataaaaaccaaataaacagtacataaaaagtaaacaaacatgtagatcatgattttaaatgaattatgagacttgaacggccttattccgacttcaaatgaatttattatgaattttacaagattaaatctaattaaagcccatttaaaaagaattaaataaatttaattaaatttatggacaattttaatatatagatctttattttagaaaaatttagcaacttgaaccacctaaaacggatctacggttatttagttatgattttccgaagatttaatctattagaaaaaaggagaaaaggaaggatgatgacgtgagcatgacgtcacccacggaggccggctagggttggcaagctcgccggagatagagaccttggccgggtgattggaggacacctacgcgtagaggacgacgaggcgaacccaacggtactcaccacaacgtctaccgatgaccgacgacggccggcgacgaagaagacggcagcggcggctcggcttgcacggtgacggcgagctacggcggccggcgacgaaggaggaggtgcggccgggcttctcttcaccttggcgcacctaaagacggcggcggcaagcggcggcgacggctagggcgatggcgcggcgcgactggagatcgccggcgacggctagcggctagggcaacgtggcggcagcgctacgggcgacgagggagctcgggacttggggcaaacggaagaggacgactaggggatgctttatataagcttggattgaagagatcgaactccaaacgagaggaatcgactcgggaaaaatccaaactcggtttttagggataaactcgaaacgaactcgattcggagagaatactcaacggattgctccgtttcttgaggggaaagatagaggagaacgagaggatcaaaacccctcaaaaacccggaggaatcggggtcggattggagcggatttgagaggagaaggaggcggctcgggcgacggcttcactcggccggccggctgctagaggaagaagaagggcctgacatgtgggccccacatgtcagtgcctagagggaaagggtttttgaactttttcaattaaaataatcacttaaatgatctttgaattgttaaaaatacttccaatgctcaaataatttcaagaaaaatcctgaaaatacttggacactcaaagtacttaacaaaattataattagaccatttaatgattaatttaatatttaaataattgctgaacttctctttgtatgattaaaattaataattgagctccgaaaaatccgagaatattccagagagtataattaaccatggagaatttaataaaaattaaatccatccatgctttatatttagaaaattttatttcccacatttaacttcacttgtaaattaacgaacatttaatataaattctaataataatttattaaataatttataaatcctgaaacaaaaatcaggatgtgacagcggccgccggcgtcggcctcctcgccgaagaagaggaacgaatggtcggccggcggatgcagaggctgccgaagctcccggtggatgccgatgccgcctcgcggtcccgcacctctgcgacctcctccgctccctcctccactcccccacgggcgtcgccgtcttcctctccgacctcctcagcccgtgagcgctcgccgtggccgccgagttcgcaggaagaaagagggaaatggcgtgagatgacgccacatctgacggggaaacgagacggcgtgagataggagatggaaaaaaggacggcagtggcatggctccaattttaaaatttttcagtggcatgtagtcgatatgatgaatagtagtggcatttttttaatttggcaaagttgcagtggcatggatctaattaaccctagaaaatatgggttaggaaagggaagacatgtattcgcccgtatgtcccatattttaaaaatatgtatgaaaaactattataaatcgacctacaaacatgataaaagattggttaataagtattttacgagcttacatgtaatattgtatattttttctcttgatgtatctcttttagtactttaattactttattatatttattgtctatgaattatagatacaaatagatatctgttttcgaatctgattcgaagaaaataatatgggataggatacgggatgagtgatatattatccggcactaaccatacgtacccgactcctaatttagaggacaatataggttaggatatgggaataccataatccgaccgtatccgtctgttttcatccctacttgcgtgtagttcggaaaaatgtatatttgttaacggtttatgcgtcgcttgaacataatgttttctgtgccggtttatctgaggatctcaaaccaatatggacacgacttctgtggctacagagaaagtaaactgttctactataaaagacaaacgactgaggtttttttctcggctcgtgctagaaatggatgcatgcaaaacacatagtcagaaaatgacagctcgatctttgtttattctggtgcttgatcaacaaagttttccgagtgcttatctatcgacttggcgtatacggatcttaattttttttccgagtgcgcatcaatcgacttggcgtgtacggatcttaattttttgatgctacacctagagatcaggagggtgttgaaacttttagtctaaggtggtgttcttttctcattaagatgaagattaagatgaatattaagttttttacgcaaacgaggtggtattaacgtatgattgattgagttttaattattacaaacttgaaaaatagattaatgtgatattttagaacaacttttatatagaaagttttcgcacgaaacgcactatttaacagtttgaaaagcgtgccacgaaaatcttaatgtttatccaactcttggttggagaaaagaacgggacctaaaagcatgctgtcttgacttttatccaaatgagactttacaaaacgttgaataatttgaatggcttttctatgtttgttttcataatagttttttaattagtgattgatatttcgttttacagaatcttaatttatattaattaatatatatcgttcagggcagagattaaaaaagactcgccttgttagtttcaattgttaatcaatctcggtgagagaaataaaaatgagacaatgaaggttccaaggtctcactgcccctttctcggcgatcatcaccgttgactatgacaagcctccaaggaagcgagatgtgtcgcaagcagtagtcgctttcgtcctggtgaacactagtttcaaccgttactgatatatgagataatccaaaaaataccattgacaaacatacaaatctaagaaatagcatagataagtatgagatttaagaaatatcatcgtacaaatgattttgtccaaaaatacaatcgtcattagggtttcgtccattccaattagttaaatacattattgttcatcttatatcacttaacaacgcgaaatggacggatccctagcggtaatggcatttctaggacaaagtcgtttgtacgatgatatttcttgaaacttacacttgtcggtggtatttattggatttgaatgcttggcaatagtatttcttggattatctctagatattactaccggtacttacattttatctactgtggtatatctatgacctttctatacccactattcactcaaacagtcgcaatagtgctaaaaattaagttggaaagtctaaaactagagctcattatcgtgctgttaatatataaaataaactaagtatccagaaatattgaatggacaacagttttatgtctattattttctgtttaacaatactagaaaatagactacgactaaaacaactaaaatcaactctaaaccttagttttaaaattcaaattttaaccaagctgatatacaaataacgagaggactcatgaaaaagataaaatggcaatacccgagatctgtggcatgcgctgagtccttgacttgtttaattcacaaaagaaaaattgtgaaatcattgtcatgattaacatttgtgatgaacaattggctatgcaaatgatttaatcaaagaattggtttgagaatttgtgtgaatgttggtgtgagtgcgtgtgactaatgtgggtcaggttgtgatatctgtgcccagaaacggttgttttgtctgattgtgtgcaggtgacttgaggccagccttggtcaatggtgaggaccgggactatgttcagggaggaacagaggtctagtgcggtcgggataccatgtgagaagttgactagagtcaggattcttggaggtcaacttcggtcaacggtggggatcgggactagactcaggcaggagttgaggtccagacggtcaaggataccgggtgacgaagttggatacaagatggcacacggtggatggacatcgtgtgggagagatctccgcaacgggcttaacgaggtgtgcgtgcaagcgtcggtgttcgcgaggaggaatgagagaagatagagatgttcatgtacggtggagtacatggttgctacagtactcgatgtactgtagcgtgtagtttgcatgtacgtgatgtgcatgtgtgctgtgtgcatcagtgcatgccgatgcttggtctgggaggagcagcaacggcggctcggttggaaggcaagatgggccatgacgaggagacggcccatgcgtgaagaatcagtagaggaggaggcttacgtgtgttgacaggaaacggagatcgacgggcagtcggtttcgcgcaggagttcgattggtttaggatcggaaggccggctgtggttttgaagaaaaaggaaattgaggaattgagtcctattgaaaataggagttctacgcctactttgagtagggggtttttatggtataaatagagagggggcatgagccttcccgatatcgcttttcgatatcacttttgagagcaattgagttgctagtttagttagggtttcgagtttagttgagatttttgtaaggagtgctgttgttgcactttgtaaacacagagagaagcaataaagttgtcatctactttgagagttcttcgatttgtgtttcatcgggttcggcggtctaccgatgacataccgacggttcaaccggcgacaagacggcggttcgaccggcggcgtgcaagcggttcgactggcggcgtgcgagcggtccgacctgcggtggcgacaggactacgtcgagatttccatcgatttgagggtaacttttatttccgctaaaagtttttgggtttttggttttccctaccatttacccccctctggtaggcttggtttcttgtgttcgatcctacaagtagtatcagagccacatttgctctttttgatctttaccgatcttgagtttttccaatggctaaaacaatttcaaccaagccgcatgtttttgatggaattgattttcatgtttggaaagataagatggaacacttagttttttcatcgagttcttatttggattctttgtcaatgtttgctttgcccgctttaatggccacgtccaatgatcaactcgagaaaatctcagaagaggacttggctttgcttacgaacaaattttctctagctttgaataatgtgagaaacaggaagagagataatcaggtgtgtgcaagtgacattgattcggaatcggaggatgaagacgagagcaaaagcaaaggtaagcaagttgttgatctatcttttattgctcgtaatgcatgttctgatgttgatgaatctgatgatgataatgaagaaaagcttagttatgatcaattagaatatgctgcttacaaatttgctaagaaacttcaaacatattctattgtgcttgatgagaaagatcacactattgagattctaaatgctgaaattgatagattaaaatcttcgattcctgatgatgataattgtcaatcttgtgaagttttattttctaaacttaatgctttgcgagatgtcaattttgttaattgcaaaaaattggaatttgagattgaaaaatctaaaaagttggaatcttcttttgctcttggatttgctttacatgctcgtgttgttgatgagttgattttgacaaagaacgttttgaaaaaatacaaagttgctttttgtgcaagttctttagtcaatgcatcatgtgcaaataaggcaaaacaaaacaatggtgctttgatttctcaagattgttcaaagtgtgttttgaatgagttgaggttgaaagatgctttagagcgtgttaaacacatggaagagattgttaaacaagataaggtgttttcttgctcaactcgtagaaaacaaaaaggtcttttggatgcttgcaaaaattgtgctattcttactcaggaggtatcttatttgaaaagttctttgcaaaaattttctgatggtaaaaagaacctcaacataattcttgatcaatctaaagttagcacacacaatcgtggtttatgttttgatttttatgcttatcatgctagacatcctcctattgttttgggtgctgctaggagaggtgaaattttgatcgaaactgagcctaagagcactgtgtttcaatctgctgacatcatgtcttctttgaatgcatcttcttcggaatcaaatgttgtgaatgcaaaatcttatgttgttgtaaaaccatcaatttcaaaaccatctacttcacaaacttgtcgtgagaagtacacttgttcttttttggaaaagatggacatttggttggtttttgttttcgacttgcccacaaacagaaaaaggaaagataaattgcttttgcgaaacgacggtggcaaaaatcaggtttttgttcgaggagcacggttagaccgcagttgaacgggcggtcagaccggcctcagggaaactttgcacgtaattcaaatcggacttttgtgaaacgacgaggtaagttttcaggtaagtctagtactgattttgttagtgcatatgtaccttctggttctacaggtcgtgtgactcagtgttggattccaaaatttcttatttctaaccccaacacagaggcctcgacatcttctcgtacgtaggtatttttggtggcatactccccatgtgcattcaatgttgagatgacgattgcttttcatggtaacatcaatttacttttagattgacatatttttggttctactctctcgattattagcttttcatatgctagtgtttgaggtagtagtttttgttaatacaagtggttacatgtcaagtcatgagaaccttggtgatatcattggcaattggatgtaattttcaaaatctttaatttcttcttgatttttcttcggggagaattggaggttaattcgagggggagtctgtgctttttcatgcattcatgtttatttttatgcatttgctctaattctgaaaataaataaaaatgagaaaaagaagagctttgttttatacatctagtatattcttgtgcatgctagcaaaataattgatgtatatttgttactatgttagcttgtgtgtattttagtctttatatgaagcttagatattgcttttaagtgagatgatgcatgacactaattcttttacttgagttaagaaaatatgcaatattgatgctagcatatggtttgatttataaatgcttatgtatatgctttattgaattgttattcatcaaatagctttgtaattgctcattgtacaaagagaataaaaaatatgaaaaaaatgaataccgaatccttggaaacagtcttgacgacaatgacgtattcgatgtgagcaaaataatgggtgccgaatccttggaaacagtcttgacgacaagaacgtacccggaataattgagagaaaaaaatttagcaaaaaggctcaaataaaagttaaaaaattctcttgattgttttgtgctaaagctaatttgagaaagaatgataaatgcagtaggtatatatgtatagtgtttgtttttcaacctatgtgcctgtgaatatattgcattataaatcatttgaaatcatgaatctttattgttgatttgagattaattgtaatatttttgattcatgtttatactatgatgcatgcttgataactagttgatgaatttatctcctctattgtgcaacacatgatcatgaattgctttaggtacatttcaaagctctcgaaaataaaataaaataaaaattggttattacaagtgacaatcatgatatcattgcatttgtgctttattggttattatttctcttttgcattcttgatgaaatcattgtcaaagggggagaaatatacaaaattcatacttcttgaaagggggagaatcgttgaattgtttcgattttacaaatagtcgattttaaaaagggggagagtttttctttttcacttttgtgatttttgtttttatttttcaaaaacataaaattgcattttggagatgttgccaatgtgttcatcaaggggaagattgtgaaatcattgtcatgattaacatttgtgatgaacaattggctatgcaaatgatttaatcaaagaattggtttgagaatttgtgtgaatgttggtgtgagtgtgtgtgactaatgtgggtcaggttatgatatctgtgcccagaaacggttgttttgtctgattgtgggcaggggacttgaggccagccttggtcaatggtgaggaccgggactatgttcagggaggaacagaggtctagtgcggtcgggataccatgtgagaaggtgactagagtcaggattcttggaggtcaacttccgtcaacggtggggatcgggactagactcagggaggagttgaggtccagacggtcaaggataccggatgacgaagttggatacgagatggcacagggtagatggacaccgtgtaggagagatcttcgcaacgggcttcacgaggtgtgcgtgcaagcgtcggtgttcgcgaggaggaatgagagaagatagagatgttcatgtacggtggagtacatggttgctacagtactcgatgtactgtagcgtgtagtttgcatgtacgtgatgtgcatgtgtgctgtgtgcatcagtgcatgccgatgcttggtctgggaggagcagcaacggcggctcggttggaaggcaagatgggccatgacgaggagacgacccatgcgtgaagaatcagtagaggaggaggctcacgtgtgttgacaggaaacggagatcgacgggcagtcggtttcgcgcaggagttcgattggtttaggaagtccggctgtggttttgaagaaaaaggaaattgaggaattgagtcctattagaaataggagttctacatctactttgagtaggggtttttgtggtataaatagagagggagcgtgaggcttcccgatatcgcttttcgatatcgcttttgagagcaattgagttgctagtttagttagggtttcaagtttagttgagatttttgtaaggagtgctgttgttgcactttgtaaacacagagagaagtaataaagttgtcatctactttgagagttgtttgatttgtgtttcatcgggttcggcggtctaccggtgacataccgacggttcaacaggcgacaagacggcggttcaaccggcggcgtgcaagcggttcgactggcggcgtgcgagcggtccgaccggcggcggcggcgataggactacgtcgagatttccatcgatttgagggtaacttttatttccgctaaaagtttttgggtttttggttttccctgccattcaccccccctctggtatgcttggtttcttgtgttcgatcctaaaaaaaagacagaattaactaaattaatacacgctaaaatccggagaaagagcaatggccagtgttctagttattcgaggactatagatgaaaattgcttatactgattaaagaggaaaagtatggcacgaataatacacagattcgttgactgctacgagtaatttagatcacagccttgtaaaggacaactcaaaacggctacgtacttcataagcatgttttactgtcgaatattctcattagttatggaaagataagggacatcaaataaaattagagaagcccctcaactaattggctggtttttagggtaaaaaaaaactctttacgatcattcaattggtattagagttgtttacatccaaatttggcacctaggcttaaaataggaattattgccaaaatttgaaagtctaccggtttccttcgaggtaggccggtctgaccgccatgtgttaggcggtcagaccgccggttggaggccggtcagaccggcggtatgtggccggtctgaccagcaggcccgagtccgattctgttgcgtcgggtttcgaggtttccttgctcgggaaggcatgtttcgggtttcctttggtttctatcccgagttggacgtggagaagggcctgtagagggcaagaccaacccctatataagggacaaggccggttcattgcaaaaatcaatctactatcaatcaatcgaatcttccgttttgcccacgagacaggtagttatctagaaatcggctccgctagccggtttagttatcaaaacccatctaggtttagctccttgctagatcgaggtggttggcgactctagaatcaccgcaaggcttgaggtgctgcgatcgtgcttgtcaacttgtcacaaaaagttgccaacacgatttttggcgactccgctggggaagagatccgttcatcgtcaactcgacttcgacttcgccatgacgaagccatcatccaagacggaggtggagccatctcatatgataccggtcacattagatgactttgaaggtgaggatcgcaaagccatggaggagtacatcaacgagctcacacgggaggcgttgatgagagcaactactaggactcgtcaaggcgtgatcatcaagcccgggccacgtcccaagctcgctcccgacgtggtaagtaatgacgaggtatcgcaatctatcaaccaacaaattgcatctacaatagattcatctatgcctaattttaaagatagattagatgtaatgtttaaggaaagggttgatgggtttttaaggaataggctaggttctcttatggatgattacatattaaaggataaagcctataccactgctaatcaacatcctatagatctaatagggtctaaaaccgacggagcggcgttcatggccggtccgaccgggcctgacggccggtcagaccgcgacacagctgtcggtccgaccggccagatggccggtcagaccgggtgttatcccaccggtcagaccggctttcaggccggtccgaccgcgcaacctgacgccggtcagaccgggccctgggccggtcagactggcgcaattgtcccgatacagggaattgatccaacgaccaatgctagttatttgtatcactttagaacatttgatcctcctgtatctactgttaccactaatcctcaaattcccccacatattcctaacgtttataatgatgtttctaggggatatcctcccaatactaggcaaggccaatataatcatattgcgccacaaactcaacctattaggccaccaaacccaccaccaaatccacaagggcctaataacatggaggatgtgattagtgatattatgaggaatagattcaggattgaaactaggaatcgtgctagagcttacaaaaagctatatcccgattattataataatgtgccgtttcctagaaattatagagttcccgaatttgccaagtttagtggtgaggatggtaagaccacatgggaacatgtaggtcaatttttagcgcaatgtggtgaggctaatactgatacttttaaattgcgcttattttctttatctttatccggtaatgcttttacatggtttacttctttaccggcaaattctattcatacttgggctcaattagaagagcaatttcatgattatttctatactggagaaactgagtttaggttatgtgatttaacatcggttaagtaaaagtataatgaatctgttgttgattatattaagaggttaagagatgttagaaaccgatgttatactttgaatataactgatagagatttggccgggctttcttttaatggtttagttgctcctcttagagagaaactagatggccaacaatttcttgatgttagtcaacttatgcaaagggctctggttcaagaaagctgggttaaagataaaaaatttgctagaccattcgacaaaaagcctaatgttaatgtagttgattactctgatgctagtgatagtgaggaagagggtgatcatgatatttatgttgccgaatggtcatggactaacaaaaataaaccttttgtttgttctaacttaatgccgactcctcgtaaagatcggcaaagtgaggttaagtatagttttgatgtagccaagtgtgataagatttttgattatcttttgcaagaaaagcaaattagatttcttaaaggccatgtcataccatcacaagaagagttgaaacgtcgagcatattgtaaatggcatgattctcattctcactctactaatgattgcaatgtgtttcgacgaaaggttcaatcggccatagatgagggacgattgaaattcaccgatggctctaagatgaagcttgaccatgatccttttccggtgaatacaattaatttcaataataagaaggtgttgattcggtcggagcaatccgaatctactaaaggaaaggaagtggtcattggtgagccaagacctaagatgatggtgccaaagaagccggaagttggtgtttggaaggaaaataagggtgaagcttcaacttctaaggcccctaggaagaccaaggtgacttttgatatgcttttggaaaagtatgagaagcaaggtggtgagaagattcgcaacaaagggaaaagaccaagatcaccccctagggagcgatttggtcattcaccaagacgatcgcattcaccttcatatcatcatccacaagacatgtcatggggtccatatccaatggcgccgccgggttatccttatccttacttcatgccatgggggcaacgccgccaatgtacaatcatatgccgccaatgagatgcaaccaagggtggggaggaccacggaggccaattcatgagcgtttgtcttcatcaaacaaaagtcgattttatggtaaaaatcgggttaatgaagagaagagggaaggaaagcgcgtcaagatagaagagaggacttcagaggtgattactatcaaaatagggtcccatgatgtgcctgtaccttctggagatggagttggaaagtccccaagcaaaaaatccgaagccggtaccagctcttcgcagtcggccggtctgaccaggcctccaggctggtctgaccgcagccatgcggtcggtctgaccgggccatcaggccggtctgaccgccaaccagacagcggtccgaccgaggcttcaggccggtctgaccgtgtacccgctgtcggtctgaccggcgcgtctggccggtctgaccggtggtctgcgaccggtctgaccgggctccagcgccagtttgataagagggctgcaaagggtgatgtgggggctccatcgtcttcaaataaggttaatagaggacattatttacctcctggaacagagccgaatcctaggtggatgcctaaggatttgacggctactcaaaagaaaaggttgcaacgtcttcgggcccaagaactaagggagaaaagggccgaagaacaaagagataaaatgttcaatgagttgcgaccaccaccagtatggaggcctaaatccatagagaaggcaaaaccgattgatgtagaggagaaggaagaacaatcggttgacaaagataaatcgtctccaaaggaagacatagatatcaacatggtgtgtatgttgcctatggagttttgtgctatggatgaagccgaagttgcccaattctcattaggtcctaaagacgcggtttttgagaagcccgatgagtcaaaccgtcacatgaagcctctttatctcaaaggccatgttgatgggaaaccggtctctaggatgctagtggatggaggtgccgccgtgaacttgatgccgtattcgctattcaagaagttggggcgtaaggatgatgagttgaagaagaccaacatgatcctcaatggcttcaatggtgaaccaacggaggcgaggggtatcttttcggcggagctcaccgtgggaaacaagacgctaccaaccgctttcttcatcgtcgatgtgcaaggtaactacaatgttattttgggtcgttgttggattcatgcaaattgttgtgtgccttctaccttgcatcaatgtttaatccaatgggacggcgatgatgttgaaattgttcaagcggatacatcggccgaggttgcaatggccgatgctacttttgagtggcgtcatgggaatatccaatgcttatcggggagggatctttctagctatgattttattagtatctccgatggcaaatttgtacctatctctgtaaagccggctagtgtagcacggctaagccatataaatttgtataacgagtaaataggctagtttagagtggttacaaaagagggtgcaagaatatcggtctacaaagaacgatattggagaaaccgttgaagattttgatgaagttgagaagcttggacaagggtttacatcggccgatccattagaggaagtagacataggtgatggaactaaaccaaggccgacttttgtaaacaaaaacattaaagccgattataaggttaaggtaatcgagctacttaaagagtatgttgattgctttgcatgggaataccatgagatgccgggtctcagccgtgagcttgttgagcatcggcttccaattaaaccgggttttaggccttataaacaaccacctcatcgttttaatcctttattatatgaccgagtcaaagaggagattgatcggttgttgaaggcggggtttattaggctatgtcgttatgcggagtgggtttctagcatagttccggtggaaaagaaggggagtggtaagattagagtttgcatagattttagagatttaaataaagctactcgtaaagatgagtatcctatgtctatagccgacatgatgattaatgatgcctcgggtcataaggtgattagttttttagatggtaatgccggctacaatcaaatctttatggcggaagaggatatgtacaagacggcttttaggtgcccggggtttgttggtttgtttgagtgggttgtcatgacttttgggttgaagaatgccggtgcaacatatcaaagggcagtgaatttgatctttcatgatttgctaggtattatcttaaaaatttatattgatgatattgttgtcaaatcggatggtatggaaggccatatagccgatttgagattagcttttgagaggatgcgccggtatggtttgaagatgaacccacttaaatgtgcttttggtgtgtcggcggggaagttcttaggatttatggtgcatgagagaggagttgagattgatcctaagaagatagaaaaaattcgtgatttcaaagcgccgacatgcaagaaagaagtccaaaagttgctaggtaaggtgaattttttgaggaggtttattactaacctagcgggtaaaatcgatgcttttgttcctatacttcgcttgaaaaaagaagccgattttacttggggggcaaaacaacaagaggcgtttgaagagttgaaaagatacttgtctactccacccgttgtgtgagcgcctaaagccggaaagccttttcggttatatattgcctccgaagacaaagtcattggtgccgttttgacgcaagaggaagatggcaaggaatatatcattacatatttgagccgccgtcttttggatgccgaaacgaggtatgtttttatagagagactttgtctatgcttatactatgcttgtaccaaattgatgtattatttgttatgtagtacatacatagttacttgtcaagccgatgttattaaacacatgttgcaaaggccaattctaagtgggagaattggcaagtgggcatatgctttgatagaatatgatttggcttatgaaccattgaaaactataaaaggccaaattgtatgtgattttatagtggaccatcatatagatgttgcttatgagggagaggtttgcttagttgaagttataccttggaagatttattttgatggttcttcttgcaaagaaggtcaaggcataggggtagttttgatttcacctaatggcatgtgttatgaggcatcggttcgtttggaatattattgcacaaataatcaagccgaatacaatgctttattgttcggcttacaagtaatggagatgattggagctaaatatgtggaggcctttggtgattcggaattggtggtgcaacaagtcgccgggatctacaagtgcttggatggatcactaaataggtatctcgattcatgtttagatattattgccaattttgataattttgctattagacatattgctaggtgtgataattctagagcaaatgacttggcacaacaagcatctggttataatgtaaagagggggttatttctgatattagaagagccggtgcttgattttaaatttttgtgcgaaattggcaaagttggggaccagaggcggtctggccggcgttgcacggccggtctgaccggtgaccaggggcggtctgaccggctgcatgccgccggtctgaccggcgtccccgagcagtctgaccggccctgtgtggccggtctgaccggttctaggcaggatgctggggacacgtttcaagtaattttgaggccgaattaattgtgaattcggatatttgtgcccaggatacagaagaggattggagaattcctttgattcaatatttgaaagatcccacacttaaggttgatcgaaagattcggcgacaagcattcaaatatacattgcttgatggagatttgtatcgccgaaacatagatggtgtcttgttgaagtgcttagatgaagatcaatctaaagtggctatgggagaagtacatgaaggaatttgtggaactcattaatcggcccacaagatgaattggttgcttagaagagcggggttttattggccaaggatgattgatgattgcttcaaatattatagaggatgcgaggcttgtcaacagttcggcaatgttcaattggcgcccgccgccgtgttgaaccctataatcaaaccatggccgttctagggatgggctttggatttcattggtcaaatttatccttcgtcatcaaaagggcataggttcgtgctagtcgctacggattacttcaccaagtgggccgaagccgtgcctttgaagaatatgactcataaggaggtaattgactttatttcgaagcatattattcatagattcggtattccgcaaacattaactacggaccaaggcgcttcttttatgtctaaggaagtaaagagttttaccgaatcttatggcattaaattattgagttcttctccttactacgctcaggctaatggacaagccgagtcgagtaataagacattgttaaagctagtaaaaaagaagattgaggaacacccgaagaggtggcatgaggtgctttccgaagcattgtgggcgcataggatatctaaacatggtgcccctaaagtcactccttttgagttggtttatggtcaagaagccgttttaccggtagaggtaaatcttggttctcttcgttatatcaagcaagatgatttgtcaagtgaagattacaagacgttgatgggaggcaaccttgatgaagtcatcgacaaacgcttcaaggcattaaaagagatagagaaagagaagaagagggtggccaaggcgtacaacaagagggtgaaggcaaaattgtttccagttggagacttggtttggaagacaattttgcctttgggtactcgatccaaggagttcggtaagtggtctcctagttgggaaggtccttatcgagtttgcggcattgttcgagggaacgtatactttttggagacactacaaggggagcgttttcagcgagcaatcaatgggaaatacttgaagaaatactttccgagtgtttggcaagacgcttaggaagaactatggccggtaattggattatcgtcctaagatcaaaaacatgttctatgcttttagattcacgtcgttcatcaaaaaggcagggggcatatgtttacacctaaatttggcacctaggcttaaaatatgaattattgccaaaatttggaagtctaccggtttccttcgaggtaggccggtctgaccgccgtgtgttgggcggtcagaccgccggttggaggccggtcagacc

SEQ ID NO: 7821 - DNA, 14365 bp, Oryza sativa
gaccctccccccccccgagagggccaggccacgtgggtgactgcagctgccccaaacctctagtcaagatacccccggtcccatgtcaccgacagtagcccccggcgttacgctagggcgatcgcccccccccccccctctccgagggaagcgcttgggcatgacgccactccttagacctggtgacaggtggggccggtctccacaggcggcagaaacccagcggtcgcaaatcgcgcacatcgtcaaggaaaaaaccgaccaacaataatgagcggcttccttcaagaccgctacattacttaagtagcgcgcgaaccgagacaagccggttcgtttcgcctggagatgtgatgacggtgcatcggtcggcgagcgtagttaacgcgcgcacgatatgtcccatctcgactgccacggccgcacatccgcctcgtgcgctgcaaacgggcgagcgggattagtggaggcgtgggcgcgagagacgagggggcgaggtagtgggcgtggggatcgaggagctgggcatagcgttggcaagggtactaagacatcaaggaagggatttgtttccttcctctcgtcactcttccctttgcctttgccacttgtgctctgactctccgtttccggcgccctacccttgccatactcgctcgctctcaagctcctcctccgccggcgtcatggcacggggctccgcaccgctcgagggtagcgtgctgccgccttcccgcatcgtgagcgagaggcaggccgggctgccgcgccgattcatgccggaatctgccactggccgggaggtggtcgcgctgggcgagggacgcccggcgccgcattacccggggtggtccgtcttcttcctctcttttgcaatggcagggctggtcccgccattctcttgtttcttcatggatgttctggagctttatgatctccagatggcgcacctcacccccaacgcggtaatgacgttggccatcttatcgcacctatgcgagatgttcatcggggtgcgcccatctctccggctgttccggtggttcttcaccgtacagccggtgtcgccaccgtcggtagtcggtggctgctacttccagccgcgagggccggtgttgaaccgctacattccctgcgtccttcgcaagaagtgggacgactggaagagcgactggttctacacccctctcgccgacgaagcgcgcctccgacttccgagccagcccccggcgcaggtctccagctggcgggcgccggtagatctaggagatggctacgacgccattcttgaccgcctggcgggtctgcgatcccaggggctcacgggggccatggtgttcggcgactaccttcgtcgccggatcgcgccactccagcggcgcgccaggggcgcctgggagtacaccgggtccgaggactacatgaggacccaccaggggggcagatgggactgggcccctgaggatttcaagatggtggtcccaacgggtgctgaatctcagctccgtggaggcatccctcatcccccaaggtgtcctccccctctgcagcgatccagagcgcgccaacatcctgaccatcatgcaggcggtcggggcgtcaggggagcgggctcctcgaggccacgatggcgcgggcgggagccgcagaggggaacaatctaccccgggagggggtcgtgcttctgggccccgtgacgggggcccggggggcagccgccctgccgacgcccgggggaagaggaaacaggaggataccccctccccatctcctccccgagggggcggggcagtgcgtgccagcagcaggcgcccggagggtgctgtgccgacgtcgcagcccgagggggagcgaaaaaagaagcggctccgcaagatgggggggaccgaaccatgccggggaaacctcatctcccccccaaggtggtcatttagccgacctcctcgcaggttcgtccccgcgcccactgcggccgtattcattctcccaaggcgagttttcacttacccgtttctttttgtcttctggtttttcttccgctttcagcgagattccgtcacgcccccctcgccattccatgtccggccggtctgaggccgaggagacagcgaccgcggaggcccggaggcgggaagctgtccggcgagaagccgcggaccgcctccgggaagctgaggaggctgcccaggaagccgtccgggttcgccaggctgaggaggccgctcgggaggaggccagactccaccgggccgggaagtcagcccgggaggcagaggcgacgcgcgcacgccaggcggcctgccaagcccccgacccgactccgcccgaggcgacgacgacttccgaggccacccacgacgaggccgcgggcgcaccgctcggacccgacccttcgggcgacgttcgggacgagccagcctcgggggacgcccctgagtccggcacgtcgattggcgggccgagccgcacagcgcccacaccgaggcggctctcccctctgccttccgccgccccactaaacacagagcccctcctgcaggccctggccgccgcgaacacgacggtgctggacgggttaggtgcccagatggaggtcctgcaagcagagcgggcggagctcgacgcggtgtgggcgcgcgtcgaagaggggcggcgctcggtggaggccatggtggaggcgggccgcaaggcataccgccggcacgcctcagagctcgaggcccgtcggagggagctggcggagatcgccagggaggtggaggaggagcgggagactgccctcatcgccaccgccgtgctcaacgaggcgcgggacgatctccgccttcaatacgggagccgggtggcggagctagagaagaaactcgacgccgcccgggtagtccttgacgccgccactgcacgggaacggcgggcgacggagaacgaggcggcgtcccggcggcgcgaagtggcccttgaggctcgcgccatggcgctggaagagcgcgcccgcgcgagggagagggacctggcggaccgcgagactgccgtcgctatccgggaggcaacgctggcggcgcacgaggccgcctgcgccgaagaggagtccgcactccgcctccgcgaggatgcgctcaccgagcgggagcgagctctcgaggaggccgaggccgcggcgcagcggctggcggacagcctgtccctccgcgaggcagcgcgggaggagcaggcgcgccgtaatctggaaggcgcacgcgccgagagggccgcactggatcagcgagccgctgagctcgaggcgcgggcgaaggagctggacgcgaggacgcgcagcggcggggcggccgcgggcgacggcgatctagccgcccgcctcgcagctgcggaacacaccatcgccgatctgcagggcgcgctagactcgtccgccggggaggtcgaggccctccgcttggcgggcgaggtagggcccggcatgcttcgggacgccgtctcccgtctagaccgcgccgggcggcaagcgggcctctggggcgagcggaccgcgaagtacgccgccaaccaggggggcctcgcccagcgcctctcagagatggccgagactctccagcggctccccgaggagctcgaggagacgatcaagtcatcctcgagagacctcgcccggggggcagtggagcttgtactggcaagctaccaggccagggacccggacttctccccgtgggcagcgctggacgagttccctcccggaaccgaggacgacgcgcgcgcgcaggtccgggacgccgtcgaccacatcgtccacagcttcgagggtacggcccctcggctcgcgttcgccctcgactccgacgaggagggcggcgacggtggtgtggacgacagcgaccacgaggccggcgacccgggagcctcgaagtgagcccccaggcccccgccaatcttaaatagtttttcctttcttcttccgaggccttcgggcccccttcttgtataaactaatttaatctgcaatcaaataaagaagaaatttctgtgtcaattttatttgttgtgtgtatgagacgaggatggtctgtgcggcggtccttccgtgtcttggcttgaacaagggctcgtgcccaggtcccagcctcaaacggcgcgggtcggggctagtgcctggggagatgcacgtgtcgagactggccaggccgggagcgcggtgaccgagggttatggggacccgattgtgggcctttgccgattcccccccggagttcaccacgccccggggcacggctcggttctgggccccgtttggcgatttccgccggcccgggccaccgagggcagggtcgagcacgagcgtgctaattcaagccaaaactcttcaaaaggaaacaatggcacagacacagtccttaggaaatcgaaaaagcttttattgaaatacggaagagaaaaaagataagtatatgcatatgtggtagcccccggccaaccctgcacgcccgaggggggtgcggggttggcccgagcccgagacctgacacccgacccccactaggggtagaagcgacgaaggtgttcgatgttccacgggttaggcagctctgtgccgtcgcccgtggccagccgaacggagcccggccgggggacgccgatcactcgatacggaccctcccacattggtgagagcttgctcagtccagcacgcgtttggacgcagcgtaggacgaggtcgtcgacgcagagtgatcgggcccggacgtgacgctgatggtagcgccgcaggctctgctggtagcgcgcggctcgaaggaccgcgcgccgccttcgttcttccaagtagtcgaggtcatctctgcgaagctaatcttgatcagcctcgcagtacatggtggcccgaggggacctcagggtgagctcggatgggagaaccgcctccgcgccgtagacgaggaagaaaggcgtttccccggttgctcggcttggcgtggttcggttcgcccagagcaccgctggcagctcctcgatccacgagtcgccgtgcgtcttgagaatgttgaaggtcttggttttgaggcccttgaggatttctgcgttggcgcgctccacttggccattgcttctggggtgggcgggagaggcgaagcagagcttaatgcccatgtcttcgcagtagtcactgaagagctcactagtgaactaggtgccgttatccgtaatgatacggttaggcaccccaaaccgagcagtgatacccctgatgaatttaagtgcggagtgcttatcgatcttgatgaccggataagcctcgggccacttagtgaacttgtcgatagcgacatacagatactcgaacccgcccggggcccgtctaaacggacccaggatatcgagcccccagacagcaaacggccatgaaagaggtatggtctgcagggcctgggccggctgatgggtttgcttggcatggaactggcacgccctgcaccgccggaccaggtcgaccgcatcgttgagagccgtcggccaatagaaaccctagcgaaaggccttgccaaccaaggtgcgtgaggcagagtgggctccgcactcgccttcatggatatcggcaagaagctcgacgccttgttcccgaggaatgcacttcaggaggactccgttagccgcgtgccgatagagggtcccttccaccagcacgtagcgcttggagatgcgctggacgcgttcactcccttcgcggtcctcgggtagagtcttatctgcgaggtacgcctggatctcagcgatccaagcaatcaatctaagggagctgggagcgcccccctcgggtcccgaggcctggactccgacgggcctcgggggccgttcaggcacgtccgtctcccctagggggtcgggtcgcgccgacggctgggcaagcctttcttcaaaggcgcccggtggggtctgggctcgcgaggaagcgagccttgagagttcgtcggcgaccgcgttatcccgtctgggcacgtgccgaagctctatcccgtcaaaatggcgctccatacgccgcacctggcgcacgtaagcatccatctgcgggtcagagcactggtactccttggagacctggttaacgactaactgagagtcgcctaacaccaggaggcggcggatccccagtccagccgccactctgagtcccgcaaggagtccctcatactctgccatattgttggttgcccgaaagtcgaggcggaccaggtatttgaggacatctccgctcggcgaggtcaacgtgacccccgcaccggcgccctaaagagacagggagccgtcgaactgcatcacccaataggcggtgtgaggcagctgcgaagggcccgagctggcctcggggatggagacgggctcgggagccggtgtccactctgccacaaagtcggcgagggcctggctcttgatcgcgtggcgtggttcaaagtgcaaatcgaactcagagagttcgattgcccatttcaccacccgtccagtaccctctcggttatgcaagatttggccgagggggtaggacgtaaccaccgtgacccgatgcgcctggaaataatggcgcaacttcctcgaagccatcagaatagcgtaaagcatcttctgggcctgagggtatcgggtcttggcatcccggagggcctcactaacaaagtagacgggccgctgcaccttttgtcggggccgatcctcttcaccaggggccgcatctccagggcgcttttcgtccgagaggccgcgcggggcgcactcggcttctgtgtcgacgacctcggggtcggaaggcgactggcgcggccttcccgcagtggccccggggccatcctgggggtcgggggctcctagcaccgtcggacaagcgggcagagggccagctccggtcgtcgggggcctcgggccgccgttcggctcgggggcctctcctccctgctctctcccgggtcgagtcgacacagggtggggatgcgcggagcgagggtcgtcctcgtcgcactccgcgaccaacgccgcgctgaccacctgcagagttgccgccaggtagagtagcaacggctcatctggctccggggcgaccaggactgggggagaactgaggtacgccttcaactgagtgagagcccgttcagcctcctccgtccagataaacggcccggagcatttgaggagcttaaataggggtagcgccttctctcccagcctcgatatgaaccgacttagggcggccatacagccagtgacgcattgcacatccctaagcttgctgggggggcgcatccgctctatagctcgtatcttctcggggttggcctcaatgcctcgggcagagattaagaacccgagaagcttgcccgtaggcacgccgaacacgcacttgtcggggttcagctttatgcgggcggtgcggagactttcgaaagtttccgctagatccgagagtaaggtctcctggttgcgtgttttcacaaccaagtcatcaacataggcctcaacattacgtcctatttggctacccaaagaaattcgagtagtacgttgaaaagtaggacctgcattctttaacccgaaaggcattgtcgtataacaataagttcctatgggggtaatgaatgcagttttttcctcatcctccctagccatgcgaatctgatgataaccagagtatgcatctagaaaacacaaaaggtcgcaccccgtggtggaccttaggacatgccttgttaaggtcggtgtagtcgatgcacatccgaagcttgccgttcgccttgggaacgacgaccgggttcgccagccactccggatggatgacctctcggatgaatccggcctccagaagtcgcgccacctcctcgcggatgaaggcttgacgttccggggcctgccgccgcactttctgccggaccggccttgcacccggccgtacggcgagacggtgctcaatcacctccctggggaccccgggcatgtccgccggtctccaggcgaagacgtcggcgtttgcccgcaggaaggagacgagcgcgtcttcctatttgtcgtccagaagaccaccgattcgtgtggtcttggacgggccgtcgcccagggcaacctgcttgatcgggacctcgtcacacgtgatcatccgctgcctcggggcagctgggacggaggtgctgagcctctcgtcgccacccgcgggcttggatgccgcggcgaggtggtccgcgcgctgctccatgcaagcaagcgcgactttgaggtcgccatggacggtgatagggccaccggggcccggcatcttcatctggagataggcgtagtggaccgccaccatgaacttcaccaacgcgggcctccccaggaccgcgttgtagggcagactgaggtccgccacatcgaagttcacccgctccgtgcggaagttggcggaaccatcgaaggtgaccgggaggtcgatatggcctagcggccaagtgtgccccggcgtcacaccgatgatcggctgggacggccggagcactatccacggggccttgatggcgtcaaaggcagcgggggaaaggacgttgagggctgcacccccgtcaacgaggacacgccccaacttcacattgcaaacggtgggggaaaccaccatcgcgatctgtcctccccgggcaacgcacggtgggtggtcggtgtcacgtcctgataaattcatcccgaaataaaaatcattctctaaaaggaataatagaattaattaaaattcgaaaagaaattggcaaacattaaaatacgtgcaagaaaaattcaaatgtggcccggagaatttttgttaaattctccttggtcaaaaaggagccctcaaattttagtggaattttcagagcacaaataataattattaagaaataaacaaagttaaaatggttttataaaaagaaaagccctaaaaagtccttttttccccttcccctcttgggccggctcggcccacctccctccctctctctcctctcccccgcggcccaatcggcctcctccccgcgcgcgtgccgctgacgagcgggcccgcccgccaccctcgctgacgggtggggcccacctgtcatccctatcctcccgccgctcccgccgcctcgcccgtgccctagcgccgccgccgccgcgaatcccgccgcctcccgccgtccccgcgcgcaataaagagggggaaatcactccccgtgattccctctctctttccccccatttttccctccctctctccctcggattcggttggaaaccgctcccctaatctcgccggcgccattgatggcggccgacctcctgcgccggtttcctcccttccccggccaccctctctcgccccggctctatttaaacgctccccgtgcctctctcctccgtttccgccgctcgccgctctctctccccgtcggaatcgagctcgcgccgtcgtcctctctctccgccgtcgccaccgagcttcggtccgccgtcatcgtcgccccggacctccgcccgcttcggcatcgcctccttcggcttcgccgcgtcctcgccgacctcgtccacccctccgtttcgcccgccgaccgccggaacgccgccgtccccgtcgacccgagccgcgccgccgccttcctccgctccggtagccgttcccgtcgtcgccgtcgacccggggtgagccgtggactgccgtttcgcttcccccttccctcccctctctcgggcgccgctccgccgcgccggtgatcaccggcggcgacgaccatcggggcgcgggcgcgccgcctcccgtcggctgtgccggcgaggccgccttcgggcgcgccccgcggctgccatgtggggcccggccgtcagccgcccgcgtcctcgggtgcggctgacgcgtgggacccacggcgccggccggcgtaagccgcgtgcacccggtccaccgtggaccgagaggctgccgcgtgggccccactcccatggacccggtccgcgcgcccctcccctcggttgacgcaataaatccgattttaaattaaaatttaaatgaagaaattcgcaaatatccatttaaagagcatataaacttcaaatggccataacttggccatttgaactcggaattggaccgttcaagtctctaatttttccttaagaagtcaagaacccatttttgtgctttgtttctgcttgttatatggagtttattagagtaaaatccttttcttttccgttggtcgtgtagacgctgcagcttcggaagatccgctcttcgtggaagttgaagccgacgtttgggaaagcgagcaaggcaagtcacatcatccttgagcatattgaatcccagtttataaaattattttgatttaaattaatgcattaccgctttatctaaattcccgcgttatcactgttttatttagccatgcctatttatcattgttaagacattattattgctattgttattattaccttgttcaccccaggaaaataaaaccccaactagtgggtactctatttatggttccactagtatgaacttaggtagatgcttcgctggttaattaggcaacattaggtggttttataactttagactttgggaaatctcatatcatttggacagtagggaattgttggattattgtggaattggacacacacctccccctctattcaaaacccccaaaatggttttaggctgggctcgaggtgcgtggttgggttttgctagtcgtacctcgggtactataaggattaagctcaggcctctgttgcaaagcactaccgtacttccacatgtctagtgggtaaggcttagtttgtggctcagtctggttataaacaaaagtacacggatggagatggacgaagtcgggggtcgatggacatctctaggacaaatgaaggctacacgagctgcggcccggtagtagagatgtcatggcacagggctggtgtcctgctgctgggggctcattcctgcctacctgtcccggaggttccggccgtaggtggggttgggtcgatactcttgtctatggctaggatgggttggaaactatgtcacgtcttccgtctgtataccgtggtggtatgtggcacgtggttgcacgtgagggagatgtgtcttgtgggtaaagatgtacacctctgatcagagtataatctattcgaatagccgcgccctcggttatgggcaagccgagcaatgtacccaagttagtgttttaattcttaaaatttgctcaacaactaaaatgtggaatggttggcctgggttggcttgggacgagctgggacccagggtcgggttgccagttcggtctgaatcatcgtaggccttgggttaaggcaggttcgtgcgggttcacgaccctgattaataatattgtgtagctctaggatcgtccttataaaatggctttgggcaactaagtgacttttaaatgcggatttctgcaaaacttaacccctatattattatccccttgtactcccttgcattaattatgcatctccggtgtggcttgctgagtactgtggttgtactcatccttgctcaatctttccccccttcagtaagagaagctttggagaagaagtcttaggtggagtcctggcttataccccagttgagcgcctgtgaagatggagccgtaggcccgctagtccgctgctgtttattttgattgtcaggccttaagcgcctttgtaataatgtaaatattatcgatataataaagatgtgtcttttatatcatgtttgtatggtgtaccccgacttttcctgggacggggattaatacactagcgttcgggaaaaggcaattttcccggtcgcgacagtcggtctggtcgaaggtgagggcaacctccgaccaccgcgcccgccacgtcgcctcatgggtaggggccacggccagaagctctcgcttcatggccttgaggctccggcgagaagcgtgagcacacgctcccccatcaacggtggcgacagtggcctcaggctcctggaaccctaggtcatcgtcgccatcgttgatgtcctcggcgggggccttctgcttggcctcacctcaccggttgccggcgggagccgccggggtattgccctcacggcgctcctgcctcctctcctcctcccacttcctcgtccgctcagccaaacttttgaccgcgcggcagtccgcgaggtcgtggagggaggtgttgtgcatggtgcaccacttgccggtcgggcgctccctgctgggagcgccggcctccttctttttgtcgctcgcaggcctcccctttcgggtggcccgcaaagcgccctcgacggcgaggacgtgaccctcgtcgtcggaatgggccgacctcttcttcctcctcctgtcccgtcgccctgaccgagcggcggatccgggggcggccgaagctgccacaccggaaccggaggagttccaggtccaggcctcctccttgcgagccacacggtccgcgagctgaaaaagctccgcggtggtctggggctccttggaggcgatcttctcgagcatgcggttgtggcgcacgccccccctgaacgcgtagatcaccgcgtgtgcagggatgcacggtatggtgttgcggacttgacaaaaccgctgaatgtacgagcgaagagactcatcgtcccctcgctgtaccgcgtgcaagtccgcttcttcacctgggcgcggatatgtgccctggaagttcatggtgaactgctggcacaaatcctccaagagtggaccgacgcgggtggcaagttcattagccaaccccgcgcctgtcctttcagggccatggggaagaaattcgccatgaccctgtcgtcacccccggcggcctcgatcccagtcgtgtagatctggagaaactcggcggggttgacgcttccgtcgtatttttcggtgatggtgggccggaaccttgggggccaacggacgttccgaaggcttgccacaaaggctcgacagccggcaccgccaaccggggacacggggggtggcccccgtgcccggaccgaagtggcgctccggacaaggaagcgccctccgatgcgtgggcagcacggcgatcattgcgccggcgctcgatattgaagcgggcatctggccccctaagcacatcttcttgggttggaggcgttgacgagggaatggcggacgaacggcgggtagcggccgccgctcgccgcgccctccgcctcgacgacacggagccagcagtagcaacgccagtggccttggtggcggaggaccgccagccggcgcctaggcgctgctgcgccgtcatgaccaaattggccacgtcatctagccaacgtccagttggagtctctggatcagggatgacgggcgggtgacgcaggagcgcgcccgcagcctggagcgcgccctggggcgtgctgccatcaccgtagacgaggagacgacgctccccgtctcgccgtccttctccatcgcccgcgtgcggcgaagtcgcggatttttcgacctcctcgagcgcctcctcccgcccaagacttcggcgagagggggacagtggagtacgagctcgacggcgcgggttctgctccccgtcttcaccgctagcgctcggagagagattgtgcaccactgcccgttcggccattgggctgagcgggagaagcttggcgcacacgaaagaggacgaggccttagaaaaacacacgcgccccctacctggcgcgccagatgacggagcgtggggctcctcaccgggagaccgcgcaggcccccctttgccggttcggccgggggcgctaagtgaggttcttcgccctcgatcgatctggagaatgttcgcgagagagcaagtgcacgagacacgggcgatgtagacaggttcgggccgctgagaagcgtaataccctactcctgtgttctggtggatctgtgtgtaaaagatctacagagagccggagagccagagagttcaggctccagaacccctctcgcccccccttttcttttcttctttctttttcttttggtgggcaaggtcctccttttatatctcaaggggatattacatgcaccacttctacctacttttcttctgggtggggacctaccctatcttgaccaaaacttggcttgcaccttcgcctggaagctaaatcacaacttgtccttgagtgaggctcagcgccgtctctcgcctgacaccggggatctccctgttactccctcattaatgggcggagatttgccatggctgctttccaaatgaccatccgacaagatgggtcatacctacctccactccaccggaggcagatgcatcgtgggagcacggttgtctgccgatgacgcgaccggcgtcagaccagtcacagaccggtcattcttgt

SEQ ID NO: 7822 - DNA, 9556 bp, Oryza sativa
tacaccgtttagtatttcgggaagcgtgcgcgcggaaaacgaagcaaaactcactaacaatcacccagatcacctaggaaagaacacagccttagcgactgctattttaacttagccggttgctatcgcatctgcagttcaatttagcaggctgttatagcatgagcctattttgttagttgattttctgccaaaacattatatgatgtaacatccaatgactagaacatcatgtctgcttttaatttaagttggaacaagacatcaactcttcgagtgctactaaatctcaacttatcttcataggttatacatatattgatctatcattaatttatttctcagttgctttgttaatattttataaagtcattactcataattagggctagacaaaaagctcgtgactcattagctcgctcatctcgtcactagcttggcatgactctgttaacagtgaaatttggtaagcccggactagtcattggcttagagccagcatcggctttgaagtcctgagattagccgatgagagttatcaagtcgtcagttgtcggattcttgctatattcggttaaggaaattgatctactaaaggaagcttatccagaagagaccgagttcaaagagaatgcggcatggcaagttatctattaattaggaatagtttgttagtttccttttatctttaggaaagtgtgtttagtgtcctataaggactttttcttttccttttatctttagaaaagtttctttcttgtccgacaaggacttgtatcaacccatgggtataaatatgtacactcggggtctatgtaatctatcgctacgatcaatacaattcgatgcatcgccaccccttttacttctacttttgtttttacgttccggcggaacttggcatccgacgcggggttgcatcgtcttcgatctccggcgaagggataagtccaatgttccgccggtccaagcaattgtatcgtctacatcagcgtcgttcaaggctgcatcagtacattcgacctcttggattgctctggtttggatgatatatttgcctacctatttatcataagtctatgttaatctagtcctagcatctcaatttagctctatcagctgtctctcgctttagggtttctactggtatcagctaaatcgccttgctagattagattagcctaggcatctaccaccctaaaaatcagtcaacggcttgattgtctagatattgtgtttcttttcatacttagtgttgcatcagttaagtttgatctactaagttgtgcttagaaccataatctctggtctgcttttgactgccaataagggtttcatcggggtttcagccgatgagttatctagacgttgcatcggcttacaaggattgtatacatattggaattagccgatcgcaacatagattttactgtttatctaatcctgtgaatttaatggcatcggacctccagccgatgtatgctttaaccttcggatcagtgcttattatatcttgtttctagccgattggtttctactcggttatattgttatgttattacatcatcaatagccgattgcctttatatcattatctatattggacatatagccgattgcttaaaccctatcgctatcggctggtatcggcatcggctattatcggctatcggctggaactactccatcggcttgtcagccgatcggctgcattgatttactatttgcatatcttgtcatttgcaagatcaaactgactggcacgcccgcatctcatcaagatttggacctgcacaggagctaagcagatctcccaggctggtgtgttcgattttttcgtcaatagactcgactcagctcgttacgttttcctaacgagccgagctaccgttttagctcgttagctataacgagtcagctcgagctggctcgcgagctgctcgtgagcttaacgagctggggcatatgatataccaaatagcaagcatcagcccatcattaggacacacggcccactaaatgaccccgaccttccgttggcccagataagaacagttgaaaagacttggatcgtgctgacactttttcgtggtccacacgagatcacctaacgatttgcgatgtaatcaacagagtcgccaaaatcgatagattaaaactggctagcagccgatttcaagattaattcactttctcggaatcacacgactaatttacaagaaaattagcaaagaagataaatatcgtacttacgtgatgatgaacgactagtttccaagcaaactaccaaaggataatcttctcgctttcgtggaaaagcaggactgtttttcagcgcaaaacggcaaagattaaccaaattatagggttgctagaactcagccctgaaaacaaaatagaaaacaacaagaaagtaaaaaaggggaaaatagtagatttataattttgttcggggtttcttctgaccgtacacccgtgtatatatacaggtgacatggtcaaacacaaaaatatcaaggttcagccgaaaaggaaacaaattgataaactaggaaaaatatatgtccatcttcctagtaaccgcacgcgctaactaattagcctcatcagatagaaaccaatgccgatgcttcaggtcttgacggtcgttacagacaaattttgaccgtcaattaactaaaataatagagaattagctatgcttgcaatgtatatttatttcagaataatatagtaccaattgtacttggagaataatatgttgcaggaatttagcaaataaaataaagagaatgtgaagaaacctcactcctaagcaagcaaatagataaggagggcccacatgataggtgtaaccgctggaaaccgtcttaactgccacaactgtcattgggacccacctgtcagtcaccctggcaaacttggaggcctgctgggctggcccaggttcagccgaaccctagcaactgtggctccagctggcctttacatgaggatgtccaggatgagctgctgatgacggttacaggggtaaaattgacattgcgcatcagagtaaccgtcataccgaccctataaaaggaggagctcacttcacttcacaacacactcaagcaagctcaacattcatcttcatactttatttagtagtttagtgctaagtggaagtagtatagagtagttctctggattcctcggagctttcggaggagtttcggtatggctctagtagcttttctatcctctcctgtaatactttccgaattaatgaaatactcttctttttatattctcggtactttacttagtatgagtattgcttttactttatacttgtgttggtataaatgagtgggtagcctaccagcgaggtgcaatggtgtgggtttattgtccgatttatcgattgctctatatcatctgcatagatgtagaatagtatttattaatgtaagcatggtgcttagattagtaagtatcatcatttgggcatatatgctgcgggacagtagaggtgggccgctgatggtgacagctcagtacgggtattcctccatgttagtatatattcctaagacaaattcctggggagggtactcctccgtatttaaccccggttggacggccatgacaggttgtcgtcgtaagaaactcggtaactcggggtggtctctcaaagcaccaggatggcactgttaggtggtattggccacatgattgtatactagcaagtgtagagtaaagtttagtgtatattagaagtataggaaatgagttctctctatcttttcttccacttagttaggattatttatctgaggaaatctactaaatgctgagctttccaatgtggaaacaaaagatggttgtggcggcaacaatggcattgcataatttcattcatgaccatgacacgcctaataggcatttccataggtttgagaggaatccagattatgtgccaaccattccatctatattttggagatatgtgatttctcaagatgcatcgaatacatccactgaggggtcaaagtgataatccatggatgcatttcgagatgacctagccggtcgtattgtaggttgacggaaatatatcatattttgtgtagttttgtagtattttgctctatctttcgatgatactatttatttttactaaacatttatattgctaaatatatgtcatgcaacaacttgaacttatacttttttttagtaccaatttttgaattatgtttatcaccttatatacttaacatgttgaaattattaaggaaaaataataataatcacagtgctgaaattattaaggaaagtatctattattaatcctacataaagttaacagtgaaaaaaacagaagggtagtattgtctcttgcaggatttctagagctgagtaagttagccaaatactttcagagcacctacatcttttagaggagctggcttccattggagttagagtttggagttgagagatagaagctggagctataccaaacggtgccttactgcgacagtgttatagcccttgcccgaagcggtcgtgaccgaacaatactgtttggcccgattttggcccacctatgtaattgacgacgatcgaatggcaacaaccaatggcaggatatatgtgtctttgattggctagattggtgtaatcgatgacgatcgaacggcaacaactaaaggcaagatatatgcgtctttgattggctagattggaaagtaatgctcttattagtttccttaattgacgaaaattagacacggtgcaggtcagttttgccgcaaagaagcagcagcggcagcagatgccgaggttaatgtcggcctaattgcaaagccaaaatttatcgtccccagtggagtcgtcaattcatgttagtgtctttttaccctaacacgaggctcatctaaatatttgcggtgttaatggagtcaccaatcacctcgatctagacaacattaaatgatgtgaccatgactactattgatacaatcgtcgctcacatgaaaatcaagttgaccaagtgttggaatctgattcggccaccgttgacattgctgaattcaaacggccgccaaatctctatacgaacttcgttttaggaccgtcagtacttgatagaaagctcttagagtcctctttccaacggatccagcctcattgcgaaattacttcccagagggccgcaattgcagaaacaaggtattgcgtcacctatattgggccagtgggcttgtaacttcgtttgggaccccggcccatgtggggtgcgccccaactacgtggagcacgaccctagggactcctaggttgccctcccaccgttataaatagataggtaccccttcaaggtttcttgggttttgtttagatgaaagtttagccattgctatttccttgcagcgcgtgtgtcggctagatcatcgtcttcttgtattcgaaacccgaacttatcatatgtattcattcctatttgcaattcagattgcttttatcttgttcatgcttgtttcttcgatttgcttgcaggaataagattgatctgcaccggcaagatcaacaatccatggagaggtgtatcgatcgcaaaggtgcaacacaacgtctcgtacggttgtagtcgggtcatcaacgtttctcctaaatcgtagttatctgaactcactgaaagatcgggccaagaacagccttgagtttcgagtggaattcagggttcatcaggtggtattagagcattcgttgcttggtgagtttttatcaacctatcaccagaaaaagctaaacaaaaagttgcatccttcacctagccatatttgtgcctctgtattgttcttttcagtttttgctttgttgagttttctgttgcatggttagtcgtgttgctggtcttagcgtctagtccatctagagtttcgagttctggtcacgttagtaccactgtcatcgcgtgcttgttgtcgtcaggacctacgaaaatggaatcggctctgacggagcgtggggctcctcaccgggagactgcgcaggcccccctttgccggttcggccgggggcgctaagtgaggttcttcgccctcgatcgatctggagaatgttcgcgagagagcaagtgcacgagacacgggtgatgtagacaggttcgggccgctgagaagcgtaataccctactcctgtgttctggtggatctgtgtgtaaaagatctacagagagccggagagccagagagttcaggctccagaacccctctcgcccccccttttcttttcttctttctttttcttttggtgggcaaggtcctccttttatatctcaaggggatactacatgcaccacttctacctacttttcttctaggtggggacctaccctatcttgaccaaaacttggcttgcaccttcgcctggaagctaaatcacaacttgtccttgagtgaggctcagcgccgtctctcgcctgacaccggggatctccctgttactccctcattaatgggcggagatttgccatggctgctttccaaatgaccatccgacaagatgggtcatacctacctccactccaccggaggcagatgcatcgtgggagcacggttgtctgccgatgacgcgaccggcgtcagaccagtcacagaccggtcattcttgtccaccacgtgtcagttcagcatgctacacgtctgcccttcttcatacaatgatttccttgcaatggttgcgatgaagcctggaatgtatctggccggggctgacgtgccaactccaggagttcccacgccggctccggctagggacgagcgcctggaggctctcatcattccgacgggacggggcgaggcgtgtgtcaggccgcctgttgccacctaacccgcgatctgaccggtctgtgaccggtcacacactgtgacctgtcacggaccgaacgagtgtgctgcgctgcattaaatgcggcgtggggcgctcgtccaacccgcaataaacgcggttaggtgagcgccgttgtgctcacctaacccacacacgtggcgccaaacccacagggggtcggggcgccccagccctcggggccgaaacgggagcggcccgacccctcgggaagacagagggaggggcggccacatcaccctcggtcccgacccccccccccccccgagggggccaggccacgtgggtgactgcagctgccccaaacctctagtcaagatacccccggtcccatgtcaccgacaggctcactgccacggttctatttttgtacttttcagaagtttatgtcggttagttttgaagttgttgagttgcatctagtgtttgctgatcctacccgtgtgtttgcttttgccgtgcttgtgtccggcgctgagaggaggaagaaggaaatgggagagagttctgtagattagactagaaaatcaggcgcgccctgtcaaaagtatatcctgtctaatgagaaaatgaaacccagcatctcaattctgacctccccagataatacaaacacgacataaacatgatatgataataccatcgaagcgctctccgtctcgttgcagcaggtggatgcgacctcagattgagatgcaagaaatggaggagatgtaagcagaggggaggtagtacctcattacatggcctcaaagaggcggagggagcttgtatccggcaccgtacgtcggcaagcttcgaccaggcctccagatgcagtcaatttggagaagaagaaaacgatgaaagctgggtttggggtgtttgtgatttgtgaaggttgaaatggaagtgcaaaggtttcagctaaagccatactgagtgcttgtgtagagaggactcagttgcatacttgcatgggaaactgaaaagctcatttcttagctcttccaaattttttcttcaaacttttaacttttccatcacatcgaaactttcctacacacacaaacttctaacttttccatcacatcgttccaatttcaactaaaattttaattttgacgtgaactaaacacgcccttattcagtattaattcagtattaatatattggaatgttccccttcccaagggctccacaaatttctggattattccattttttatttaactttttacatgcatgttgactgaactaataccagtactactttccacacttatctagagccttaaataacatatatgcaatccaacggtgaataatctgccacagttatcatccaacggttccttttttatctaatgacgtggcctagcctcttttcagcaaaagatcctgaattagtgtgtagattggtttggtttccgtttggtggccaacacagagaagagaaaaaggaagggagagatctatttctgtttttacgtggggcctttcgatcctaaggtcgacgggagtcaatctccacctagtgagtcgtgtccgagacctcctagatccacggtctcctctcctcacggtttcaatccatactgtgagttgcccatatagcttgatgaaaaaattttagtatcggattggagatctgtttgcaaatacagaatctatgagcattttatttttgtatatctaattttgggtttggacttttacagttgagtccctataatttttatatttacatttgagtccctttaatcttgcattgaggcccttgagttggttttttttaaaaaatcaaaaaaaagaagagaaaaaaaaggcagaaaggtgcataaaacaaagaaagaaaagctgtacccaaaaaaaagaagggaaaaaagaaatttacttgtttcgtttgagattgctttcatatatcattatgtgcctgagttgtttgtggtgctaacttgtggtatcgtttgtgtctaggctcgcatctctagtacgtcctagcctaggaccagcacggtacttgactttgaacgatcattcaactttgcattctctgatttgagcatttgctatttctttgccacatatttaagtatacccagagctccacagatttgattgcagccgtacaacaagtgtttgccaaggcatcgatacatccaacctccattggagtgcttggttgagtcgttgtatgttgccattcttcttgcattggtaagaacttgtcagagctcggtgaaaagcttgagtgtgtgtgatatttgggctgccactacctagtagttgataggagcgtgcacattcttgtatgtctttcttgtttgctactaaccatgacaagatcgcacaagggaatacgagaacattgacttcttcaccttcgatgagatatgacgacttctccacgcaatgcatatgaggtacctgcctataattttgcacgagttgaatctaagttaccattctacgatgagaagtatgattctgttgcatatattgattgggagctagcagtagataatgaatttgatgagtatgatttttctgatgctcaaatgattaaggctgttagtaataagtttacctcttccgctctcttttggtggagttatgttactccctccgtttcataatgtaagtcattctagcatttcccacatccatatggatg

SEQ ID NO: 7823 - DNA, 9261 bp, Oryza sativa
agctcgaaactaaaaagttaatgcgaagaaggaaacacgttcgacctcgtcactcctttgaaacgtaagggggacgcggttttcgaacaaggttttgccttagctcgaaaacacgacataaaaaaaagcttgaaagcatttacccaaattcgagctcgaaaactaaaaagtaattgcgacgagggaaacacgttcgacctcgtcactcctttgaaacgtaagggggacggcggttttcgaacaaggttttgccttagctcgaaaacacgacataaaaaaaagctcgaaagcatttacccaaattcgagctcgaaaactaaaaagtaattgcgacgagggaaacacgttcgacctcgtcactcctttgaaacgtaagggggacggcggttttcgaacaaggttttgccttagctcgaaaacacgacataaaaaaaagctcgaaagcatttacccaaattcgagctcgaaaactaaaaagtaattgcgacgagggaaacacgttcgacctcgtcactcctttgaaacgtaagggggacggcggttttcgaacaaggttttgccttagctcgaaaacacgacataaaaagaagctcgaaagcatttacccaaattcgagctcgaaaactaaaaagtaattgcgacgagggaaacacgttcgacctcgtcactcctttgaaacgtaagggggacggcggttttcgaacaaggttttgccttagctcgaaaacacgacataaaaaaaagctcgaaagcatttacccaaattcgagctcgaaaactaaaaagtaattgcgacgagggaaacacgttcgacctcgtcactcctttgaaacgtaagggggacggcggttttcgaacaaggttttgccttagctcgaaaacacgacataaaaaaaagctcgaaagcatttacccaaattcgagctcgaaaactaaaaagtaattgcgacgagggaaacactttcgacctcgtcactcctttgaaacgtaagggggacggcggttttcgaacaaggttttgccttagctcgaaaacatgtcacatcctgaatttcgttttaggatttttaaagtatttaataaattattattagaatttatattaaatgttcattaattttcaagtgaagttaaatgtgggaaataaaatttcctaaatataaaggatggatggatttaatttttattaaattcttcatggttaattatactctttggaattatctcggattttttcggagctcaattcctaattttaatcatacaaagaacatttcagtaattacccacatatttaattaataattaaatggtctaattataattttttatttactttgagtgtccaagtattttcaggatttttcttgaaattatttgagcattggaagtatttttaacaattcaaagatcatttaagtgattattttaattggaaaagtaataaaattctcctctcccttgtcttaggctgaatcggcccattcctttccttcctctctcttccgccggcccaacccgagcctgcatcctctcttcttctctcagccaaagtccggttttactccctcttctaatcaggctgagaaaagaaaagcccggcaagaagtctacttttcctccctgtcgctacagtgcgtcttcaagctccagccgccagccgagccgagtcggctgccatgccgagccgccttgccgcgccgaatccgccccaatctctccccttttcttccgtttttttttgaggggtttttatcctctcatcttcctctatccttacccccaaaaatcggagcaaatcgttgagtattttatccgaatcgaactcgttttgagtttatctccaaaaccgagtttttgatttcccggagcgatttcttgcgggaggagtccgatctattcaacccaaggctataaataggaccccctagtcctcctctttcgtttgccccctctcccgtgatctcccgtgcctcgtagcgccgccgccacgtgctccaccccgccatcgtcgccggccgagttccatccgcgtcgcgccgccgcctccgtcgtcgccgccggtcgccgtcaccaccgttaggtgcgcgggagggtggagaagcccggccgcctgacccccgaagccgccgaccaccgcagctccggcgccaccgccgaccgaagtcgtcgccgccgctcttcctctccgccggccgtcgtccgtcgtcgtttgtcgtatcggtgagcaccattgagttcgcaatgttgtcctctacgcgtatgtgtcctccaaaagtccggccgaccaccctagctccggcgaggtcgccacccgtgccgtggctgccgtcgatgacgtcatgacgtcatcatctcctctttttcagttttttttaatagattaaatcttcggaaattcataactaaatcatcgtaactcggttttgagtggttcaagttgctaaattcatctaaaatcatgatctttgtactgtttatttggtttttattagtctttttcctcgttttgcgtgttagcttgtcgtttccgtcattgcgaaggttcgtgagtgcgtcgggagtgttcagaagattaattgagaccgattattgcaaggcaagtcacacagatcctaaacacaatcatttgagcatgttgatcctatatttaaattctctatttattttaactgtgcatttattttcgaatgtcactgggtggtgtgaacctattcctttgttatggccaatctgcattgaatgccctattccttgataccttgggtaataaattgattagcttgaaccttatgtattggtttggttcagctaaatgttatatatataattgcttagccatgcttagaaacattagctcactaatgggatgaatcatatatactacattattatttatggttatatttaatggtagctcacgatggttaatcgtgttatgataattaattggtaattaaaatatgattaatggtgggttgtgagcacatggttttgaaggtcgtgctcatggcaattaaggaccggttcgcgagctactgttgtgaaacattaaccgtgccaaccacaagccagcgtgggcaacggctttaccttttgtatagcatggttcattgtggagcaccagactgagaagtggcggagataagcccacgggggtcgctggggagtccatgccttgttttataaggggtgattatgatccaggaatggtgtactgtggtgagttgtgttgtgcagagggtattgtcacagcctctattcgggtactttccagtatcgcgacgcatggtagacatgatgttgaggctgtgtcttgtaggtacagtggtacacctctggctagagtaaaactattcgaatagtcgtgcccgcggttatgggcgagttgagcaatgtttttcgtgattagtctcacgcctctcacaataattattgatgctataactggtaataatttgtttagctcctggtttggagttagatctgtacagccgggtatggttgttcaggatggttgggcctgtgcagcatgggtgtgttgttcagtgttgattaaaatttctgattaattactctactgttttactactcttaactctttgctaaatgctgctttcgcaaatgagactatattatgccatcctttggtatccttgtgcacttgcatatttgctgtgtggcttgttgagtatatcatatgctcattcttgcaataatcaatcaacctcagttgaagaaaagggatccagaaggagaagacgtttggcttataccccagttgagttgcctgtgggagtggagctgaagccatcgctagaccgttaattccgctgctgtttttcttttcttttgtaagtatgtaacgttattattatgatggatttgtatattaaattgtcagtttgtgtacctcggctgatttctggacgaggattttatgcacaaattagtttggaaattattagtgaatttccgggcgtgacaaaacacgacataaaaggaagctcgaaagcatttacccaaattcgagctcgaaaactaaaaagtaattgtgacgagggaaacacgttgacttcgtcacttcttttgaaacgtaagggggacggcgtttttcgaacaagtttgccttggctcgaaaacacgacataaaaaaagcttgaaagtatttacccaaattcgagctagaaaactaaaaagtaattgcgacgagggaaacacgttcgacctcgtcactcctttgaaacgttagggggacggcggttttcgagcaatttttgccttagctcgaaaacacgacataaaaaaagctctaaagcatttacccaaattcgagctcgaaaactaaaaagtaattgcgacgatgaagttgatgcattcaaactgagaattctgctttgtgtagtgccgagcgatatggaaatatgcaaattccccgccatgcggagttccaccgcagctatctcaatgatgttttcgaccgaacagggggacggcggttactcccctgcatttttgatctagcacggtttcggccgaaaacacttcgcccttacccgtgaggggcttgttgtagcaggtggtaaacaccatcccccatgcccggccgaaaacatatgtcaagaaggaaaatgtgttcgagttatttattgactcgaatgaagtttccacccaaaaagtagttttaggtatgggaatatatatgtattcaccctaaaggatctgtcccaaggaaaaagcattcgagtaaagttacttgctcaaactaacatcactaattaatgaagctgtgtttcaggcaggttaaggtgacaaggagcctgaaaggtgggagaatgtgttcgagccttagcacgggtgatctcactcgagcatatgaagttgaggaaaagtgccattgagcaaatggtctaatttgggaaagtaccatggggaccacctcaaccactctcaccagctagcaccagatgtcatttagggaccaccagaatgtaccaaaatgcccctataggtcataaactttataggggtaaaatggtaacttcatgtaagcctgtaatgacaaacttgtaaatcttggacatgcggttgagcactatttaagccaaccaagatcctgtaagcacgggaggagatgaatatagaaaaagcacattcattcactttggtatttgtcttttgagctcactcttaggatagacgggaaattacattttcccttctatctcccaactttgtccatgcccttaggtcacgacaacaattatgctcaaagggggggaataataacttgccttgctccaacgcaaataaatccgagataagcaacctgattatccgatcctcgaaatatcacaggttgtcatccaaaatataatagattctactaaagaagaggaagaaccaaattcaataaaagccataaaataacaagagaacgataaacaactaggagggctagggtttagggtataatctatctcttctataggatatagggattatatttcatatgtaggttctaaagggttgtaggctaggttggatagaggattaagcaactattgttgcttacattttatgtatgggctttggttgtttggagatacagagtatattaggtaattgaactggctaagtaggcatatggctagtattagctggtgataggtttaggtagtatagtgtctggggtttggttatatttaagccgattgtggagtagggaagcatatcggctagggtttggttgtttactagtcgttgctagagttgggcagtataacgactaggtttggtattttctctagttggtgtcaacagatagcatatcggctagaggaataggaggttggtgcaggtttagcggggcggaagtgttactccgacaaccgtgggtggcggcggagtggctaggatcacacagagcccgagagctaactgtgcagcgtgcggtggaggtcaagggaatagtgaagctctgaccgctgtacgcatcaaggcgtggggtgccaagagcagcacttaaaccttgggtttggttctaccgggctttacaaccaatgatctgacatcgggacccgtagaccgcatgaacgtccccatggaagacgtaaagttccaaccggcggctttttagtagctaataggtattttgggataaagggaaatatttgaaaggtaaatatatgtttaaattggatattcaaataaaatattaaaatagtaaatttagtatcaaaatgtagattttgaatttagatgaatttggggaatggatttgcctcgtcgaggcaaagcttatggcgcgagggtttggccggcgtgtctctggtgaaggagatcgacggcggccggtggtggttgccatggtggggagagagagagaggaagagcttgaggctttgttgatgtgtggagaaaaggggagggctcgccttctatttataggcagcgagaggttggttcgtaaaggaggaggagaaggacgacatggcgacggcggcgtggagaagaggagcacggcggcggctctgtctccgattggacgatggagtcggttcggctagcggttgacgtcagcgaggtgaggtggcggctgacgtcggtggcagtagcggtggagaaggagcaacaaggccgcacagcgatggcgcgtcggctcggcgaaaaggcagcggcgtgtttgcatgcaccacgcgcgctcacaaaggagggagagaggcgcctgcctcttgggccctctgggccaagcgaaggggaaaaggaatgggctagattgaaattttttggcccacagtgaataaaaaatctttttgtattttcgaattagatttgaaggatgaaatttgaatccaaattaatatttggaagaaatttaggtggctaacttttgagatgaacttatttttagaaatagttttcaaaagagagatttcctaattatttgagtgcaataattttgagagatggaaactggtagtatgaatatttgaagaaatatttgtggctaatagggaattaatttggaagagaggaataaaataaaaatctattcttcttagcacaagagaaatcattctgatatttataatactgttattcttgaaccgaggaggaaattaagccacataaattaaattggcgactagataaaaaggaggaatttggataaggataggtttagaatcaaaggatgggtcaacaattaattcaaaattggaattggaggattttcttggaccataattcataaaagtagaaagggttttcaaactaaatttcaataaaagaattttagtcgaaagaaggtttaatgtaggattccatcaagaaatacctcaatttaaccaaatatatttctctactgcttaaaaaaaataagagatgctttcttcatcgtcgaaacaaaaataatagcgaaaaaaaataaaaaaagtccgactcccgtcaaaacaaaaacaatagcgaaaaataaaaaataaaaaagtccgactcctatatccattcccttttagaaacgaaaaaaagtccgactctggattggtgaaaaaaattgatgagccgaactgaaaatctgtttaaaaaatagaacctacaggtcgagatcatttcatttttatatgattttaatttttgggtttgtacttttgcatttgagtctctataatttttatatttacatttgagtccctataatcttgcaataaggtatttgaggtcgtttttgttaaaaaaataataaaagagagaaaataaaggcagaaaggtgcataaaaagaaaaagaaaagccgcacaaaaaagaaaataaagaaaaacaacgataacaaaagtttttttcccctaagtggccaaaaaaactgtagatccaaataaaaaaaaatctgattcatataaaaggcaaaaaaaagtggtgaaaaaaaaggctagaaccgattcctttaaaaacaggaaaaaaaagtctaattcctataaaggcgaaaaaaatccgaaaaaacatctaaaaaagttcgtccgattccctaagaaagtggcgaaaaaaatggttcttaaaaaataaaaaactggttcatataaaataaaaaatgcacgcgaaaaaaaatttggaaagggcggaaaaaatcctatttctaacaagtatatatctcttctctatctctaatctaatctaactattaaaaaaagagaaaatacacgagaaaaaaaggttaaaaaaacgcgtgaggcaaaagtcagaaaaagctcaaaaaaacacgctaaaaaggttttccatcttcaataaaaaaataaaaaaacacgcgagaaaaattatttccatcgtcggtaaaaaaattttaaaaaaacatgcgaggaaaaactgtcagaaaaaacatgccatttctaaaaaatggttttaaaaaaccacgcaagaaaaaataccgtctattaaaaaataaatcgctctaaaaaaactatcagaaaaaagctaaattgatggacacttgagtcggataggattcatcgattttttgccatctactacacggcttttattttgtcatatattctcctgtattagaaaaaagaaaaaaagaacattcgaaaaaaaacaagcaaaaaaacgtgcgagaaaacaggcaaaaaaacaaacgagaaaagaaaagcaaaaaaaggagaaaaatatggttttctttgtcagtaaaaaaagcaaaaaaaatgctaggaaaaaactgttagaaagaaatacgccatttctgaaaaatggtttgagaaaatctcgcaagaaaaaaacattgtttataaaaaacaagccgctcattaaaataaaacattgtcattgacatgattatgcatgaaaaacgtatattttcattagaatgtttttacccattgcaacgcacgggtatttttgctagttaaatgaaaaatacgaaagaaattaaataaaaggagaggttttatgcgacttagttttaggagttccctctaattataattataatgtccttggtttaggaggttattaagaatataagaatcaacatgatgcataattagaaaataattaattttcgggatgttatatatttataacatcaatatagttttattaaatatacaattgaataaatttttataataaatttatcttgagttaaaaatattactattttttttctataaaagtagtaaaatttaaaatagtttgactttgaccaaattcaaaacgtactgtaacctgaaacactgtaccaaaaaattcggttcaaatagcccccccc

SEQ ID NO: 7824 - DNA, 20974 bp, Oryza sativa
  unsure (1)..(20974): unsure at all n locations
cagctgtaaactacaaaacttgcagtctgatcaccctcaactggctatgatgtgcaaaccatcatccttgtccaaaataatcgttgtttcaatgatgcgaaacataccctagctcttctattcacatgcttcaactaatgacttcctagtcaattattcctcatcttatttcatcaaagttatcagatccttttttcatcctcaaaatcaatgtcttcctcatcttattcctccatttatgccttcagtgttaccattaggagatccaattctggcgctcccttcacctatccgatgctcatattgtcacactctcgaatgccaccaatctcaacctgcctcctttgcagccccttgtggccatcttgccatagttaccaatccacttctggttcttgatctagctacccctgattctgtttcctgtctcccctggtgtttcagcagcaatgacacttgtatgctggccatactaatctcatcattcgtagacatttaaaacttcagcattgataatttgaatccccttattagtggttgaagtattatagcatttccaaaacattaaatgaagtatttacttgcaggtggttaatatgactgttttgtaataggtgccattcaatgcttagcgttgatatgtgttaaaagtgaagttatacatcatttttatgtttcacaactgatactattgtagatggctaagtatgcataaaactataattccatatgattatcgaactgattttttccataaattgtggaaaattaaacaataggaatttctaattgttttcttttccgtcctttgctgtattttttcagttctgatatcactatttcaggaaatactagagcactttaaatcaaggatataaaataatcttctgcatcacccatatttgttggttgcattgcatatttggcgccatattggtatctaatgcatattaagtactggtatggtgagtttttagaggattctatgttgtctgctggcggttaggcaagctcctgggcaatgatggggtcctggacttggtcaatacagctcttgtctgaaacctaggcacaacagacttgtgcagtatttatgcataatatcttccgttagctaacatgtagctgtgtactaatttgacaggccaaagcaaatgatggagatggaccagaactactccgaagtgcatctgatggtgaaactagtacccatgctgactcattaacggcaacattggctgaacatcgtcagcacttagtcagtatacaggtaaaaccaactatggttggaagctaagcttgcaaaactagtgtccaaaatttttgtggtgtcgactcgtgtccgcttgtctgacgcggggagacacgcatctgaccctgctaggcgtgtccaaattccaaactaaaggaagggatttggtgggggaggggggggagcgagggagatggacaaatggtagtattttcttgctttgtggtggtttcttgggagcagcaaaaggagagagaagcatcaaggagagagagagctcagctgcacccctaccctttagcctagcacacagttggcctgttaggtagtactaaggacctgtttggtagagctctaagcctctaactcctaaatttaactatgggagttggatctggagtggagttgtggagcagcatatacccaactccacctttctagttcattttatgaatgcgctccacccagctccactcacattttagatggagctaaaactgtttggctgggctccagctccaagagaggtggaggtggaggtggagccgtgccaaacatgccctaaagtattaatgtgtgtctgtgaaagctctactcacgagagtagctggctaggattatctatgcataaaggatcctctgcttggctctgtgggtgtctccagagtctttatccctatttctgctttttattttatttattagtgtataatacatgtgagtccccgaatcctattttttagagtttaccgagtcggactcctgagtttgagtaggacactggctcctgtgtccgagtcccagtaacacagcaacacccttggggtttgaatcacgtggattttactgatgattacttttatctgtcaactgactgattctctaaccattttctagggcctaattaatcaactcaaggaagctatcccggcaatgcagcagtcaatagcagatctgtcagaggaagtaaatagcgtatctagtaatccaatggataaaatcatctccagattgtctccgtcagtgcaaaattcagggtttggaagagcagaagtaagaaaaagaaaaaaatattggattggttttttgttcgatgatgatataccatgttttgatcaatacagaaaatagtctcgttaaaaagaaaaatagtggggctatttggtttgtgaaatgtccatgctcgtttaatcagcttattgaggaatgtgtgtctgttttgatcagctgtccttgaatcattgggtccaagaggcatgcactttgtgtaatagggtgaattcatcctgcacaagctaataaactgtagcatgggtaagggtgtacagaaccagttgaacagggttggtaatctccataattcatgcatgagaagcagtccatgcatgcatacaagcccaataccaattattggcaaaatttgtttttatacacacctagctaattgtcatgttaatccaatccccattataatggacttcgcgtggcataggggtattcctcaaccaattggagtcttcttttctcttgtagttaccacaacagcttttggtgtaaagacattatatcaccatgttatggcgtgtcactttgagtctgtctatttattctcctgctttctaataactttttacaggaaagcagcagtgaactttcagagatgacttccaagctttcttctacacaccttgacaaggctgggagcagtcctgctctaaagctaccacctttatttagtctgactccaagttcttctggaaaaggaacacaggcacaaaaaaggaatgcgttaggacggcaacctagccaagaaatcctgtctgaagagaaaactcttccccttccctcaactaaagatgaaacaaatggctcaatacatggtattttctatattgtctaaaccatatgtttcttctgtaaattccttattgttccgttggttacaagctgaacttttgacaatgacattggctaatttttttttctatatctatttttgcagaaaatgagggttattttgctcataacatcagacgttctgttcgtgaagctgctctatcaaagccattaagaaacccagagaggccacatgaccagagtagtgatgatggttcagagcacttctttattcccctatcaacaggtgcttcaaagatggagattgatgccgtcgataataatagaagaatgcaaaaactgggtttttcatcaccacaaatgaagttcagtgatcttcacttcaatgttgacagcccaatgcatgcaactcctgttctgtcaagtaaacttaatgggcatgatgatcctaacactgtcacaagcatgcttgatccagtaagtggtctgggacatcagtcatttataactgatgatgctcttgatcaagtattctccccaccactgttgttggagacttctttatttcaggatgcatacgaggacttgcttggtaagtcttcccagactcattgtcacgcttaagtagttattaggtgtacgctcaaactattgtatgcatgcaagtctttaaggttttgtgttgtctgaattgattaggcctcagtaacagtctgatatttaaggatctgtcgggttgaaggaatgtgacgaatgattgaccactcaatctgacatgacttatttggtttgagaaacatgatagttggaggatccgtaataccttaagccctcaaatgcatagctcagtaggaaaaaaaagaggaattagatttatatcccaccaaaattatggaatgacccattatggatcaactttgacaacttattttactaataatatttaaaataaaaagtataatattgatgtaaaaaatgtgtagcaattctaatgatgtcaactattacgataaatcaaaatttatttatatataatagcagtagaaatttaaaaagttatgacgacattttttgaaagtcatattgttttagagagggcagtactttgaaggcaagtttggtgcatccctttctgttttgattcacaggtttgcagttacagcacccaaaaaaaaaatcaaacttacctgtatgttatctgttatgcagctccattatctgaaaccgatacagctttaatggaacactagagctcacatgtacattgtgtaatactttgaccactgccgtaagcttcagtgcttgatcacagcctggaggttcttatggtttggttctgactgctgctgggacatttttggtgaatttcttgctggttgtgttgcttgccagttgccaccagcttgtgagggatgtctgcgtcagaagaaggggtattattagggaaagttggggtatttggttttggggagaggaaaagagtgttttagcggtgatatagatgtctgtaatgttccagccgttgtgtgcacagtaagataagattcaaaatcgtgtgtatttagcgtacattgtatgtatttcttgtaataatttgcttcgcttaaaagtttttctgatgtgcgggttctgctgttctgcacttggtgaattgcaccggcgatttgcgggaaagcaatctttggagacatacatcgatgggggaaaatgtcgaaaagtcatgaactaatgctgaaaagcttggagtccacaggtgtgacatctggtgggattctgatggttcgatgaatgaagaattttgagaaattccgtgcatgaagtgcccaccgggcacctgccaccgcctctcatcggtaactttgcttatctagtccgaaccaaactggaacacttgtgttaactagtaatcgtgcacgtgcattgcacgtttcccacattagttatagtaatcatataaaaacacttcaaatttcttgcattttcctgtaatatatgtcaggcaaaatatacaacatactaaaaagtttaagaactatatgtactataatgtaacttaacatactcctttaaacaataaaaaaatgcaaagcagctaacaataccaaacatataatttgtcatagcttgataaacacttgaaaagctcaaagcaagatatttgtatttatggtattgaattaaaccccacagcctacaatatcttatcaggaaaaaagactcagatcttcaccaacaatacttcaaatatatccttcatggccagcaactaaaaatagcatttacatgatcaccaatgaggtgtatacagctcctgccgtgggtccacagaagttcatgtgatctgcaaaacacaaatttacatccatttcacttgtaagaaatggtcatcacatataattccaaaaagaatattgtctatagttgccttaattgaagtaaaaaagtagatagcaagtgtgaacattccagaaacactaacatttgtcaaaacgcctctatattttccttgaccacaatattaatctaaagtggtcatattgctaaactatgcacacacctgcagttgaagtggcagccacgaaaggatctaccaatcttaaaatctggagaccaatatctttcatggaattccctcaaggaaagggttccactattagactggaaaaagggaaacatatcaaatcatgaaaaaggcataatctgaaattggaatagcgtatatctttttaagatttaatttaatcctggagtccacacttttttcgtgaagctacaaataaataatatatccataatggtgatgaaaaggatttaaaacatggatagtagcactggattaaaaacatgaaaagcaccttacaatccaaaagcttgagaagacattagcatcaggcatcttcctaagaaaccaaatgctcttttagccacatcaaaattttcaagcaaactacgtatgtccaaataaaaagaaataacaaaccgtccaagcaagcatatgccgatggataaaatttatgaattacatcattagtaattagaagtcatcagcacaaagcaaatattcaaacttcccaaaaacaatgcaaattatcagaggagaaacatcaaattccatgcttataacttgtagaatatacactggattcaactgatgcactttttaaggaaatgaagccatagttccattgtcctgagctccaaaattgatcattggtatatacaaaggggatattcacttatatttaagtctgctagaataaaactctcttgacctatggagttatatgtgcatacatacaaactgaaagagacgcttacatttaagcttgaggacatttcaacctgataggctcatgtcaaaccaaccgttgaaacaattccgaaattaagtgattaccagctagagtgacagccaaaagcaagctcaacattgcaatggggaaattgcgattagggaaatcttgcccgtgattgcaatttcggaacaaaattttcaaaattttgcctccccccccaccggcaagcatatatctcacccgaaatttctccttttttcatgtttttgtgaatttggtcaaagtttattctaaatcattcaaaattcgtcaatttttcaaataaattcagtgattttggttctttcgccccctccccccacggaaaaaaccccaatttctagaatgcaaaccctgaatattgcagtaaaactacagtgaaatacttggtgcacaaatgtcattacgggtggcaccgcttcaggttttttttttcttttgcaaaaatttgagagcattacatcacctatggcaattgtagattgatgcatccttccgctgcttgtactcatggttctgttgaaccttagcttgctactgcttacaattgagcaaagcatacctcatccaagcttgctatcttctttaactcgagagcacttaaattagtggtattccctacggtgtttgccagtaaattagaattagttaactcaaacagtacatgatatatagtgaagaaatcacaagcttaaaagctgttacataccatcgatctgtataaattaatttcagagatatacaattagcaattaactggcagcggcataacagctttgcaaaagaagcgaacatgatgtgtattatttacttgtcactgcaagcaatggtgacgtaaagcttcctgcattaccgggccgagctgcaaaggtgagtcgtgataaactttattacattcagatcacaaatgttgattaaaatattttttttgagcattcaatcgatccagagtactacctgatgtagatcgaaccactatacatgaatatttgtcagaaccactatcaatgtttgtcgttgatgaaatcccactgatggatctgagcaaccaaaacatcacatcagcatttgcatgttcctagcaaggccgaggaaccaatcatgagtttgttctgcgtattgtattcatgcagaacatatgcgccaagcagaacctgaacccggacaggtcgccttcaatctcactcaaaatttgtaaagctagaaggaacaagaaaagggattgcgatgaacaagagttgtagccaatcgttgtacttacaggacagatcggtggaggaagaccttgggggtgcatgtagcgacgcaactgctcgcttgcggcggcaggaaagggaccacttgcgttccggtatttgcacgacgagcgcggccgcaacggcgaattgcctctcgctcgtggcggcaccaggggctccgacctcgccttcgtgtatcggtgtgcgactaaggatgaccgagctgcggtggagtgtacggtgaggcgctggagtggaggaaggctctcgccggcgcaagtggaggatgttggatcggttgagtgtattcaagcgctggcgggggcaggccgcggttggggaagacctcgacttcgtcgggggcagcggtggacttcggcggccaccacggatggggaagaactcggctccagcggcaactggggacgacgtcggctccggggaagaccacggctccggcggtggctggggatgacctaatctccggcgtgggcagcgggggtggcagcggaaggggacgacctcgttgccccgtcgcgaggaggagggaggatgcgcacggagcgaggagacggcggggattcgtgggtgtggaggagaagcgaggaggcgcggggattcgccgggcggcgaggaggagcgaggaggcagcggcgaggaggagcgaggaggcgggggcgattttgggggcgaagttgtcgcggcggggaggagcgagggggcggaggaggcggtggggatttgtgcggcgtagtcatcgcgtgatttctgaataggtggaatcgctcatcgctgcgcacagttaggaggatagcggacgtatgagattaaatcagatgacggatggacggtagagatttgattcgggtgatttccccagtaggattggagaggtacagctcctcttttttatattagtatatagatatagatatagaaattatactatgtataccaagaagggagggctagtagaatcaaggatgtagagcttttgtatttgtataggagtcttgacttagtctgcatcttagttgaaccattaatattgttacctgcacaatgttacgttggattggatttctcttaatttgattcactagcaaattgcatgtgccttgcacgggaaaaactaacttatgacagacattatataatttggattaactatttcttgtacacttaatacaattttttttgctgtgtcggtagtgaaggagcatcccgaccaattttgttagggtataaattgcatcttgggccgagtttagttaaaaactttttcttcaaacttctaatttttttatcacattaaaatttttctacacacacaaacttttaactttttcgtcacatcgttttaatttcgtcaaaactttcaattttaatgtgaactaaacacacaccctggaccatctttttttacctttgttccaagttagacttgggtaggacagttttcactagtctcgactagggaagtttgcataatatttcactttagaccagttcttctctatcctctgccattgcggtcctcaacgactttgcgcagctcctgacctgtcttcctggaactttgctcctccgccccagctccgttcattcccgagcttgaaagtccaaacgattatctccgtcagttcgcttgctccatgtcaccttcacccttgacatcccactcgtgcgacaagcacgagagagagaggatgaagaacttttgcctgagcaactcgaaatggccaacttctgctgctcttgcatcctctgcgtgggcggataccgaggcaaacgatctagttgacgcgcggcggcgtaaacctcggcgcactcgcggccaaagcttacatccaccatcttccgtgcgatctggtgcatgttcgcaactgaccctggcgaaagctcatcgatcaccacatcctagtctatcaccggcttggcaattgggatcggcttgccgccgtaggccgtagccttcctcatcaccaatcctgtggtcttgggctggttgcattgcttctacctaaaagtagtactctaggaggcaagcagaggagagaatgggccggcggcggctcgacgctcattggcgctcctgcagcccatggaagacgattaggagaaggaataagttcactttacatcccttaatttgttgccgagtttaaaattcatcccaaattgcaataccacatacgatgtgcccctcaacttcaaacaatacaaataaatttcaaggcggtttggatgacggttttggctgacatagcacctacgtgacaagtttgacttggtcctcctacgtggccgtgacgtgtcactaaaagcaaaaatataaaaattaattaattttcttagaactgtggggcccacatgaattcttttcttattctttctccacttagcttagtatttatttaatgagggaaacttagttctttcttctgtttgtcacctaccttttgaatcacttaacccctacatagactttgatatatacaagtaatatatagctattagcatagtactctcttatcatatcttccattgggattaaataaatacgatatattggaatactctcgagtgaaatgctacaatggtatatccgtgcgcttgcggattatatctgtgacactgatttcacgtagaaggcttgaaggagggagaggatgagagtgaagatctacttgtctctcgtgccaacctggtgatgagatccaagatccaagatactccctccatctatttttgatagtcatatttccaaatctgaaaaatttatttttgataggcatatttcaatccaacaatctatcctcttaatgactttattagatttaatgcgtgactctccattcttccacacatgattggctacataggcattgagaaatgtaaatattaatgaatcacttgcttacgagaaatgactagtagcatgtttaaatggatgataagtagaattatttatccttagtctgtgtgtcaagatgaaatatgactatcaaaaatagatggagggttccctgcaaaaaaaaaatggagggagtacatgttaaggactgagctaagagaaggtgaggaaggaagacctcatagacaatgcctctagggaggtcgtgccaccaatgcacaccaccatcgtccatctaaattctttacaactcctcatttcctatgttccaaacaaacgaaaaccatcacatatttttcttatgtctttcattactctattttgcatatacaatcatctcatagggattcctatattttcctataattttctccattcgtaaggggttataagggctcgaaaagcgcatttggaaatagctgattagctacacctgaaacatgggcgcatctgattaattcagtattaattattaaaaccatcaaattattttattttttcaaaacaactaattatataggatatgtttggggagtttttacggtccaagatcttcgtccatattctaagtagttctagaatctagaaaataaattctctagaatatcaaaagctgggtaccaaccagctcattctcagaatattaaactcccccaaatagaccaatagaaagtttgaaaaatgtgctaacagaaatcaatgaagtagtcaagctgaaacttttaggctgtgttcaagaggacgggttacgacacgtacaatgaagcactcattagcatataattaattaagtattaacttaaaaatggattaatattatttttaaaaataatttccctagagaacttttacaaaagacatatcacttagtagtttggaaagcgtacacgtggaaaatgagagagataagttgaaaaagtaaatagaagaacaggccataaaggtatacagacctacatgtagagtaaataaggccgtgtttagatctaaagtttttcttcaaactttcaatttttccatcacatcaaaacttttctacacacaaacttttaacttttctatcacatcggtccaattttaaccaaacttttaattctggtgtaaactaaacacattacatttagcctagctataccagattaccagtacatgaaaataaacttaaaaaatacgctctcaatgtccaactaataatacgtgtagacgaaaaaaagagccacattccctcgaaagaaagaaagagaaaaagagccacatgtaaaacactccggaggggagattaggtgagcagtccaagtgtctgcgcgtcctgtcccagttagtcaaaaaggaggaagcagtaccgctgctttcagttcctaccacacacacccccatcctcaccgatctctctaaacccaaatacgcaacaaatactcaatcgtcacatcttaaaaaacaaagaaaaaggaagagagagagagagggaaaacaaaaaagaaaagaaaaatcaattcccaaccttgctgctacaaatgcctcaggcttagcaactcgacctcctccccccttctccccttcctcccttctttgacttcccctttcctcctccgtgcgcacgctctcctgattcatacagcatttcgtcggggatgacgtcgacggcgtactcccggccgtcgaagctgccgggcggcggcaacggcagcgaccgcaggctgccgccgcggctgatgaggggcctcaccaccaagatcgagcccaagaagctcggcgtcggcctcctcgccggctgctgcctcgcgctcctcacctacgtctcccttgccaagctcttcgcaatctactcccctgtgttcggtgcgtgctcccctaatcccgatccgccctaggagcttacttttggttaaatcccctcccgcgttgtctctcgaatccaatccattttgatttagtctaatgggagctgttttgaatccgttttcagccagcacagccaacacatccgctctgatgcagaactcgccgccatcctcgccggagacgggacccattccgccccaagaaactgcagctggcgccggaaacaatgacagcactgtggaccccgtcgatctccctgaggacaagtcgctggtggaggcgcagcctcaagaacccggcttcccctcggcggaatctcaggagcctggcttgccggcggcgctctcgaggaaggaggatgatgcggagagggcggcggcggcggcggcctcggagataaagcaatgtaaggaaatcttgcctctttcttccgctcccttttatttgcgcacctttactggaaggcagagcaagctacagtagagcaagtccccagttgttgttgagcgcaagcaagcaatcaatctcgtttggatttggtagagacgcacgagatctgggcggtgttttattggggatttgatggtaattcagtctcgttggtttggttaattcagccgagaagaagaacggcgtggcggcgggtggtgataccaagataaagtgcgacgagaacggcgtggacgagggcttcccgtacgcgcggccgtcggtttgcgagctgtacggcgacgtccgcgtcagccccaagcagaagaccatttacgtcgtgaacccgtcgggcgccggcggcttcgacgagaacggcgagaagcggctccggccctacgcccgcaaggacgatttcctcctcccgggcgtggtggaggtgactatcaagtccgtgccctccgaggcggcggcccccaagtgcacgaagcagcacgccgtccccgccgtggtgttctccgtggccgggtacacggacaacttcttccacgacatgaccgatgccatgatcccgctattcctgacgacggcgcacctcaagggcgaggtccagatcctcatcaccaactacaagccgtggtgggtgcagaagtacacgccgctgctccgcaagctgtccaactacgacgtcatcaacttcgacgaggacgccggcgtgcactgcttcccgcaggggtacctcggtctgtaccgcgaccgcgacctcatcatctccccgcacccgacccgcaacccgcgcaactacaccatggtggactacaaccgcttcctccgcgacgctctggagctccggcgcgaccgcccgtcggtgctgggcgaggagcccgggatgcggccgcggatgctgatcatctcccgcgccggcacgcgcaagctgctgaacctcgaggaggtggccgcggccgcgacggagcttggtttcaacgtgacggtggcggaggccggtgctgacgtgcccgcgttcgcggcgctggtgaactcggcggacgtgctgctggccgtgcacggcgccgggctgacgaaccagatcttcctcccggcggaggccgtggtggtgcagatcgtgccgtgggggaacatggactggatggcgaccaacttttacgggcagccggcgagggacatgcagctccggtacgtggagtactacgtcggcgaggaggagacgagcctgaagcacaactactcgcgagatcacatggtgttcaaggaccccaaggcgctccacgcacagggatggcagacactcgccgcgactatcatgaagcaggacgtcgaggtcaacctcaccaggttccggccaatcctgctgcaggcgctcgacaggctgcagcagtaactcgtctatcccaataatcgcaggcagctcatggcacacatcaatgtatatgccgggacgagacgacacgacgaggaacaagaacggatactagtatattgtactgctgcttgaaagagatgatgatgatcttaaccggaggagaaccatcagttgttggcgaggcggtggaagcttttcgcatattggtaattggttgggttgtccattttgggtttgtaacaatttgcataggcattacacaccaaagatgttcgatttttttgttcttcttacacttcttcacttcgccagcccattcaacactatacattcttttctactaatacggagccaaactaaactatggtgtttaattattaaaacatcaaattggtcacccaaacaaaacaaagtggcgatgaaagaaagatccaaatctgagagttgtttcagacatgtgcaatctcctctaataaattgaacaaatggttgttaaacgaatctgcatcccgagcgttgaaggggcttagctggtgcggacgtgccagcatggaagtgttcgtggagaaggaaaatggattcgatgctctgtccaacactggtgaactgctgtatatgcacccgcctgctgcctgctttcagcttaaggaaaagatcactaataattgaaaagcacaggctaactaaccgggctctgcaagaaagctgtgacaggtaagtcgtaactagttttgggcaatcgaataccttctctcttttcttctcttttcttgagaggcagacagggagatatagagaaagaccttctccttttatctttattttttcttttttcctagaaccttcttgctgtcttttggtagggaaagagactagaaaatggaacgatgatgaatgcatgaatttcccataagaaattggcaagctagcctcaccttttcagtatcgtatgcatcacgcgaaaagattaatcacaagagggtgacccggcaacgagaagaggagatcagccaagacaatcttgtagccgttagtatgaaacacacgattaatcacaagccacgccatgctcttcatgccgtcacttggatggacgcatgcaaactaagtcccccttttatttatattaggaaaccataacaaatttagaggattttaattctacagaaaaaattcttacgaaaatacttgaaacaaaatattgattcatatactgaggaaagttaatatgagctccaacctttcaaaaaaaaaaatagtcattcattcttatcgattcatgtatttttctaccgtttattcgaacaataatttatgcatcttttttgtgttttgtacttatgtttctattaaaatcaagtgtattttttattctttgcttttttgggtcctgcaatagcccttatatgtaaaattgtttggagcacgtgtgtttgagtagtcatatttctcacgaacggagtggtagatcattatgctacattttttttcctccagaaacatatgtgcagatgctggcacatgtatcgggcataaatttatctggaatcaactcaggactcaaccagtatgtcagtgatgccgatttattggcggaattcgtagactttgtgtgcccttgatctggccactttgcgccagtcactacaaggtcaaccgtagctatcccataacctcttcccttagtttcctactctccataacataatcatgttcgtgtagacgtacactactgtttgtatcagatcgtgacgtttctggatgtgtgtgcgcgcgtgtgtacacaagtttctggatgtgtgtgcgcgcgtgtgtacacaaactagaaatacttacatttttttccttttcttcgccattacaaattcacaattagaatataagtattttagtttgtgcagtatagatcaaaggttaatataaaaaaacttcagcaccgctccaaaaataagggatggatggcgtgagaggaaggtgggataagattaggagaaatttcaagtggagaaaattgatgggacaactagtattatgaataatgttagaaatcttaagggtccctttgaattggaggaaaaacatagtaattttaggccccctttgattcagaattttagaggattttattcctataggaatttttcctacaaagccctttgaatcaaaggaatgaatcctatggaatcctatgaaatttctatggaatgcctcttcccatacaagttttagatgaattttaacaaggggtagtacctcatggaagaaatcctttgaggttcaatcaaacggtcattcctatgtttttcctgtattttgcaaatcctctgttttacatttacattcctgtcagaatcctatgtttttcctattcctccgttttttcattcctgtgattcaaaggggccctaggatttcaatcctataggaaaatttcctatgaagccctttgaaacaaaggattgaatcttatccaatcctttgaaattcctatagaatggacaattctatagagattttggaggaaatttagcaagagctttaatctcttggtaacttttctttaagtctatctctctcatccaattcctatgtttttcctgcggttcaatcaaacggtcattcctatgtttttcctgcgttttgcaattctctgttttacattcctatcaaaatcctatgttttttctattgttatgttttctcaatcttacgattcaaatgggcccttaatgtttaaaaattcaagattcaaatgctaaaacatctagtattttcaaagagaattctgtaaaagaaataggaaacgttgatggagtgtaggagaatgaagtaaaggcatgcccaacctttggcacgaagaatgctgtgtcattcttgcacaagggggaaacgaaaatcatgccactattgttggtccagagagaaagcatgcaagaaacgtctttgctttgaacatacgtgctgtctgcccaaggcatgccaagtactctggaatttatgaaatcctgcagctcacaaatcttttacgaaatacagctcgcaattttttttagtgaaatccagcaaacaatttacatggcccgaacaacaacggcattgtgttttgtttgaaatagaatggcaaaaattaggtgaaaatgttacaagaagacggttggtttacattggcatttctggaccaacggcaatttgttcgttactgcctcgttttcagagaaatctgatcagctctcgcctctcggcttcagagaagctcccttgctacaaaccaaaccaaaccccgtccagcccccccccnanccccccaaaagtttctgttcgaagtaggtacaacaaataaaaacaactatggtttccatgtcacagtcaggtcagtagcagtttggtaggcctaaaaattaatgcgcacatttgacactgctgctgcaacttggacctctatgtttcccgttcatttctccaagaaaagtcggataaaaaaaaatttcgtgacacgttttttaaactgcgaaaattttctatatgaaagttgctttaaaatatcatattaatctattttttaaatatgtaataattaaaactcaatcaatcaaacgttaatatcaacttgttttacgtaaaataacttaatcttcatattcatcttcatcttcagtcctagatttctattactgagtatactagtactactacaaaataaagcttgattaatcaagtactagtactccctctgtctcattttaagtgcagtcgtggatttccgtacccaacgtttgacccatccgttttatttaaaaaatttataaaataaattttaaaaaataagtcacatataaagtactatttattttttatcatctaataacaacaaaaatacactaactataaaaaattttaaataagactaacggttaaacgttaggtacagaaacatttaaagtgggatggagggagtaggtgtgcacaaggcttggtcgctgtcatgtacgttggccacgaacactgacgcaacaagaaattagatcaatttgttttgcttgtgcctcactccataaatgatggttatgaacaaaaaaaaaacaaaatttaaggggattataaacgtgtagtatcggaaacatggcccctttaggatttagccttgtcaagtggagatgaacgtagatagttactaattacgcctaaatttgataccaagattcgaaatatgaaaacattgtcaaaattttgaaggcattgggtttccttcacggggccagtataactgtcgcctatggactagtttgaccgatatgttgggcaggtctaaccagcggcatgtgaccgccgatcagaccgacatagtttgactccgagctgttttcgtcgggtcttgggcttgcttgctcaggaatgtatgcttcgggttttcattggtttctaccctgagttagatgtcgaggagaacctatagaaggcaagatcaaccccttaacaagggctaagcctggtttgattaaaaacccctcaacaatctctcaatcccgacacaatcaaatcgttcttttacctttattttttagccacattttccaatttaccctagttcagtccatctttatcgatttgcatcgtaaattgttcacctttgctgctagagtgcaattatccctttgtaattaagtttgccccgtaaacctttcattcgcccatgagacgggtggttatcttcaattcgatctaaatcagccttgtggctggttttgatacctaaatcggctctgctagcctgtttaatctttaaaatccaccctgaattccactcgaaactcaacgctgttgttggtttgatctttcggtgagttcagataactaagatttggaagaaacattaacgacctgactacaactgtacgagatgttgtgttgcgcctttgcgatcgatacacctctccatgggttgttgatcttgccggtgcagatcaaccttattcctgcaaacaaatcgaagaaacaagcaataacaagataaaagtaatctgaattgcagatagaaatgaatacacacggtaagttggtgtttcgaatacaagcacacgaacggtctagcagacacgcgcactgcaagaaagtagcaatggctaaactttcatctaaacaaaacccaagaaaccctaaaggggtacctagctatttttaacggtgggaggacaacctaggagtccctagggtcatgctccacctggttgaggcgcaccccacatggctcggggtcccaaacgaagttacatgcccattggtccaatataggtgaggcaacaccttgtttctgcatttgtgtccctctgggaaggaatttcgcactgaggttggatcaattggaaagaggactctgagagctttccatcaagtactcacgggctgaaaacgaagctcgtatactgatttggcggccgtttgagcaatgtcgcagttggccgaatcagattccagcagttggtcaacttgatcttgatgtgagcgacggttgtatcaatagtagtcatggtcacatcatactccccttcttcacggaaaaccctcctctgtttttccatgtggtgctcttcacatagtcgattcaaaacaacctgtttcatccaatcaaaactagagaaactcgaagtagtgcgattaacaataacatgtttctctaaatccgaatagatgaaaactctaagcaccaaatatatttctctatcattatattcgtcaaaggtatgaaaaatagcattagttggacatgctaatcagacttagcaaataatttctccttcaaattatcgagctcacaaaaatcatcaaactgaacatagcgcaaagtatttaaagaagatagcaattcatgtgaataacatgtgaataacatgcttaaaatcagcgcagtaagatataacagtagaaatagcatgtccattcactagttgcggcatagatataagtgaagcattatcacacaactcttgtttatcacaataaacaacaagtaattcaacttgtgacaaaggcatctcagcaattggttaatggttgctctattatagcattaaaagtgaacatgtgtagcttagctcgagaatacccaccttcatttatttcagcaccatttaatttaccttacaaactttcttcagacatcacaggtgcttcaagcttctcatccgtcttctcaggaacatcattcttcttcttttgttgaatgatcggaactccctgcaaaacgttagtaacaggagacacaaaagtttgctcctcccatgtttgcatgtcatcattgcacaaggatatatgagattcagaaacatgaaataaatcacattgttcatgctttttcgcatttgatatgatctgactctcaatgctgcgagaaagcatgaataggtgtccgatatgattatatgtcacattagtaagcatgagctgaattttagaattaagccccatgaaaaatctgcacattgtgttttcattgcactcttttagatcactgtagatgatacaaactttaaatttatggatatactccctaacagttctatcaccctgtttcagatgttctaatttctcacaaagagtacttttctaataagaactcacaaaacgctttctcatcatgtttttgcattcatcccaagtttcaggtttgttactacttcctccgtttcataatataagtcattctagcattttccacatccatatgga

SEQ ID NO: 7825 - DNA, 26572 bp, Oryza sativa
ttccctcgtcgcaatacttttttagttttcgagctcgaattggggtaaaggcttttgagcttttttttatgtcatgttttcgagttaaggcaaaaccttgttcgaaaaccgccgtcccccttacgtttcaaagaagtgacgaggtcgaacatgtttccctcatcgcaactactttttagttttcgagctcgaatttgggtaaatgctttcgagcttctttttatgtcgtgttttcgagctaaggcaaaaccttgttcgaaaaccgccgtcccccttacgtttcaaaggagtgacgaggtcgaacgtgtttccctcatcgcaattactttttagttttcgagctcgaatttgggtaaatgctttcgagcttttttttatgtcgtgttttcgagctaaggcaaaaccttggtcgaaaaccgccgtcccccttacgtttcaaaggagtgacgaggtcgaacgtgtttccctcgtcgcaattactatttagttttcgagctcgaatttgggtaaatactttcgagcttttttttatgtcgtgttttcgagctaaggcaaaaccttgttcgaaaaacgccgtcccccttacgtttcaaaggagtgacgaggtcgaacgtgtttccctcgtcacaattactttttagttttcgagctcgaatttgggtaaatgctttcgagcttccttttatgtcgtgttttgtcacgcccggaaattcactaataatttccaaactaatttgtgcataaaatcctcgtccagaaatcagccgaggtacacaaactgacaatttaatatacaaatccatcataataataacgttacatacttacaaaagaaaagaaaaacagcagcggaattaacggtctagcgatggcttcagctccactcccacaggcaactcaactggggtataagccaaacgtcttctccttctggatcccttttcttcaactgaggttgattgattattgcaagaatgagcatatgatatactcaacaagccacacagcaaatatgcaagtgcacaaggataccaaaggatggcataatatagtctcatttgcgaaagcagcatttagcaaagagttaagagtagtaaaacagtagagtaattaatcagaaattttaatcaacactgaacaacacacccatgctgcacaggcccaaccatcctgaacaaccatacccggctgtacagatctaactccaaaccaggagctaaacaaattattaccagttatagcatcaataattattgtgagaggcgtgagactaatcacgaaaaacattgctcaactcgcccataaccgcgggcacgactattcgaatagttttactctagccagaggtgtaccactgtacctacaagacacagcctcaacatcatgtctaccatgcgtcgcgatactggaaagtacccgaatagaggctgtgacaataccctctgcacaacacaactcaccacagtacaccattcctggatcataatcaccccttataaaacaaggcatggactccccagcgacccccgtgggcttatctccgccacttctcagtctggtgctccacaatgaaccatgctatacaaaaggtaaagccgttgcccacgctggcttgtggttggcacggttaatgtttcacaacagtagctcgcgaaccggtccttaattgccatgagcacgaccttcaaaaccatgtgctcacaacccaccattaatcatattttaattaccaattaattatcataacacgattaaccatcgtgagctaccattaaatataaccataaataataatgtagtatatatgattcatcccattagtgagctaatgtttctaagcatggctaagcaattatatatataacatttagctgaaccaaaccaatacataaggttcaagctaatcaatttattacccaaggtatcaaggaatagggcattcaatgcagattggccataacaaaggaataggttcacaccacccagtgacattcgaaaataaatgcacagttaaaataaatagagaatttaaatataggatcaacatgctcaaatgattgtgtttaggatctgtgtgacttgccttgcaataatcggtctcaattaatcttctgaacactcccgacgcactcacgaaccttcgcaatgacggaaacgacaagctaacacgcaaaacgaggaaaaagactaataaaaaccaaataaacagtacaaagatcatgattttagatgaatttagcaacttgaaccactcaaaaccgagttacgatgatttagttatgaatttccgaagatttaatctattaaaaaaaactgaaaaagaggagatgatgacgtcatgacgtcatcgacggcagccacggcacgggtggcgacctcgccggagctagggtggtcggccggacttttggaggacacatacgcgtagaggacaacattgcgaactcaatggtgctcaccgatacgacaaacgacgacggacgacggccggcggagaggaagagcggcggcgacgacttcggtcggcggtggcgccggagctgcggtggtcggcggcttcgggggtcaggcggccgggcttctccaccctcccgcgcacctaacggtggtgacggcgaccggcggcgacgacggaggcggcggcgcgacgcggatggaactcggccggcgacgatggcggggtggagcacgtggcggcggcgctacgaggcacgggagatcacgggagagggggcaaacgaaagaggaggactagggggtcctatttatagccttgggttgaatagatcggactcctcccgcaagaaatcgctccgggaaatcaaaaactcggttttggagataaactcaaaacgagttcgattcggataaaatactcaacgatttgctccgatttttgggggtaaggatagaggaagatgagaggataaaaacccctcaaaaaaaaacggaagaaaaggggagagattggggcggattcggcgcggcaaggcggctcggcatggcagccgactcggctcggctggcggctggagcttgaagacgcactgtagcgacagggaggaaaagtagacttcttgccgggcttttcttttctcagcctgattagaagagggagtaaaaccggactttggctgagagaagaagagaggatgcaggctcgggttgggccggcggaagagagaggaaggaaaggaatgggccgattcagcctaagacaagggagaggagaattttattacttttccaattaaaataatcacttaaatgatctttgaattgttaaaaatacttccaatgctcaaataatttcaagaaaaatcctgaaaatacttggacactcaaagtaaataaaaaattataattagaccatttaattattaattaaatatgtgggtaattactgaaatgttctttgtatgattaaaattaggaattgagctccgaaaaaatccgagataattccaaagagtataattaaccatgaagaatttaataaaaattaaatccatccatcctttatatttaggaaattttatttcccacatttaacttcacttgaaaattaatgaacatttaatataaattctaataataatttattaaatactttaaaaatcctaaaacgaaattcaggatgtgacatgttttcgagctaaggcaaaaccttgttcgaaaaccgccgtcccccttacgtttcaaaggagtgacgaggtcgaaagtgtttccctcgtcgcaattactttttagttttcgagctcgaatttgggtaaatgctttcgagcttttttttatgtcctgttttcgagctaaggcaaaaaattgctcgaaaaccaccgtcccccttacttttcaaaggagtgacgagctcggtaccccgaacgtgtttccctcgttgcaattactttttagttttcgagctcgaatttgggtaaatgctttcgagcttttttttatgtcatgttttcgagctaaggcaaaaccttgttcgaaaaccgccgtcccccttacgtttcaatggagtgacgaggtcgaacgtgtttccctcgtcgcaattactttttagttttcgagctcgaatttgggtaaatgctttcgagcttttttttatgtcgtgttttcgagctaaggcaaaaccttgttcgaaaaccgccgtcccccttacgtttcaaaggagtgacgaggtcgaacgtgtttcctcgtcgcaattaatttttagttttcgagctcgaatttgggtaaatgctttcgagctttttttttatgtcgatcaacataagcactgccaagtacctgtgaagaacgaacgagtacgacagcaattctcggatgggtgtagacctagccaattaagttatctagcaaaggtggtacctctctctatagtggttctatatttaagtccttgcacaggaggcaaacttatgccgagtagggcaatggtgatatttactgaggtacaagtaaatatttgatataaactgtgatatcacgaattatttgtaaaccctgattgcgatgacatggtgtcatacaatcagtcctctctaaagaccccgggaatgccagaactcctctcgctgctgataacatacgttcagagtgcatggggactagagttcatggaacaggtaccactgatgttagaaaccgaaaagctgggccgtgactaagctaatgaatattggcatgtcatggattgcgggtaaagcatatatctactgtagtatgaatattcttgaaactattcgaatacctatgctcacggatattgagcatagggactaactatggcatcttggttagaaacataattcaagattttattaaatactgttgcattccaaatattacaggctttctacttctataatctcaactttctgcaagtaaacctagccctactcaattacttctatttcatgaattcatatttgatataatagcttgctgagtacattgtactcacctttactttaaccccctctttcagaatcaatttagagtttttgccgaagccgggagttcaatcatataatcatataagttagtctcattccaacttagctcccaagtctagcataggtagatggtttaattctatagcaaaacattagggttgggtcatcctatagcttctgctatgttagttagccacaagcttgtaaataccctattatttatgtaaagaagtcaccttcggagccttattcaaatgtatgcaatgaagatccagattgttgaacctgtaccaatctactgatcttgggcttgatacagtctaaacatgtcagtttccgaattattagttttgggacccgacaaaatattattacttttttctacagaattagtcaaacatagagtattttgactttgaccaaagtcaaaatgtcttataacctaaaatggagggagtaattattatttaatgaattaaataaatggtaaatcatagtactatattggatttagagaaataataaggacgcagactgaatcagcgtttgtgggtatcaacgtccacaaggggacgttgttcttgcccacgtccatggtatctggtgcaacctgttatgaaacctatcttattgtggacgaattaaattatgagtgggaagcttactacagaagaaagctaacaccagaagctagcttacagaagaagctagcttacggcgcaagccagcttacagaggaagccagcttacaggagaagctagcttacggcgtaagctggcttacgacacaagccagaaggttcaaggcttacgatgcaagcctctaccctcctccgcctataaatagggcccagaaggtccaaggcaaggacaaccgatcttcggtctcctgcttctcctcttgtagcttgtactcaaatccagaagaaataaagcttccactcgcttatattttctgtgttccacagctctgtgtttatctgcttgtgtgctgatcagtagaataaactggtttctcaacacgttatcagcacgagactctatcgagctaaaaaggtaaaccagtgagaaatcagtttctactgatcatcttgctcttgatatgcaaattatccttctgctatagttgaaataagcagaagaacatggtacctgaagtaccatcctccgatatcctctcagcaatacacgataacatgatggctgctctgccgccattatcgttcaattgctaaagttgatacatcctctcagcaacacccagtaacatgatggcggctctgccaccattaccgtccaaaggcttgagatggtacatccccttagcactattcgataacacgatggtggctctgctgccgttatcgcccaaatgctagaggtgatgtaggtgcctgaagcaccggcatggcaacttaatggacggctctgccgccgttgccaccaaatatcggaggcaaacgaaccttctgcacgaccctgaagtgtcgttatggatgtcctttgttttatggatatcacccatatgggcccttgacgcctctaaggtcagctctgccaccatgaagcgtgggcacaatatgcatgaagtgcccatgaatgctcttcattttgttttacatgcttactttgttgtttgcatgactttcataacatttattttattgttatgaaattgatttcctagcatgattgataatatttaatcaagcaatctgtaatcctgaagattacttaagttaatttgctaggaaagattctatgggaaattgtgtgataatcttgaagattacacacactagtaatcctgaagattacgcatgaccaattcatgttgaccctgcacatcgtatttacctgtcgtaaataccaaatgatgttgcaggacatgtcggacatagcaaagaaggaattcgccgagcttgccttggatggtagtaactacctcacttgggcattggacgttgagattaaactcgactccatgggtctcgatcatactattgtgctgcccgaagttggcactgtggagtctacgaaggccgagaaagcaaaggcattgcatttcttgcgccaccatctttacctagacctgaagtctgagtatatgatcgagaaagatccactggtattatggcaatccctgaaggatcgctttgaccagcaagggtcaattgtgctcccacaggcacaacatgactggatcaccctacgcttccaagactacaagtctgtggcggcgtataactctgcccaccataggatcatttctcagttgcatttatgtggcctgaagatcactgacgctgagatgatcgagaaaaccttatctacctttcatcccaacaacatagtgctgcaacagcaatacaggaactcaaagtacccgaagtactctgatcttatctcagtcctgttagttgcagaaaggcagaatgaggttcttctaaagaatcattctgctcgacccactaggtctatggtagtgcctgaagcacaagccaatgttgttggaaactcacatggccgtaaaagaggccatggtgagaagaaagggaaaggtaagggaagtatcatattcaagggcaagagtaagggtaacccagaggtaaaggcgaactcaagaaggttacaggtgaatcatctggggtaatgcaggataactgctatagatgtggaggcagagggcattggtcccgtaactgccatgtccccaagcacctggttgagctgtaccaacaaagcatgaatgagaaaaagagccaacatgagtcccacttcaccattgagcctgaagctcagattgaaaagcatgatgacatgcttatcaatgttaaggatggtggggacatccgtatggacgatgattgagacaaccttcttgaaaaagatgatgacatatttggagacctgaagtaatctcctatatgtcagtcatatgcagtgttcggcatgagtagcacatgtagaactttggtcatgaataatgctcctgaagagcacgcttagtcttttactgggcctgaagtccttgtaatgtttcccttaatagaataaacttactccatgtttaatcccttctttctatataattaagacccaaagctgatttgtggttaagccacgtcacctgtaaaatctcagccattcaatctaatctgcgatctaatctgggcgctcggtcttctcctttctcagccgccgccagatgcgcgctctttctccgcccagcatgcgcccacgcaagttgcactgtgggcccgccgtagatgcggattcccctcgcccaccgcgctcgcttctcttccacccccgtgcgtgtgcgcgagatgcggtgtggtcgattcccctcccccagcggctgcttcccccagcacgtgcaggcccaccagccggcttgctcgcttctcctccccgtgtcgcattgcctccgccgtcccccacgcgccagccacaccgcagcgttgcgcccctgtagccctagcctggcacggctgcaggtatcgcgcgtttgaagagccctagcaccatgccagcttcaaacgccccctccctcatcctcttcagcattagagacggtattcacttcctcccttaatcacccgcatttacaataaaaaccgccaaattaattgggtgaggaggcgtagtggttaatacaagttatgtgctctactccctgcaacaattttactcaagatcgtcgtatcgcctactcatggccctgtataaaacggccggcctctccagttctacatccgtcatggtctctctttgaattcctctcctctcatattcacaacaggcaagttaaatctggctctcagaaccataaacagatattcggatcatgcgagtgtgagaatgtcttgctgtttattctttgcagttgcatatgttgaggctgctatgataattttcttcttcttgatgcagcgttcacattgggaatttgggttaccgtaccatatcctgcacattgcttcttcttcagtatcaaggttggtccactcccactgtgtttcttccgttacttctgcatcacctttttgcttacatacatatatattatattgctgaaaatagttaacccccaatttttattgatccaataatggttaatggtttatggatatgtatttgggctatgtgcgaagggaatgaattcaggtacgtatctgatagtttcagagatttgatggttacgacttaggagcatggtgaaatctgaatcactatttttttttctaaacaagctgctctaggtttgttgacccccctgttcacaagtttgggttgcttagtgcagattgcaattgctgtcaggcaatgctaatttcagcttgaagttttgtttataactaatggccaagtaaagttgttggttgctgaattttcacactaatctttaagttttacatggttagataacatatacatgctcatctctttgttttgaatcatattgagtcaaataaatcttatgtttttggtgcttcctgtgtcatgagtgcaagtcactgaaacagctctgagaaattaaagtttatggtggaataaacatgataaaggtgagcctttttctaaaatcatattagcatttcatgaacgattcgacaaaaccaatttctaggggtctaagatgtgtccggaattggtccttcaaaattgtttgtacttttctgtgggcatgattttataagacttagagttgtttggtctgatcgaattccttggcacatttcagtagctaagtgtaatttgttattacgtgctttactctaattgtgtcctaacaaaaaaacatgtaagagcatgaatggctaattgtttttcagttgaaggtgatgtatccatcaaagaacaaaacgtccttcggtgaccaactaaatgttaaaaatatgctggccctatctctcggaggtgcctcatagagttagagtgtgcatatgtgcctttatagggataagtgtgtgtgtatatgagtttgtatctttttgttgttgtccaattttttttcttgatcctttgacaacaagatacatgttttagggactgttaggtttcactgaattaaaagatcggaatttcacttaccccaaatcaaacactgaatttgaggaggcgtgcagtagactccaacctaacctgaagcaggagagaggaatagtaagcaataagcgagtgaacaaaatatgcacaagggtttaacatttccctttattaagcagagaagatatttaattgttgtactagattacgagtgtgtacgtactgttgaaacatttggtagcgagtatttaagtttgctatatcgattctctctttttctctctacctatggaattagtttattttacatgtagcatattatcttctcttaaaacatcatccatacgaatttcatccaaattatttttacaaaatcccgcagcaacgcgcggggtattcatctagtttcatttatgtttatgttccataaacatacttgggtgggtatcccatggcagaagaggatatatgtctactagacagtgccaccactaatacaatcttaagggaaactagatatttccacaccttaactaagaaaactggaaatattatgaccattgccggaagcaatgctcatatagtaggcaccggaagtgctactctagttctccctatgggtacccatatctttgtaaaggatgctctattgtatcctgattcaaagcgtaccctcttaagctttaaagatatccgtgcaaacggtttccatatagaaaccgagattgagcaagatgttgaatatcttctcataaccaaaatagatggatatcaaaagcaagtggtggaaaggctcccttcatcgccattgggtttgtactacacgtacataaaacccactgaggaatatgttgcgatgaaaaccatatttagaagcccagagtcatttagagtttggcatgacagactgggtcatcctgggttgggtatgatgaggagaatcatcaataattctactggccacaatgttgaaaccaaagacttccctaatcctgaagattttatttgccctgcttgtgcaaaagggaagttgatcattaggccatccctcctgaagattagggatgtgtcacctgttttcctggaaaggatacagggtgacatatgtggacctatccagcccctgtcaggcccgtttaggtatttcatggtactgattgatgcttttaccaggtggagccatgtggacctgttgtccataaggaaccatgctttttcaaagctaattgcccaaatcatcaggctaaaagctagcttccctgatagccgcgtacaatccattcaaatggataatgctggtgagttcaggtcgaaggcttttgatgattattgtttagccatgggcattaaggtagaatattcagtaccacatatccacactcaaaatagcctagctgagtccttgatcaagaggatcaagttgattgcacggccactgttgcaggattgtaggctgccaaccaattgttggggccatgctgtgttgcatgcagcaacactaattcaactcaggccaactacatatcatagtacatccccccttcagctagtgcgtggaaaagaaccaagtatttcccatctgcgtaaattcggctgtgcagtatatgtgccgatcccaccaccacagcgtacttctatgggaccccaccggaagttggggatatacgttggttatgagactttgtccataatcaagtatcttgagcctatgactggggatcttcataaggctcggtacgctgattgtatctttgatgaggaccatttcccagcattagggggagaaaggcatccagaagaatgccaagatataatatggaatgcaactgcgatacagtccttagatccacgcactagtgaagctgaactggaagttcagagaatcataaatttgcaaaatcttgcaaataagttgccagatgccttcactgattacaagggagtgacaaggtcgctatacctgcagtaaatgctccaaaaagagtagaggtaacccataaggttactgactatgctcttacctcccatcctaggaagagggggagacctctgggtgctcgggacaaggttccgcggagacgtccgcggagacaaggatctgagccacttgttccactcaaagaatcagttgaagaagctcaacctgaagttgagaaagccccataagtggcaactcaacctgaaggacactatcctgaagatggaggacccagtgccttacgcgtgcaccttggcactggaagatcggaacaccccaactcggtcgttatgggaaatcacgacaagttggaggaaataaatgaggagatttccactaactatgctgatacaggagagttacatcatagaaagaccactattgtcgacattcactttgcctcaaaggttgccgtcataatggatccggatccagaactaaagtccatgattgagtgctagaagcgctcagattgggacaaatggaaagcatcaatagaggcaaggatgcgctcgctttataaaagagaggtttttgggcctgcagtcccaacacctccaagaatcatccctgtaggatgcaaatgggtcttcctccggaagaggaatggccaggtggtgaggtataaagcgaggctagtggcacaagggttcacgcagagaccggtattgactatgatgaaacttactctcctgtgatgagtggaatcacgtttcgatacttgatctcaatggcaactaatataaacttggatatgcagttgatggatgtagtgactgcatacttgtatggatcactagattcagaaatttatatgagggtccctgaaggactcaagattctgaatccgaaaagaaattgcaacatgtatagtgttcgcctgcagcgatcattatacggattgaaacaatgatgattgtccctgtgtgttcataaagaaatccctgaatggattttgtatcatctcagtctatgtcgatgatcttaatatcattggcaccacagaggacattaaagaagcaatggcttatcttaagaccgagtttgagatgaaggacttggggaaaaccaagttctacttgggctgctgctcgagcatctccctgaaggagtgtttatgcaccagtctacctataccaagagggtccttggtaagttcaatatggataaatgtcatcctttgaaaacccccatggtggtccaatccctggaagcagataaggacccatttaaacccaaggaagatgatgaggaaatgttgggacccgaagttccctacttaagcgccattggagcactaatgtatctagccaattgcacgagacctgatattgcttttgcagttaatctattggctagatatagtgcaaccccaaacagaagacattggattggcgtcaaaactatcctcaagtaccttcgaggtactcaagatcttgggttgtggttcccgaagaaccaagatccatccatggtgggatatgtggatgctggctatatgtctgatcctcataatgccagatcccaaactgggtttgtatttctttgtggtaatactaccatttcctgacggtctataaagcagaccctggttgcaacgtcaaccaaccactcagaaataattgctctatatgaggccacacgagaatgtgtgtggcttaggcggatgatcggttacatccagaagtcatgtggcctaaatattgataacacccccaccattatctatgaggataatgctgcttgtgttgcacaagtacatatgggctatgtgaaaagcaatttcacaaagcatattgctcccaaattcttttatccccatgagctccagaagagcggggagataaatgtcctacaaactaagtcatgcgaaaatctcgcagatttatttacgaagtctctgccagcatcaaatttttacaaatatgttcgtggcattggcatgagacgacttagtgaattgcaaggatcagggggagcaaacaattaagagaatagcccatgattgtgatcctgaagaatcacaaacaagtcctgaagacttgaccaactgttgtactctttttcccttggtgagtttttttttcccattgggtttttctcacaaaaggtttttaacgaggcaacaggtgcaacacaatattcagagtgccatgtactcttttctcctaccattttttcccactgggtttttgggaggagattttgatgaggcatgtgcataattcaaattcgtccaaggggtagtgttatgaaacctatcttattgtggacgaattaaattatgagtgggaagcttactacagaagaaagcttacaccagaggccagcttacaggagaagctagcttacggcgtaagccggcttacgacgcaagccagaaggttcaaggcttacgatgcaagcctctaccctcctccgcctataaatagggcccagaaggtccaaggcgaggacaaccgatcttcagtctcctgcctctcctcttgtagcttgtactcaaatacagaagaaataaagcttccactcgcttatattttctatgttccacagctctgtgtttatctgcttgtgtgttgatcagtagaataaactggtttctcaacacaacccaccatactagcccgagccaaaagggaaccaaacatacatagcgagacaccgccgtggcgcgtcgtcgtcaatctctcgcagtatcgctcccctcgactcccaccgtttcagcttataagatgttttgactttggtgaaagtcaaactacttcaagtttgaccaagtttatagaaaaaaatagtaatattttcgaaccaagataaatttattataaaaatatatttaattactaatttaataaaactaatttggtaatgtaaatatttcaatatttgtctataaatttcgtcgcacttaaagcaatttaacttttgtcatggttacggataagtcatacctcctatcctacgacttatggaatatacgagtatggtataccttcacgtgcacgggttgtgtaacatcctgacaacaataaaaataactaaaatttcgaactttttaaaacttttgcatcatgctagatgttatggttgctattgcttgccaaactataaattgtcacaatgaaacattaaattaaagatgtacaatttgcaagaatacgctatctatcgattccataaatattatgcacaaggcagaaagctaaatgaaggaaaagttaattattagttcctccatttcacaatgtaagtcattctagcatttcccacattcatattgatgttaatgaatctagctagattgatgttaatgaatctagacatatatatctagctatattcattaatatcaatatgaatgtgggaaatgctagaatgacttacaatgtgaaacggagggagtaatttctattggataaattacaaatcaaatattaaatattcaaaccatgtttgattatttaacaaatggaaacagtaagattaaatcgaattcatctgaatccaatctcacatgaaataatgaccacctcattacactaatcccattataaaagagtgtttcgctagaatatttaaataaatatttaaaacactttatcaagtctctcagggcataaaattcattcatataaaataaacggtcgtgtaaagtaatggagcaacacaccatcactatgtctacttagattattttaataaactcctaagatatatcaacgcccccaaaattgtctaggctaatatttgggattaaacctaatttaaataatgcaatggaaatataattgtgccatcacaacttttgagtaaaatctagatttttggatattaaatgttaaattaggtttcctggcaaatttacagattaacccttcctttttcccttatcctttctcttctctttctttttcttttcctggcgcaactgttcatgggccgccaggtgctcgatcaagttgtggcccaaaccgactgagccagccacgcccgtgtctgcccacatccatcccgcacgcgcgcagccgtgcgccaacccaactccacccgcgccgcttctatgtgccgcgcctccctcccctcgcgcctcatccctccgcatccgcgctcgcgcccggacgccgcgcacgcgaccgaccatgccacctctgcaataataggcgctttgttttttgtgccggggaggagggttcccaacccctcctcccgaacacaactttagccgcgtcaacttccctaacctagaccgtagacagccatcgagtgcgccagccgccgattttatcctccatgccattctggcttatccctaagccaagccccataaaaaccccctttctctctgtcttttgccctcaaatacatttcatcgagcaccttctatgcatgatctcaccgctactagagaccaccattgaggggctccccggccggagctggaggttggaggaaatggaggcggagcgacgctgccgctgtcgccgttggggaggttggacgtcaaggaacgctgacgaacactttcgggcgccatcaacgctgtttgcctctgtgccgcgacacaccgagccctactccgccgcgtttcgccgtctcgccttctcacggtacaccctcgcgcacgtagcatcctctaaccctctaatagctagcgccagctccaattttgccaactagtacctgtggccgtgccggcctggccgccattgcgccgtcggtgaggtcgccgtgacaagccatcccgggaactcccctctccatctagctggtgaaatcgaatccccataccccgtagatgttcacgctcccatcaattttgttggatcctagccctagcaccctatccccttgcaacccgagctcgggccatggcgtgtccatgctgcgccactcgccctctctccgccacgcgccgctgccgcagtcggtgggtcgctcgagctcgccgcaccttcctcggccgccgccgtgccggcctcgcgccaacccggccgcgcccagccgcatcctccctcgctacttccgctcagtcgggaggttgaagacgacctccagccgagccactgacgagccgtctccactcctcctatttcctttggaaaattaattatatgaaaaagaaaatcaaagctttgaccccacatgtcagcagctgttagggataaggatatattttggattaaaaataaatgaattatgaacagtgcctttttacaatttctcggattaattcaaatttgaatctttacctagcataacttattcattttaactcggatttgagtgaaacttgaacctaaattcataagctttccaatggtatatactccctccgtttcacaatgtaagtcattctagcatttctcacattcatattgatactaatgaatctagacatatatatctatctagattcattaacatcaatacgaatatgggaaatgttagaatgacttacattgtgaaatggaggaagtaattcactatttaataaaatatatttataattataaataattaatatcatatgattaggttatggtcaacttaaaaatatgctaataaatagaattggtattgtacagtagagtaaatgtaataatatttgtttctagcatgttttgtcacagtagcaaccatgtaaattaagtataagtgatgtctcaaatgaatggatgtataggacaatattagtacttatttaatattcaatggccatataattaaacccatgacttataggttatttaaagcaagtttagccttgtgattatgtaaataaaatatgaatacacatagatgagtctttgacttgtttatgcgaaatgataacagagctagtgtgattaaatcatctataaggaattaattacttaatgtcacgccccatggagtagtatcttttaagttggtaatcaatctcaagttaataaacagtaccaactcgccaaatccacctacatcacatatactgtatagcttacagtaaatagctcatgctcagtaaatatctaatattagtatgtcattgcactcacaactactgtacagtccatttaaatcatacacaagaacaataactaaggagtctatgataaacgtgtatagtagataaatactaattataaatcttgacctcacacaattgtagttcaaccgtgacttagaattatttattgtaaaattatgcaatgagataatctttaactacactattatggaccacactaatctaacctgcggagcacggtaatttgttggccggtcagaccggctagggcatgccagtcagaccgccactatgtggccggtctgaccgcccctggtcaggctgatcacatacaagtgtatgaaagtgagttttagcactagtctaaatgcacaatgacctaatgtggcaatttaaatcatctctttgctaggtcattacccctcttaatagtacagtaaagctataaataaactagcataattttgatcgcccaacgccttgatcaaattaaaatgaaaacactagtttaccgtcttctcttccttttgctttgcgccgtcaattttaatccatcggtagacatccatgcgcacacataatgtgaacctaacttaaaatatatagctcaatagaacggttagtccagaattagcgcttgtcattaattaccaaaaattagcaccaggggcctagatgcttcacccctgttttgactctgacttatacaagtaatatataaactattagcatagttttctcttatcaatcttcccttgggattaaataaatacgatacattggaatactttcgggtgaaatgctacaatggtatatctatgcgcttgcggttcatatttgtaatcgtattatactaggaatatttctgtgccattgctgggaattatatttctagtaatatcgttaagaaatacttatccagggtctactggccgtggaagtctatgtcggtcttctttgtttaggacggtactaaacggtgggttatgccacgatcttgacttttccgggtacctttccggtacttctattcatggctaattgatattgtcaccacaacaagctgtttttgagaaacctgaaggcacagaggatcggcaccttaagccattatatgttaaggcttttgttaatgggaaacccatgtccaagatgctggttgatggaggagcagctgtaaacttggtgccatatacaactttcagaaaactgggtaaagctccagaggacttgatcaaaaaaatatggtgttgaaggactttgggggaattctttagaaacaaagggagttttgaatatggagttgaccatcggcagcaagacaatttcaaccacatttttttgtcattgataggaagggttcatatagcgtgttgctggggagagattggatccatgctaattgttgcattccttatactatgcaccagagtttgatttaatggcaggcagaccaaatagagattgtgccagccaacaggtcagtaactgttgctaatgttgatctatctgtttgggagatggaaggagttgatttcttgttaggaaagatttgggaaggagattatctaaaagtgtctggttgtggtatacaaccagttggagatggagagccccagcttttactttgaaggcatcgtggagggatcaaatttctacaccaaggacagaggagatgatttagatggcaagctaggttaagggtttatgttggccaatgagttagaggaagttcatattagaccaggtgataggcctaggccgacatatattagtgcaaaattattagatgtatttaaaaagaaatagtggaattattgaaagaatacagagattgttttgcttggtaataatatgagatgccagggtgatgagcaccaggctgtgaacgccctgatttttccctctctttcacggtaccaatcagcaaacaaaatataattcaagtggcaacaaaaattcaataatagataactggcttcagcttacaatgtattgcactccaaaccctagataaatattccatctacccgtgcttgaataaacacgatcagaaaggagaggaacctgtggtaccgagtagtgcaaccagggacgaaagaatcacctggactcgctcttcttccaaaccaaccagcggcaagatcttcagtaggaaacatatgggagcgctgtctataccttcagcaggggttaaaccctagaccaaccaaaacaataaccaatctaatctaaattacatgaccacttggcctatttatatgcacaagggcatactggactagtcctaatcgaagcccatgaacatgcactccgggcttgctcgatcaaagcccaaacaaaccaaaataaacccagtataattaatctaattaatgcaactaggtaatgatgccactaatgacagtaattagctaacacctaataggagcccacactgataagaaataaatatgaaacctatgccagctttatctcaaccagcatagagccaattttaacaattcgattcagcttcaactgtttactttcattattctctgttttatcttgcttcacaagaacagcatagaaccagcagtggtcttggttagggatggcaacgggtcgggtcaggcacgggcagagagaaaccaggcccggcccgagacccacgtgcccgtgcccgacccacgcccgcaaagcatatcgggcaaaatcccatacccatgcccatgcccgtcgggcacgggcatgcccgacggatacccactgggcttgcctgccatgctccgccgtgccgccggccgccgctcgtgcgccgccgcgtcgccggtcaccgctcgggccgccgcgttgctagccgccgcctgcgccgccgtccgcgctcgtgggccgctgcggagccagccgcgcgccagccgcctcccgccctcgtgcaccgcctcatcgccaaccactgccccgccacccgcctcaccccagccgccgcccgcgctcgtgcaccaccatgtcgctaggcactgcccagccgccagccacctcgtcgccagccatcgccgcaccgccacgccgcgctgccagccgcctcctggttatttcccctgcgccgccgccgcgtagaaccgatagaagattgagaggttgggtttgggagaaggataatgctagggttttgagtgaatgtatatattgttgtatgcaaatgggccaaacgggctattgggccatgaggggaggttaaactattgaggaataagttcatctgagatccctgaacttgtcaacgaggcatgaccgcatgaaggatatacatgggctaaaagattttcgggtcgggcatggattatccacggacgaaatataaaacccacacgtgcccactaagttcacgggtatcgggtcagacgtgcccacgggcaaaaaaaggtgcccatgcctgtgcccatcgggccgggtatctgcggatacccgaacccatgggcaatactgccatccctagtcttggtcacatcacaggacttagccgatctatagttgaacatcagttgtctattaaaccaggatatcgaccattcaaacaaccctagagacgatttgagtctgacatgtatgatcctattagggctgaaataacaagactttatgatgccaaattcattaggccatgctgatatgctgaatagatttccaatatagtgccaatgatcaagaaaaatgggaaacttagggtatgtgttgatttcagagatttgaacaaagctactcctaaggatgaataccccatgccgattgcaaatttactagttgatgcagcttcaggatataagattataagttttatggatggtaatgcaggatataatcaaaattttatggcagaagaagacattcacaagactgctttcaggtgtcctggtgcaatcggcttgtatgagtgggttgtgatgacttttcgtctaaagagtgcaactgctgcgtatcaacgtgcaatgaattatatatttcatgttctgatcgacttgctggttgaaatttatatcgatgatgtggttgtgaaatcaaagtagattgttgcacatctagcccatttgcgccaagtgttggagagaacaaggaaatatggtttgaagatgaatcgaaataaatgtgcatttggtgtatcgtatggacaatttcttggatttttggttcatgggaggggaatagagataactcaaagaagcttgaaagctatcaaaaatatcgaacctccagtgaataaaaagaaactacaatccttgatcggcaagatcaattttgtaagaagattcatctccaatttatcaaggaaattagaaccatttactacattgttgaggattaaagccgatcaagaatttgtttggggggagaagcgcgacagagagctttagatagtattaaggaatatttgagttcttctctagtcttgattccaccatagaaaggagtaacctactagctgtatttatcagctgatgaaaaaacaatcggctcagtgttaatccaggagtttgaaggcaaggaaagagctatattttatcttagtagaaggattttggatgctgaaacaaggtataccccagtggaaaaattgtgcttaagtttgtatttttcatgtaaaaagtagaggcattatctacattcaaatgagtgcacggtgatttgcaaagccaatgttgtcatatatatgctatcggctcctgtgtggaagggaaggattggaaagtggattttagctttgacagaatttgatctaatatatgaatcggccaaagctgtaaaaggatgggcaatagccgatttcattgtggagcagtgaaatgattcaattggtacattaaattagtgccttcgactttatttcttgatagattagttcgcactcatggttgtgttatcggcttagtaattatactgcctcggggggggggggggggagggagggcaagttttgagtttgctttcacaattataccatattatactaacaatcaagcagaatatgaggcaattttgaagggattacagttgttgaaggaagttgaaggtgacgctattgaaattatgggtgattcattattggtgatcaatcaattatgagagtatgaatgcaagaatgatgtcttgagagtttataatgtgaaatatcacgagttgatgaaggagttcaagatggtttctatgaagcatattcccaaggaacataatgttgaagccaatgatctagctcaagtgcatctgcatacaagcgatgttaaaagatatagagattgaaattgctgctatacaagtcgatgattggaggtacggaatttttgagtatttaaaaaatccttctcaataagcttcaaggaaattgaaatacaaggctctcaaatatgtgatattggatgatgatttgttttatcagatgattgatggagttttgctcaagtgcttcaaattagaagccaaagttgttatgtgtgaggtacatgaaggaatttgtggaactcatcaatcggctcataagatgaagtggtcgattaggagagttgggtatttttgtccgacaatgctagaggattgtttcagatattacaaaggatgtcaagattatcaaaagtttgggtcaattcagaggacacctgcatcggctatgaactcaataatcaagccatggccgctcagaggatggggaattgatatgatcgtccagataaatccaccatcaagcaaaggacataaatttattttggtggctacagattacttaccaagtgggttgaagcaattccattaaagaaggttgattctagagatgtgtggacccccgtttttataacaggaatcaatcgtgtaaacagtaccattttcctggatcaagtagtctggtacacacgagttaatagctgaaataccaaatgcacatacacgaaagtctagtatgaattattacatcaaaagcccgcaggcatagtcttaaatcctcggaccgagcggtccggaatacattccaaaaacagaagtagataaggcagcggagttaaggcagtggcacgccattgccacaggcaacgaccataactaagacctactgagcgccatcgtcttcatcaccctcctagtagtaagagtagggatcctccgaagcttcatctccgacctctgattaagtttgtatattgcaagggtgagtaccaaccgtactcaacaagccaccacaacaacaatgcacatgacaggggtattcaaaggatggctatggttcttttgcgcaaagcaagttttataattcttttcacaaacctaagacctagcacacactgatcaaattttagtaccagtgttcatattaaacaatgacggttctgaccaccatccattgtgatcccaaggatagcttcccgccattgagtcatcatggttttctgaggacgtccacattcccgcctctcaggaagtggctccatcagtatagaaatcatcatgcaatatcccatcccacacaagttaagaatttagagtctagccaagtgtaatacatgtctcggtgctcaataaccgcgagcacggctattcgaatagatttggtttactcacactgcagtgaatgtacactttacccgcactccgcgactgcccaacacatgagcctcatcccaacacatgagacgcgtcatggcaaagcttttcgataaccttgcattggcagtacccgctccatgaactttacatcctcatgcactctaggcgtacacggtttctagcagtgagaggagttctggcgcacccgggaagggaagactcacacatgcattaagttataattatgtttagattctcacatggcagtcctaccgatggcgacaccactgtagacacccgcctcgcggtcctaccaatggctgccccaccgtagagcccctgcctcacacatcaagaaaccactatgcatggatactgcctccgctcagctatctactccgctaggtctatacccatacgagaagtgcggttgtacggaggtcgtttcatgcttaacttcatggctcggtccttaattgaccggggacggtactagccttttccggataccacccaaatcctccgtccgccccagtcgaaaacagttgtttaattttatttctcctttcacaactcatgtcatcaacatcatggcaatgtggcgctcatgtctccacatgccgcatctcaattacattcccaaaggtaattgcccaagcatatagcatttgataaatatgagtatgcatgattctagaatagcatctctaagcatttgtcattgttgactagggactcatacgtaatcatggttacaagggaataagggtaaacaataatcaaggtatggcatattcacaaataggatgttcatcattgcatgcattcttatttgtaaataaaataattttgcaattgggatcaacatgttcaagggatagtgatgacttgccttgctcaaagtcttgcgggtcttgaccttcgcttgtatccgcaactccctcgggctctataattacgtgtgaagaaacgatttgaattcggttagaattcaaataaagatccaagtaaatccaagaagatatcaagcgcggaagtcggtttcttacattatctattttcgttcgtgaaatagagctactccgtttgtttaactctatccatccccaaactattttgtggcataattattttattagcacaagtttttaatttaatccgcccgggtattacatccatataataggttagaaatttctatcgcgagctaaatatcggacaaaatcctaaaattatcttataatattgtacgatttaatttagtctatgactaaacgattaaatataatacacggctaaaatcctagtaattaaatccgaatttctaccgtgaatcgatgacttatagagattaccaaaaataatctataagaaatcatctaattgtttagttattaattacatctaaattactaccaattttaatctaatccgatcaagaaacctatttctataattaacccggaattttgatcgaaatactattacactctaggaatttccaaaaataatctatgattaaccccgaccatttttttatttcctaaatcctcctaatctctcccctaatttctcttctattttctccttttcttcttttctattttctttttctttctctttctctcttttcttttcttttctttttccttctctttctctcttttcttttctttttccttccctttctctcttttcttttctttttccttctctttctctcttttcttttctttttccttctctttctctccatcggcttctcccttcctctctctctcttggctcttgctcacctgggtggcgatggcggtggatgcgaggggggggggggagacggcgcaccggcggtggcggtggcgacgatggcgacggcggcgcaagtcgcggcacggcgcggcggcctcgcggcggcggcgcggcggcttcgaaggcggcggcccggcggcacgacgacggcggcgcgtggagaagggggagagggagaggagggaatggagt

SEQ ID NO: 7826 - DNA, 80286 bp, Oryza sativa
gtaaagaaacaacattgtttgccaaggatggcataataatgaagacctatagattttattttaataacaaacagttttcaagtgcaaaatggactcagttttaccaggactcgataggagagtcagagtctgattcggaatctggtgtttgatctggcaaaatatagaaaaataggattctagaattctcctaaaataaattatattatcataaaaaatagtaagaactaaacatactcccatcaaataaagataactaagcattaatcatattatgctagtataataaggacagcagaaagcctcaggctgcagaagtgaagtgcacaaacatggagctgataaaacaggtagagaaagcacaaagaagcagaggaacctcgtgcataaagaaacacaaccaagactatgagtttggcatgcattcataaacacattaaaatttaaaatactatatgtccttcagaaataaaaagcaaataggcttaaaatggttagcctcaacacatcctgaacaaagagcacagcaaaggaccctcccccagcttcgacactggtatgtgtcacactgttggacgtgactcaataagccaatgcgtgtcaacctgcgaaaattattttggacacgtgccctggtagcactggtgctatctccagggtatggcttgctattagcatatttgctcaggtttatcaccagaatagtccacagacaaaaccaaaccataaacaagccaagcttcagttgatttctcaaaagaaactggtttttttgggaatgtcataatgacaaataatattcaagggcagaaggaatgctgcattcaggaagtatggatttctccagaaaaggagttcattgattctctccaaactgtttggattgtaaaatgacctagttgtgccagagaaaagaatagaagaagcatctaactctttcatgctacatgtcccttaacccaagtacaagataactcatcatacatgatgtggaactatacactattgtgtcaattactaacacaaactaatcttaagcttgaattaacttcatcagacaacaaaggggcatattctaataaaagcgtacctttgcgagccaatattgtttcccacaaacgagttgccttagacaccaaatgggaattctgtccagatgaacttgagatacgttcatcccaaagttccccttccagtttggatttgtttcgcatgtcttgcagcttctctaactcctgctgtaggtaggcctgaaaattccagatgaagtgataataagaacaggatgcaacacaactatctgaatgaacatcacagaagtttctgtgacctcttcagcacaaagacttcggaattcagctgtcatttcatgggctaaatttgaccaggttgtttgcctttgaacagcaatatttgcattttttagaaatttacgcctctcaagagctatccttgcctgtttggaatagcacaaggagaacataatttacagtttaaaaatctcaaataactaaatctggattgctatacaaatgtataaggagaaatatgctcgtgtatcatgggaagtttctgctacaaggaggaacaacagacacattttgttccccactaatagaaatggtgctcctcatattcagacaagttatcctaccaactatggacataagaaatatttgattgcctaccacagtatattacaatcatcacacactattaggctgcctcttactcaaatccatatttgtcttatgtattcatggtctctgtatgaacattatgttttatagcatacaaacatcaaccataatcaaccttccttatagacaagtaaacaagtcatcaagaacacccatttcaaaaaaaaaaaaatcaagagcaactaagaattggacttgatatggggcctactggatcaccattctcaagaaatgaagcaatagaatcttgcttcagctattgcacacatatcaataaactgagactaaggtgttattttgttttcataatgtaacacctaacaaaataacacctcagtctcagttatgttctctacaaataatctatgctaggtgtcaaatgtcttgagcattgcaggagtatacaagtatgctcacagggataaaaagcctcaaaccaagtatatcctctatgaaattatgttctctacgaataacctattttaagactgatgaacatctgcggcagggtcatcttaagacagactaaacaaccaaccagttttcagaaaattgaagagtcagccatccttgccttagtcacagggagtaatgcagcggcatgtagataagagacgtctgtgagtgctgcaggcagcgggcttgatgcaacatcagcagcaaatgttctcctgtggacttctctcaaggcatgcacagagagttgccacaatagctcaacaaatctgcaccgatatagggtagcattacatcgacgatgatgaaaatgttccaatttatatgatatactggagcagaaaaaaaaactattgaatagaactgcagtcacttttcgggtacattgcagattattacagagatctggacttagaatgtggaatcacaaaacagaatctaataaagagacaaagagaatgctacgaatgtggaatcacaaaacagaatctaataaagagacaaagagaatgctaccatatagtattaggttgtgctcttccccatgggttcccaacccacctccctcattttccgcgtgcatgcgtttcaaaccgctaaatggtgcacgttttgtaaaaagtttatataggaaagttgctttaaaaaattatattaatccattttcatttttttatagctaattcttaattaatcacatgttaatctatcgctccgttttctgtgtggaggggaggggttcccaacccctccaaaagaacacagccttcggccattagctatcattttttctgataaaacacccaattttccaaggttaaatcaagattattattttttgaagccacatcagcttcactaatgttaactaactactattgaatttcatgtgttgattgcgaaaatgcattacacatcaaatatgatctctgcccttgtttggtgaaacaaagaaacactaaggatataacaacctgaaacacttgatattaggaatggcaatggcaccccctacccaggtacaagacatagaattcccgtactagggggtgagggcaaggaaaatctattcctacaggagcaaaaaatgggtggacacaatccccaacagtcctatgctatgtggtttcctatctcaaatgtctcatttgactttactgctacactctacatgctccattctgacccacctaaaatgttcccacccagcaattctagcataaccctagatcaatacctcatgccaccaggaccaaccatcgattcaagcaactgcaggagtgacgccacatttatcttcttgtgacaatggtatgccccttctccattactcgaattcagggggtgagggcgggaaattttcttcctacagtggcagtaaataggcgctatgtgttgtcctacctcctatgtgtcatttcaatttaatgctctccatggtccgaaacaacccatttcaaatgtagaatatcctaggtcaataccccaaaccaccaggactgatcaaccgactcaaggcgttgcagcacagataacacactaagcttctcacgactcgtaacaacagtatgctccttctgcactattccaccacagctcatgtgtccagcctcgccaatgtcaccacactgctcctgccctctactcctttggtcaactagagcgaccccatggttcttctgtcttgtgtctggtagctggaagcagctacccaaatcagtatgctgcccgtcatccttgctggccaggggcctagcatggctgttcctctcctagctgcataaagttcagcacaatcaaaagatgtgcctaattgcatggatgaggcaatacccagcaagatgccttacttagctccttgagaagcacatcaggccagcaagaggggatatgtatttgctgatggctccaagccatgtacctcagggagctcgagggtttaaactataaaaggttgagatcaacgcaaaagatgtagaacacggtctaaagaagggcaaatcaaccagtgattgatacgaactctccacaatttcaattatgaaatgaaacgtttcatacgtttccagaatacaattaagctgcattgctgctgaaagctgcaaaaatagtactaaaaggtggttcaacccaagaaaatgcagctgtgtgcttggtactaacctcggcccacagcaggtggcgagtgaagataccctggagttgctccgtggcagagctccctgctgctccagctcgctgatgattccttgcacgatctaaacaaccaacagatgtcaaggtcaaagcatcaatatgcttctgcacgtagtaaattatccgagaagcaaactagatctgcaaaatcttaccttcctaaactctctggattgtgcggagtcgaagatcggccacaccttatcaaagtcctgagagtccaacgaaataaatcaaatacgatttacagaaaacctagaaacaaaatcaaaaaagaagaagaagagggcatcagtgcacgtgccttggcggactgcgcgggcccgcggagcgaagagaggaggaagtagaggagctgttcaccgaggcggggattggagtggcggaagaggccgacgcgagggccggcggcgggggacgagggggaaccgaggacggcgagatcgaggccgaggaggaggcagttggtgtacatggcgctctccagctccgcttcccgctccttctcccgatccgtcgccatggccgcgcactcccgccgctgctagtctcgcgcgggggtggatgcgctgcggctaggtttagggggcggctggcgtaatcggagtcggagatctcagtgaggccgaggtggtgggatgggagagaaacaaaactccaaaaagcattgcgagccgagaggagcgggtccagtcgcgaatatcagatctatgcgagggggacgcgataactttggatagctccgcctccgcgcgggggcgggcacgacgcgagacggcaacgggagcccgtgaaggcgaaagcgcgctgtgtgcccggcgcgcggcggccgtcgcgggcggcagcggtgaaccctagcggcctggaatgggggtatgaccggctgcgcggaggtgggagaaagctgcggatgggttgggttgggtgcgcagagggaaggaggggagggaggggaaaggagtccaaattttattacaagtataatatgtgcgtatttcgaaacgacctttttgagcggcatggcggcagatcaaaaattcgtcccgttcccaaagggaatttcatataagagtaaatttcctacgtaccctaaaaactcactcaatccctttcatacctctgaaatttacccgatctcttctatacccctgaaatttcaatttgatcccttccatgcccctaccgttacattttccatcatttcactgttacatttggttgcaaatgtcctttttgcccttgatgctttgggttcaaatataagcttaaaaaataattaaaaattttgtttgagtgtacagtatgtgcattttataaatataaagagactaaataattagtgcaaaaaattttgacataaattttgaaaataaaataaatgtaataaattaaaatttttatttgaaattttaatagtacaatggattttttttatcgggagcattcattaaaagaatgttgtgaacattggtagttctatttttatatgaatgctcctcatttttatgacttttttttaaaaaaataaatatgtatttttatttcattatctaacaatattttttgggataaataatgcatcgaataacaaactcataactataatagtctcatgcgagaagcttttatatttttaataatgtaactcatgaatttctttgttcatccaagggtaaaatggtcatttttatggaaaatagacggtcaactaacggtcaactgacgggaggggtatggaagggatcaaaatcaaattttaggggtatacaaggaagtaagcaaaatttaggggtatagaagcgattaggtaaaatttgagggtatacaagggattttctcttcatataaatatgtcgatatttttaaataggtccacccagatttatagcacatgattcttatttttaagaagtcattttaagatattttatgaaccgtgaaatttattgatcatattagtttttcaaaataatgaagattttaaccaacaactttaatcaagaaatccacgattaaaaaatttcttctacactccatattttaaaattttaagtaaatatgcgctgaacatttgcaaatttataaggatggggatttataaaactttataatcataatgtccttttaccactgtcccatctatactcatttctctgttgccattatcatcagctaacgttagttggttgttgacgatccttaaatcataatatatgaccgtcaattcctacatataatagaataaaatatggtattcaacttagtggtagggtttattactaatcatttccactagtgtggattaaaatatgtgtatacaggtattttaaagagaaaacacacctgtcatgcgacaaaatgcaacttcggacaattaggacgcgtttgcatgaattggagggcccatatgtcaataaaaccacttagaattgggccaaatcataatacatgatgttggggggccattaagctacctcccagccaaagggagggtttttgggtttggccgaacacatccggaggccgctgatcgccatcttccacatgtacgctcctgatttcatcccaataggtgtaaccatcatttggagcctataaaaggaggagctcacttcattccaacacccacaactttgagctgaattacaagagactctattgtatcttttgtatgttataaaataggtagagtgaagggaagctttggaggagtgaccggaaggttggcgctctctctgacttctacctcggctagtgtagctttctaagaggaattctagaggagtaccggagttgtcgatacactctactctgggttcggagaaacttcttctataaagtaagcattcgggatcatttctgatgttatttaattactagaaaatatgtccgtgcgttgcaacgagtgaagtctattttaatcttattattgttatatggtttggttaagatgaaattcactgtgggagttcgcttggatatatctatttttagaaaatcatgagctgcagttaggagtccgatcgtctcaagttagtatgcgagtttttttaaacagatttcttatatgattccttctgtattgctaaaagtgaacgatcttaaaaaccgactcaaatacagatatatatttccaaaagcaaacgaacttaaaaaccgactcatacacggatgacgtaccaaaataccgacaaaacatctccaatttttgtaacagtagagatttagtctaagtaagatagatttccatatttatgggttcattgtttagtattcatactaagtactctagtactaggactccggataaagaaggaagttcctaggcaagtattagagtagtaattaataacttaaatgtggtgtctaagttacctttatttgttgtgtatcccatgaatttgtcagaggtaaacgacaggtggtgacaaccatgaatcccgtcctagtaaccctccacgttagggtacatcatagagctatagcggaaccacgctggcagaccagataggaatttacctttaacttaggttggataactaaaacacatagaaagtcatctctagcctagctagcctaccaatagttgttgtccttggatagtcttagccttaagtagattacacatgttccctgagtttgatatccttttggggtcacccgaaggtgaagtgctacatcggtattccgtgcgcttgcggatttatcaatggtcgtaagaaataccaacaagcatctctagcgtcgttgccggggaacggttgctaatttatctgagtctaggtcatcctcgtatctttattttttatttcttcttcttttattcctttccttgatgaagcaacccacaatttaaaacctttctgctcctcaggttgatctttgtgagctgtcctgttcttcaaaaccaatcatttcggatggctacgaaatcagtcctagctttatagccatgattcaagagcaaaacttcgctggtagtcagggttggcaacggggcagggtgggggcgggttggacaagaatgcccccacccccgatcgctagctcttccacccagccccggccccgaagcagaaatcgaagccaaagttgccctcgtccgtagccccgtcgggcccccgaaacttggtcgggggcccgaaggtagggagcctgatgaccggcgacgtgttgaggaggggagaggctagcgaggtgcgaagagagaaaagaccgcaagtaagggagagggccaacatggtgtggaaggaaagaagttgtcgatgagctttggacggagaagaagctggagcgtggagcggaagcgagacctgctctcgtcatcatgccgtgggagagagactacaaaaataccgtgggagagaggccacgccagcagcggcgcaggcgcgcgatgctgccgagatgggaagtcggcgacggtgcagaggtggatgggacgcgatgatgcagatgttgatgggatatgacgacgcggacgcatggagcaccgagtagtccggagtccctcgatagaagatctgcacgagtggataaggtcggtgatgtcaagggatttcttcacagttgtatacatgttcaccaatttgggcctattgggttttattttgattgggccatataatgggatatacactttcggggccccatagggtcacccgtgggttaattttcacaacccgcccccacccccgcccccagtaacaatcggagccctgacccgactcacccatggggcaaaaaacagcctcatccccggccccatatgtgggtgttggcatatattaaatgccgattctatactgccaacatctatataaagtcccgataataaagcatcaaacatagtgataggtgttaaaatctcacatattccacaagtgttggtgtatatttgtatgtaggtgatgaaccccgaagttgggaggaaaatcacactaaagtgagagaaaatatgtatccatacaaggatagattgtggacttcatcaaaatacccgagagtcagcccaaaacttcgagaaatggataaaggagggccagaagaggagctaggccaaaggccaggccaaggggtcccagcccaggttcggcctaaccccctggtttgggcgaaccctggtgatcgccgttgatcccaggttttggcgtggacgctccagatcaccccctgatgacggttgcggggcagttcggacaattccccttcctataaccgtcatacctatcctataaatagacatcactttattcactctcacaaacactttcaagcttgagctgaattataagaggctctatcgtactatattgtatactagaataggaagagagtagagtagaagaagtcgaatgaattccggagttgtcggtaatcttctctcatttcttttattttgtttattactctaatttcaatataatattcttcctgagtaatttagatttatcttgtgagaattatctcttggttagttcctaaatagcatacgggattattgttcactataatcaactaaaatatagtgattgctttggtgagttataaacactaaagtagatattaattacttagacgtggtgtttaggtaattgttatccagtaattgctgcgtatcccacagtacgtttaaggtaggtgtagaggtggtgacagccatcgagatcacttaagtcctccctgtccgagtacgtagtagagcaatatctgggaacaacaggttgtcaatgcctgaagtattgcgttaggattaaacttaagctttcactagacactatttctcaccagtaaatcatctatatcctaggctatcctttgcttggtgtccttggatgaaccggaggaaaatctgaccacacacgttcccttggattcgataccctttggaatactccgtagggaagtgctacatcggtatatctgtgcgcttgcggattttatctgcgaccgtaagaattaccaacagtgggattctagaggcatttcataaaggatttctccaaaattgctagacccctaattgccttgctagctaaggatgttgttggtatttcttaacgacattactagaaatataattcccagcaatggcgcagaaatacttatggtatattatggttacagagttcatccgcaagcgcacggatataccattatagcatttcacccgagagtattccaagggtatcgtatttattttatcccgtggaaagatcatgtagagagaactcaactaataatttatatattacttgtgacaatcatattctaagcatgggttaagataatccaagggtagagtgacacataagcattaactactcatcctcataatatatcatctaagctaagtggaaagaaaagagaaaggaaatctattcctatatttctagtatacatagtatacatacattctagctaactgatatactagctaataccctctatccgatgccctcctggtacttcgagaagccaccctgactgccgagttccttacgacagcccgtcatgaccatacaaccggggctaaatacggaggaataccctccctaggaaattaacttaggattatatataggcgcggaggaatacccatactgagctgtcaccatcagcggcccacctctcgaccgcaatatataaccccaaataatgatatcacgtaatctagacaccacgtctaaactaccagatactactctaatatcatcgtcatgacatagagtaattgcataagcaaacactatacccgcaccaaagcatctcccagataagctagccgtatattcagtataacatgaacataatataaagtaggtacttatatactcggaaagtatttcaataccataaatgtatatagaagagtattctaataaaagtacaaggcttacaaaagaggaaaggaaagctgctagagccatacccgaactcttccgaagacttctggactcctgattcctattctaattctattccaccagctagatactactaaactaaacttgagagaaatgagagatctcttgcttgaggtgtgttgaagtgaagagagtgagctccttatatagaggtagttatgacggttgtggaaggggaattgtccgaagtgcccttcaaccgtcattgggatgcaatcctggacgtccatgccaaaacctggatccaatggcgctaggattggttcagccgaacctggggatggcccaatccagcccaatttcagctggtggcctcctctattgctcccctccgcagaccaattctaagttcttggcctattcacacacaagtctggttctcgacatcgtccgattgatttatcgtctgaattgatgtcgattctcctctattttatgatcattctctgcaaaaggttagtatacctaatactagtggaatattattattctaacaaatatatgtattgctagcatcactaattctcccctattttggtaatattgatggtcgaaactgatcgataacgaccgtcaacagatgccccgtttgactttgatgatgagtgtctaaaatcatttaaaatctttaaggaatcactcatctcagcactaatcatctgaccccctgattggtcgccgccatttgaaatcatgtgcgatcctagtgattttgcagtgggtactgtccttgggcaaactaaggataggaaacacaaagctatcgcatatgctagtaaaactttgactggagctcagcttaattatgccacaacttaaaaagagctcctagccgtagtgtttgccattgataagttcatgtcatatttagtgggagctaaggtaatagtttacattgaccatgctgcactaaaatacctgctcactaaaaaaatatgcttctactccaaaaattaggagctaccgataaatgactatctgcgtgacggcatgctgttgaaagtcacagactctgacccgtggtatgcaaccatcgtcaacttcatggtcgcgtgccatgtaccaccaggagaaaataagaagagggtgatctacgagagccgcatgcacttgtgggatttaccttacctttacagagtctgttcagacgttctactacggagatgcgttccagtagccgaaggcataaagatcactgagaagtgtcatgttgccccatatggagatcactatggagcattcaagacacacgcaaagatctggcagagtggattcttttggccaacaatgtatgatgcaaaggaattcattcggagatgcacaaggtgccagaagcatggagggatcactgctcgggatgcgatgccactaacatataaccttcaagtcgagctatttgatgtattgggcatcgacttcatgcgacctttcccaaagtcctttgagtgcgaatataacctggtggccgttgactatgtgtccaagtgggtagaggcaataccatgcaaggccgctgacgccaagcacgcccgctggatgttccacgagattaccttccctcattttggaactccgcggatggtgataagtgacggagggtctcatttcatcgataagaccttctaaagctttttgcaagagcttggggctcaatacatcattgccactccattatcattcccaaacaagtggacagacagaaacgagcaacaaacaaatcaagaatattctgtagaagacggtcaacgagatggggaaggcatggaagaacaagttacctgatgcactttgggcatataggactgcttgtaagacacccatcggtatgtcaccgtaccaacttgtctacgggaattctaatatatattaaattctaatatatattttttcagcccaaaagaagtttaatgtaattcctataataatattaggtgcaattatgaagtaggaacacatatacaaagaaaggttattctaattctttaaaataatctatgcaagatgaaatcatggaaaaatttatgtaaactatgtttagcataagcaattcactataatattggtacaagttaataactaagtttaataccacaaattaatcagtcaaagcagaaaactaaaagaaatcaaattaaattttaatcggctaaagccatacttcatccaaaaagtacatttaactgcacataagtgaacatggaaaataatttattcaaatactagattatttatcatgcctaaatataatttttctagaattttcctcctctgtttaggcttcctaaaaattcaatctacctttctaatagcccatctttgtttaatttctgtgagcagtctacccattatttttgagtgaaaccaaagaaaatggaatctaggttaatcatttacctccagaaaaatcaacactaattaatttgttccacacattaagttatgaatctacaaagttaggggaaagaaaataatctaaaaattcgtctaaaaccgtgttcacctagaatcttacccacacctctctcttccacctagagcacttcgtcctgggcccacttggcagcctctccagctcgccctttctctgtgcctcaccctcagccgaccaagaacacagagagggagagatcgagcgaaccgacgcgtggccacaacgtgtcgacgacctcgggctttccttttctcgctctcttctcctccagtctgagtcgccattcctcactcatcactcagagccgaagaagccgaggggagcaggtcctctgcctctccgtcaccagcgacctcaccactggccatggaggtgacgaccatcgccatctccgtttgagtcaaggtcacatctatctctttcgcgtttccatctcttcacacaatgccgaacctcttctctgttgaccacctcccattttgtgcatcacagccaccggaatgtgaccacgccaacgatgccctagagcacgcaccggagcgccgccgcttcgacatcgttgtcgtccggccattctcgtccatcccgaagcaagccgttgtgccaagaatctcgcgtcgaccacctcttcaagacgcctcaagaaacatcaagaacacggagaacacatccttttcttcctcgacgccgatccgaactcgcctccgcagtcatcgtcgattaccactgcctcagtgagccattgttcgatttctcgcgcatacaccatctccttgacctcacaaccctcgtgcatgccttcctttagcagctcgtcgtcccgttcgagccgtcgccgttcacccgaggaggagcaccgccgttgaaccgttccaaccgaagccgctgctatccaagcttcggcgatttcttcctacagcttggtgagcctcctgacctcttaggaaacacatgcatggatgcatctagcaaaatcaaagcccctaggcaacatgcagtaacagctcatgtataccttccgctcaccctcaccatcggcgctactccgatgtctcctagccacgaaaactagaggaatggaatcgtgagagcattctcttcattttatcttttgacctcattcccaatcgagccaccaatcgtcgccgacgagctcgccaaagccatggccaagctcccagtccatcgggctgctggaggttgaagatgaggactttgtcctgtaaatgatcaaaaaaatagggttcaaactataaaacttcagagatttacatgtggacccacggacctaaatgcagttcatataaagcctagggatctttttgtatattggttcagccaccgatcagtggacccatgtgtataaaaatctgaaaatgcaaaggaaaaataactaaaacattaaatgtttaacaggaaaacacccaaacttgtaaaatccatataaaatcaaatgtaactcattttgagatgattccagttgctgtagattcttaaagttatgaactctattttagaaatataaaacttgacactcactgtacaaaactacaaataatgtctctaaaatttatctaagataggtcatacataaaacatgtacaaacttataaaatacatagaaaattcatctcaactcattttgaaacaaaatcaaattctacagattcatcatcatgcactctctgattaggtgaaataaaagtaattacttactttgcatcaaatgcctctaaaactattatctctagaatgattagtttatataagctaaactttagaaattcatgtagaacccaatttagcttaaatttgagtaaacttaagttctataggatcacaaaaacatgtatttccatgttatgaaataagattatatacttactgtgtagtaaaagtctctaaatattcatataaggatttactaacatagagcagcctttaatttgtaaaacttgtagaaaattcatttttagtccaaatgaaatgaacaaagtttctatagaaccagcaaatagttagcttcaacatagtaaaataaaatttggcaccttttgtagagaacatagatcaaaaccttaatctagtgaaataagaatttaaacacagtgttgtttaagtaatacataaacatgtataagtatatatacactttaggtctaattaaacctaaataaaaacttgattgaccagtgaagccatagttccatcctcatccactaaaacttagaagaacttagttcatataacaatttctaggttaatataatatattgttagtttagattagagcatctctagtttataaaatatgaaccatagtagtaaagaccataaacatgtgaactaaaaatgttttagttaaccaaactacttcttttgctcaacttaaacatactgtagcatattgtagcatattctgaacctacaactaaaaagtcatgaacatatgaaacactatatgcctaaaacacgttgtaacttgtaaaatctataagaaaatcattataactccaaaaattgtgaaaccaaatgagttattcttataaaacacacctctacaccctgtgaagtctaatataataaaaatcactttacaaaagtattttataacactacctaagactatactactataaaccgataaaacttctaaaatttataactccctaatggaacaagataaaataaaaattctttcacctaaattcattttagaccagtacctaatcactgtgcataaatcatgcattttagagcattttagattttcagctctttcggtgtttaattgcataacgtgtcctttatctagataactagacgaaacccagcgtattgctgcggaaaactaaggataatccatagaaatagcaagcaaagatatatcccacaatcaatatagtattttgtcaattcatgcaaagaatgggccaatgtatgtacaatgaacaaatttgagcgggcactgactggatccatgggatagaggaatgagtggataaaatttcctccctaaaacaccatgggatcatccaagatttctaagggtgtatttgcactgacaataagtaaatgcatgtgcgtccggtttataaaagttaaagcctacgaaaaccttttaatatcttttttgatttatgacaggttctataacagaacttgggcaaaaagtatatcaaatagcaatcaaaagaatggaatgtatcaggacatatataatacccatattaacctgattataagcataagtgaaaatatatgcatgatgataacttttgtaacaacgtcgtcagatatctgtaggctcgtaaacttaacttgtttaaatcctgtgtaacataaatctgatagagataataacaaaaaagataaccactattctgtactaactctataaagaattggagtaaacacaaattctggagtataaggagaggcaaacccatatccagatcagcacgaacagggcagttgcaacaatccagcgaccaagcagtaaacaacacagggcgaatgcagaagctaaaaattattgcagaaatgctgaaattttttggtatacatacctcagtttttcaatacgcttgaatgacgcctagtagagttcagaaattaactcaattttcaatattgtcatgtggatgaatgggaactaaatggatttcttgacactgtcatcaaattggatgtgaataaagtagcgcgtagtgttaaaaataaagcaatagccctgtaaaacaattttagtcaaagaaaaccacttatcatcaggactaaaaataaaaatggataatgaattagattaacccatgatgcttaagagcagggagaacctacgctgcgtagtgtttgaacagtagtatacagctcctatactgcaatggcaacagtaagatcagtagtagcatcgtctcctcttactggagtagttgtagcagcagcagcaatattagcgtggtttctggatgaggttacggaggtcaagaacatagtgcatcatacctgtagggaggatcggaccatagtgattccaccagcttccgccccgcttggttggtataaccaataggctctggcgcttctccattggtgtccagtgcggatgatcaccctgctggcattggggatgaatcgagagtcctgaaagtttacgacggagtgtggtttttagaggaactgaaagagggaaataaatggaattaatcgcaactaatggaccactcattgttggtgaccgttcctggtgataaatgctcttgctcctagagggagatgatgggtagctcaacagccgatcagaaggtgaatagatcaactctggctattgaagtcggagatcaacatggagagcgcacatctgatatcggatggttaggactaaaagagatgacgtggtttactcacaaagcagcaaattagctagtggggatgactcctataggtatataggattgcataatcggtgaaggagtggattaggtgctaacatttctctgatcaaggcaagttttctcctcccatcctttgaacacattgaatcccatgatttgaggaatgaaaatatttgtttgtaaagttgcatgtgaacttagactatatcggtatttaaaattgggttaaggtagttgtgacatatttgctgcataccccaccttgaataattgatcctcttgctgtttgaacccctagaaatggttagagtacactctttgtgctcaaatgggtttatatatgctctatgtgcaactacttgcttagccatgcttagaaatatgcaaatgctcattccatctataattaaaatgtggttttgatacttgaacctttgctggaataaaatgaatatgatgggtatttgcgaattaaaatgtgtaaaatgtgattttatacttgggcggcaagtggtgtgcatatggtgttagttgcataccgataggggggagtgtttgcccaagtccataaggaccgaacttgtgtcacccatttaaagttattcgtacatccacatgtgctagtatgggatggcctaagctgattaatctatttaggactagccttgcattctgttaggccggtatgtatgagttagtcgataattctgaggaattagtcgatgattcagaggaacttcctatttgcgccgacgtggtagtttaggtgactaagtctgtccaatacaacggtattgtgccacgtgggtgggttctcgttgtgtccgccaccacggcgttaagtttaaggcgtgggcccgccacttaacggttctaggcatattccaagtatgcctaggatggaggaacacgtatcgtgctagtgcaaggctaggctctaagtagtgtaaaggctacgttatgacctctagatcacattcaacatgaagagtgtggtggagtcttgcaaactcaaaacaaactagagcgttcatatcatgtgggtaaagctgtacaaactttgcagagttctttaaactaatcgattagccgtgctcacggtcatgagcgctttggtgatgtgtcatgagtatagactttatgttttaaaatgtgatcatgtgacattggtttgaaattgataaatgtgttaagttgtgtgtgtgaggtgatatattatgacttgttgtcaaaggatgacaacaagagattgattatgatggaattatgatgaacttaatattgaaacttaaaatttgttttgttaattgaagcatcaactcctttacaaaagaattgcgaaacaaaacttgctttatgctgaaattgaagtacatattgcctttctttgaatatatgccttacatgtagtatggtaggattgacttgtgcttgccagtacattaacttgtttaatgtactgactcttgctgttgatataacattttgtttgcaggtttagatttagtcttttgagtgatgtgggttccgattgcttcttctaggatgagaacttaatggggtaaacccctagtcggtgtgcttgtgattgggtagtcaagcttccgctgttctctaatatgtctatttggccggtcggcctatgtagttattaagttgttgtaagtcttaagtttctttaatcttagttgtgtttgctatgtataatcatgcttaagatgaaagtgtggatctagtgcacatcctgggaactagattcacatgagtatgagttaggaatatttgagaggttgtagatctttagccatttttgtcaagtctcctgaatgtgtaacacatctggtcaccaccttcgagtggtttgatgggcacatctcaggctgaagttgactggcaggctaagggctcagcaatgtctccaatattcctctctcgaggcgtcggatgtttcattatgcttgtttgatgacttaaattattcacttcatctctcaaatataatggaaggtccgaagtgcctacgacaacgcactaggctatccggacttggaacatggacctaaagggagacggacatcacaggaagatgcagctctctgagctggaggaatggagggacaaggcctatcacaatgccaagatctgtatggacagaaccaaaagatggcatgatagacagatcaagcacaaggagttcaaagcaggggataaggtgctgctgttcaactcacgggtgaagctattcggacatggaaaacttcgaaataaatggatgggcccatatatcgccgtcgacacttcatcacatggagccgtcatacaataaaagtaatatctttaagataaatggctatcattaaaaagtttttcttgatccgttagaagttgatcgtgttagacgtagtgaatttagtcgcttctagcttctacccggagtccttaggcccccctgatccgttagttttcaatgccctgagtccttaggtccccctcttgttatcttaggtctaggttctaataggtgcacttaggtctaggttgtttagcttatttttatttcatttcattcttgtaatgtgcctatcattgacgaccgtatttgccggccgaaagaccattatgcacttgtacaactaaaatggtataagaaattcataaaatcaaacttttaaaggttgtaaaagaatgttctcgaaacttttcaattagtcgagggggcatatttagaggaggtttagatttcgagaagagctggttggaatccaactagtgaaaatctagaaaagctgggaaaaccactttctgtcttctagttcattttcaagattccgcaactacaactttatagaatctacaaaaaggtggatattttaggggagctttcaattctaggagaaactgtagctattagaaccttccctaaacatgttttagaatgtttctacatgtagctcaaatgaaatattgaaatgaaaaaaaatattttatgactcacaaaattagaaaaaaaatacaaaatatccttgtgtatattgactcgacataaattattttgtgaaacatttaaggattaaatcattcccacgatgcaatttagaaaaaccacacataattcacttattttatgttcccaggaaaagttaatatctttaaatgaaaattgcttccttcatattatgtggcatttgttaaaaaaagtgttatttcattacaaaacatatgctagggcataaatggtccttacaagcaaacttaatggtcaattgtattgtggtatcattggaattaagatgtttattgtaccgtttgttagttgacggataacaatatcatctctgttctttcttttcctccacaccttaaaaaatgttaaatgacatcttatcaatagacaacacctcctatggccatatgaagtgttgtcgcttcttgatatggttacaagtgatatttgctatccaaattgaaagggagcataatttgaggatcatagatctcgcctagatggagatgaataggtgtttcctgcaattacaaacacttgcagcgaaaattagtattgaccggttaatcaggtatcattgcggataatctaacaatacacagtgtcagaaaatctaatcacaactagacagtgcaaccaaacacagagaatataggaattcgcctatgcacaatatagacccgtacaatccaactaagagtggacaaccttggccttataaagagagtgaaaaccgtagggagatggagcactttgcacactagatatgagcaagaccaagaggcatcaacaagagataagcatgcaacaatatgatcaccaaatagctcaacaagaaagcggtaagtgcagagtaatgagagataggagacattgcagttcaagtcagtcgatcctacgtctccgttgagggccccgaaaggccaagtctctcttaaccaactgcaaccaatcatgcattggtctcttaaagcaaccaccaagagcaagctcatgctccaagcgacccccaccggtccaagctcgaatgtcacacaactttcgttcgacaaggcgaagctcgatttccactatttaccttttctcttcttgaggtaaggtgtcaaccttcgcaatcttctcccaaatacacaccacaccctcacgagattctctttctcctcttacaattaagagtggcaatttccccgttggatctgggtccccgcagggggctgccacaacgagggtgtggacggatgcagattttctcccacgggtctgtcgggcggggccctgactttagacatgggcgggggtcacgcccggaaatatacaccatttccaaacgctcagtgcattaatcctcgtcccaggaggcgaggtacacatagacatttttgattattacaagccacacttgcagaaacgtaaaggaaatactccatctatctacttttgatagttatatttcatcttgacacacagaccaaggataaataattctacttattatccatttaaacatgctactagttattcctcgtaaacaagcaattcattaatatttacatttctcgatgcccatgcagccaatcttatgtggaagaatggaaagtcacgtattaaatccgagaaagtcattaagagggtaggttgttggattaaaatatgcctatcaaaaataaattttttagatttggaaatatgcctatcaaaagtagatggagggagtactttattacatgggcgactctaggccctcacactcaaagataaacaaataaaacagcagaagactacggaacagcagcagccacaagcactcgacaacggagcgaactagagatccaagccttcatcttcttcaggtccatcctctggattatttttgtgagcaagagtgagtaccaccaccgtacttagcaagtcacaccggaaatgcaacaataatgcatagggaaatcaaggaaatggcctaatagggtttattttgcataaaaccatagtttaaacattttaatcaggttaaagctcattttaaaacacgatcctgttctaagccaatattttaatcaccaaggtcgcatgagcctgcgaacctgccttagcccaggctaatctccacatgactacaccatcatgatttcaccctcccaaggttttataaaacaaaactaacttttggtacattactcagcttgcccataaccgagggcgcggctattcgaatagtttttaactctaatcagaggtgtacaactttacccacaagacacaacctcaacacgcgttgccacgcgccgggtaccaccacggtactcggataaaggtcgtgacaagactatccatctaggtctacccaaaacatgagaacccgctgaggtttcaccgcccgctggtccctgacaaggtaaaggttgccggatcttacagagaatcaacaatgtccaccccccttacagagaatcttgttctcgagattcgaagacgcttccgatgaggtgaggatgggtggacttcagttcgtcttctctttcccatgttgcttcctcttctaaataattgctccattgaaccttacaaaaacggatcactcggcttcgggtatgtctttcagatgtttctaagatccttataggcttctccacataagtcaggtcttcctgaatctcaatctgttctggatctgcttgctctatcgggactcggaggcatttcttgagttgtgacacgtggaatacttcatgaactcctcccagagatgccagtagttccaattgataagcaactttccctcttctaccaagaactttgtaaggtcccacaaaacatggtgccaactttcccttggtgtggaaacgacgaactccatgaagcggtgtaactctgagatacacaaagtctccttcttcaaaggctaactcccttcgacgcgtatctgcgtagcttttctgtcgggactgggcaactttcaggttcgcttggataaccttgaccttctcctctgcttcttttagaatgtcagtcccaaaaacttgacgttctccggtctggtcccaaaggagtggagttcgacattttcggccatagagagcttcaaaaggtgccatttgaagactggcttggtagctattgttgtacgaaaattcagcatatgggagactcttatcccaacttttgccaaagtccagggcacatgccctgagcatatcctcaagaatctgattaactcgctctgtctggccgtccgtttgagggtgataagcagtgctgaagttcaaacgagttcccatttcttcctgcaatttctaccagaacttagaagtgaattggctgccccgatcggaaacgattctctttggtaccccatgaagacaaactatcctggcaaagtataattcggccaacttactaccaggataagtggttttgactactatgaaatgtgcaactttggttaggcggtcgataacaacccaaatagagtcatatccagattgggtccttggaagaccggtgatgaaatccatcccaatctcttcccacttccattttgggatcttgagtggttgtagcaatccggttggcctttggtgttgggctttaacccgttgacataaatcacagagtgtcacaaactctgctacttcacgtttcatactgacccactaatatttcattttcaagtcttgatacatctttgtactgccggggtgtattgagtattgactctcgtgagcctcttgcagaataagcttcttgatctcaggatcattgggaacacaaacacgtccgccgtaccagatggtcccatgttcatcttcagaaaacccaattgcttttcccctcatcatattcttcttgatctcttggataccataatcacctttttgggcttctcgaatttggtaaaggagtagaggtttcgcccctaaggtcactatttagccataactaactattcccaaattcaaggcctcaagctctcagcacaatccaggaggacactgttcatagatgatagcattgcagtaactcttccgactcaaagcatcaaccacaacgttaactttccccggatgatagtggattcccacatcgtagtctttaatgagctctaaccatcttctctgacggagatttagatctggttgagtgaatatatacttcaaacttttatggcccgtatatatctcacaacggttaccgataagatagtgccgccagatctttaaagcatgcaccacggcagctagttccaagtcgtgcgttgggtagttactctcatgaggatgaagttggcgggaagcataggctaccacttgtccgtcttgcattaagacacaccctagtccttgtttagaggcatcacaatacacctggaaatccttgtggatatttcgcaataccagcactggggcagatactagcttctttttgagcaattgaaatgcctcttcacactgcgaggtctatatgaatttcacttctttctttagtagctgagtcattggccttgttattcttgagaagttttcgatgaacctgcgataatagcctgcaagtccaaggaaactgcgaacttgggtcactgatttgggttgattccaattggtcactaattcgacgttagttggatccactgccactccttgagctgaaattacgtgtccaagaaatttcacttctgaaagccaaaattcacatttattgaacttgcatacaattgatgttctctaagcttctctagcgctaggcgaaggtgttgctcatgctcttctgctgtcttggaatagatcaagatgtcatcgatgaagaccatgacaaacctgtctaaatattccatgaacactttattcatcagattcataaagaagactggtgcattcgtcagtccgaacgacataaccttgcattcatataacccatatctggtcgtgaatgccgttttagggatgtcttcctctcggatccttagctgatggtagccggatcgaagatcaatcttcgagaacacggttgctcctttcaattgatcaaagaggtcatctatcctcggaagaggatatttattcttgatggtgacctcgttgagtgcacggtaatccacacacattctcttagttttgtccttcttttccacgaagataactggagctccccagggtgaagtgcttggtcggatgtggcctttttctttgagttcttccaactgctttttaacttcagctagctctttggcagccatgtggtacggtctcttggagattggcgctgtctcgggcactaagtcattcgaaactcgatgtccctcttgggcggcatgcctggtagttcctccggaaaaacatctagatactctttcacgatgggtgatgaggacataactagctcggatataaccattgaaagtgcattgatccccctagtgggttttggtgattaatgacaaatgtggttaagggactaatgagttcattgagttactttcaggtgcattagcccaaggtgtggaagatggatgcttggagacccccccaaaagtataaaatcaaagcggaccggaactcgagaagtgcatgggatagtttatttattgcaatcgagtttttaggaaaaaccgtactattaagaggggctccaggtgatgctctgagatatgtcaagtactcttagtgtgaaccaagtgtcaagtttccctaggagttatttttacaaatactccatctgtccaaaaatgcaagtccggaacttcctgtcttctaggtccggaagttccagtttggtgaaaaagattttcctaagtgtagtctagaagttcctgtcttctaggtctggaacttcctgtctagtttccagttcaaattgtgagtaacggttagatgacgtcacctcatccagtccgaatctgattttgagttttgggccttgtaattgtgtcgtgggcttagcccaaaggggtgtgcgccctagggcaaccctaggatgtccccaatcacttttattcaatagccgtcatcgtttagagtcgggttttgcttagattattctgttgagaacagtttcgctgctagatcggtttgtggaaccctaaattcgtgtgcttaatcattcatatgcaatttgcttgcaatctatcttgttcttgcttgtgttcttcgattcacatgcagggattagccttctcggcgaggtcaaccaggtttcgacacggttgataaccagagggacgtggtgctgcgattgcggggctcagtagcgtgttcgttcagaagccggattaagttgtaacaggaccatgcactagggttcatatacttctggtcagcaccgctttgatccttgcaatcgccacatcacgtccttcaaggtgtcacgaaccagccaccggttggaccgtccttagcattgctggtaagacacttgtaagagcttggtaagatgctccattgggctgagttgttgaggggcaccactacaccgcgtagcagattattagggataaccttcattgtttgttttttttgtgtttgcaatgacaggtatgagtggcactcgaaatcagcgataccaacaagatgcacgtaatgacagtactttggtgtaacaagtgctaagctctcaaatggagaaagcagagcaatggcagtaccacgaattatttgaaacaaagtttatggttaaggatagagcatgtcgtactataatcgatagtgagagttgcaataacatggtgagttcagatttggttgagaaacttgagttgcctacacaaccgcatcctcatccatattacatcaaatggttcaactcttgtggtaagtttaaggtaaatagaattgtgaagctaaacttttcgattagaaattaccatgatactgccaattttgatcttgtccctatgcaagcatgttctttgttgtttggtcaaccatgggtatatgataataatggatcgcataattttgttgctaatacatacacatttagacataatggtcggaaaatgaaattggtacccatgagttttattgaaattttcgaagataatcttgaaaggatgaagaatggaatcgaggaaaatttcaaagatagtattgaaaggacgaaaaatagaatcgatgagattttcagagataccaggaaagatactatctttgaaagataccagggctcagtagcgtgttcgttcagaagccggatcgagttgtatcgcgactccgcccaaatcgactgtttgtcaatacctatcggaagatcgggacctacattcctcatcagtttcagaagaatatatatggagcttgggaggcacaatatatagtagcaaaggaacgtaattgtactaatcagaaaatgcaaagttgaataatagttcaaagtattagtcaatgtgctggcctagtctagactcaactctagctcaagcaagcacccgacaacactaaggactagatatgaatcaatgcacaactctgcactctgaaaacatactccaaggatgaatggtttttctttcttggtgtggcttttttaagcacctttctgccttttttttcttttttttgtgcggctttttctttcttttttttctttgcacctttccgcccttttctttctttatttatttttttactttttattcaacaagaaccgaccactgacctcgaacatggactcaaaatataaatatcaatattacagggactcaaatgtaaaatgcaaaactaaaattagatcatcttaaaaatggaatgctcacatcatgtaggttccgtttttataaaaatatctcaaatccactacttaacaattctagacagagaaaaatatagatagtcacagatagatctgatctgatccctcccctcaggcgcacagtactcccctcacgcgcgcgcacagtggtacaggagctctagaaatcgagtaactcccaaaccgttggataaaaatttctccaaaatacaaaaacggaaacccgacgacgaaacgattcaatttttcaaggtcccggcaagaaccgacaagatgcaaaactggacctaaaattgacgtacaactcacacgtgataaatcctagacccaaagtgatgaacagatgcaatactcaaaactaaaaattaaatctaaaactaaaccagcactcaacatgacgatgcaatctagaattcaacaaagcaaaatctaatagaacaatgcaacggctcaaattgtctaggtaaagaataaatatttttatgtggcaattttctgattatgggaagataaattacctaatgggcaaccgcgctatgataccaactgatgagggatgtaggtcccgatcttccgatagatattgacaaacagtcgatttgggcggagtcgcgacacaactcgatccggcttctgaacgaacacgctactgagccccaaaatcgcagcaccacgtctcctctggttatcaaccgtgccgaaacccggttgacctcgccgagaaggctaatccttacatgcgaatcgaagaacacaagcaagaacaagatagattgcaaccaaattgcatatgaatgattaagcacacgaatttgagattccacaaaccgatctagcggcgaaactgttctcaacagaataatctaagacgatgatggctactgaataaatgtgattagagacgtcctagggttgccctagggagcacacccctttggcctaagcccacgacacaattacaaggcccaaaactcaaaatcagattcggactggatgaggtgcgtggcttgttttgcagattcccggcaactcggtaggagttttgacgtgggaccaaaaccatctgaaagtagacttcataagctttccaagaagtacttatgggccccgaaattccttctagatcagtgagtaggtccgtttgaagttgatgctgtcaggaggcccgaatccgaatccaaaacgtgtagaactttatctcttgtcttctatggaccaaaagtgacgtggtgatatgaaagaagacttaaagaaggtcttggtttggtccccaatcaacttcttcaatcatccatgtattccttacgctcggtctcttttctttcgcccaagcaagtacctctgcaaacaaaaacacacaaaactcattgtgtcgcaacgtttgttgaaatatataacaagtaaatctaatatagaacataagcacctttatttgattaatacataaggtagtcatggttatatccgagctagttatgtcctcatcaatgggtatttcatccatactgacgtggttcagaacttgcttacaaggaaatacaggcttggcatggaaagtgactcgctggccagtacccctagtcatagatgtggatcagctggcacaatctataataccactgtgcttggtcaaccagttcatgccaagaatgacatccagattcttagagcttagaaggatgagattagccagaaaagtgactccttggatctcaatggttaccaatgggctaaagagcttagcaggtagttggcttcctggggttgatactatcataggtttgctaagatcttctacccttatttggtgttttgccacaaaatctcttgatataaaggaatgcgtagctcctgaattaaaaagtacacatgcatgaacagaattaatcaggaacgtaccaagtatgacttctggcgcagcctgtgcctcctcagccgagacatgattcacacgtcccctcaccaggttgttgttgttgcagttgccattgttgttctagttggcattgcatgcagatgcaggagcttgcggacgctttggctttgggcacttgtcggcgaagtgtccaggctcatagctgttgtagcacacaagtatcttcccagagctatctctgcgtgtcgatccaacctgggcaggggcagaacgctgattgttgttccatcctgagttctgcagcttgttgttcatctgtggacggggtgcacgctgtgctaccgatgaagaaccaacttgagggggaaacgcataacgtggtttctgacttggtccttgaaacatcctagcattggccaacttacgcttcttgctttcaatctttcggtgcttgtcctcctggcggatcgccttgtcgactagcatttggaaatcttcgcagtcaccagagatgagctggactaacaactcgtcattcaacccttcaagaaatttctcctgctactcttcattggtgcgaacgtcctcaggagcatatcgagccaacatgttgaagtcgtgcaaaaattcagttacggtcctgccatcttgcttgagttcacgaaattctttctttttctgtgctacaactccaacaggtacgtgagctctacgaaaagcagtagagaaacgagcccaagtaataacttgtccaactggctgggtggcctggaagtggtcccaccactcggaagcaggtccatgcagttggtgagcggcgaaagcgactttctcctcatcagtacactggatgaggtccaacttcttattgaccgcgtgcaaccagtcatttgcttcgacagggttggttgtgcttgaaaaactaggaggtcggactcggaggaattccgacagctttgactgcggtggagcgtgtacgtgagcttgagcagcgggtgcttgcgggttttgcatttggtggagcaaagctgcgatgaattggttttggttggcgagcacttgtgctaagttggggtgatcatggattggcggaggtggcggcggtggtggtggaggggcgtggccttggtcctaattctggttctggttctgattctgattctgagctgaattcctagcacgagcattgttagcagcagtactccttgtgttcaccatctgtagtaaccaagataagagggaaaagaagaagggagagatcaggacaagaacacgagctattaaaccaacttatttaaattttattaatgtgatgttggttacatagagttcaagttgcttaagcaccacaaaggtatagctatatcacaacgggccgatatagtccataccaaaaagcacacaaggcaacaaactccagcagaagataaacgataaaaacatacgcgcactaagacttcgcgtctactcttgagaacgactcctagaggggctacggtccacaaatggctcatccacgttgctgatgccgtggcgaggacaggcgcttgatccaacaggtggtagggtcttgacgacggttccaggcatcccactcttcaagtccttcagctccttgcgtagagcgcgaagctcattctccttgtcacgattcttctgaagcactgcctcgaacatcctctccgtcatcctgtagtagaccatacggtacttgtccatcgcggccatcatcttggacatgtgcacaatggtggtgtccccttcattgcgggcatcgcggaagtcagcatcttctgcgaaacccaagcgagcagggtggtagtggaacagagtggtcttcaactggtcggagtgactctggcaaagggccccaatggcatggaatgcagcttcttggcaggcagattcacggctgtcaccttctcctgtgaaccagcaactttctagcatcatccggttggagatgatcatcaccttggcactccaaagtggttcaagtacaccctcgtcttcgaagttgagaaccacgcggtactccatagtgatacagtatccgacttcagcggccaaggcacgaagttgctccacaaaaccggccaagttgaagcagcgggtagtctcgaactcaggcatctacaacattttgaaataagagtcaatgaccagttttgtaaagagtggacaggtgaagatagaataacgaaggttttcacaattaaagaactagtttctaaaaaaaatatcatcctaaggcttagaccactggctcgtcctacggtcaaggtggctctgataccaacttgtcacgcccggaaatatacaccattgccaaacgctcagtgcattaatcctcgtcccaggaggcgaggtacacatagacattgttgattattacaagccacactagcggaaacgtaaaggaagaactttattacatgggcgactctaggccctcacactcaaagataaacaaataaaacagcggaagactacggaacaacagcagccacaggcactcgacggtggagtaaattagagatccaagccttcatcttcttcaggtccatcctctggattatttttgtgagcaagagtgagtaccaccaccatactcagcaagtcacaccggaaatgcaacaataatgcatagggaaaacatggaaatggcctaataggatttattttgcctaaagtcatagtttaaacattttaatcaggttaaagctcattttaaaacacgatcctgttctaagccaatattttaatatcaccaaggtcgcatgagcctgcgaacctgccttagcccaggctaatctccacatgactacaccatcatgatttcaccctcccaaggttttataaaacaaaactaactttgggtacattgctcagcttgcatataaccgagggcgcgactattcaaatagtttttaattctcatcagaggtgtacaactttacccagaagacacaacgtcaacacatgttgccacgcgccgggtaccaccacggtactcggatagaggtcgtgacaagactatccatctaggtctacccaaaacaggagaacccgctgaggtttcaccgcccgccggtccccgacaaggtaaaggttgccggatccccctggacgagacaggctccccttgcgccgggtaaaagaaacggcattaatcctggccccacacccttccaaccaatggtctttgttttgagaagatctaaactttcagtcgggccttacccactagacttgtggttgcacaaagaccggtccttatattagccggggtgcgactaccaaagtaactagcttgcaccctgagcccagcccaaaaatatattttagttgcacaaagcattttatcacccatccattgacaaaccagtcaatagtccataactaatcaagttttagttgttaaccaccatagtctagtttatccaaaagttctaggttggaactaagcaggactatgcatttacctaaagcaactagtcagtccatcatgtagggtactagactagtcaagttataattttactagggttcacaaagattatggatatcaaatcaacataatggccataaccaagagcataggaataaataataaaacaatattaataatgaacggtataatttataaagcaatgcaatataagtaaaacaacataattttcacaatatgggattcaacatgtttaaggtagatatgacttgccttgatcgctcacaaagtcttcaatgtcaatgacgatgaagagctgatcttccggaacggcacgatctacacgaccattgcgaagaaatacaaaaaggctaataaaatccatatgaacagaagcaataaagcacataaatgggttctactcattttaaggagaaattagagatttgaacggatcgataccgagttcaaacggtcaagatatggccatttgaagtttaggtgttgtttaaacggaaatttgtaattttgtgaattatttttctaaaggaaaacttgaattattgagagagagcgcacgcggactgggtccacgagcgggtcccacttgccagccgctcggtccactgtgagccgagcacaccgacgcacaggcacggcagcaaccgagccaggcggctcgccggcgacggccaatggcgtggcggcggtgcgacagagcacgggaagggaaaaacggaaagaggaggagacgacggttctcaccgagcagacgcggcagcgagaggttgacggtgttgccggcggtgaggaagaaacggaggggtcgttgtcattcccgccgtcttcgtgctcgacggaggggtggacggggaagaggaggaagcggcgaagcggatggtggcgactccgggctccgacgaggtcccaaccaccagcgaggggcggccggagttgcaacggcggcggcacaagaagagagcggcgcggcggctatggagagaggagggagagggcggcggtgtgtggggagagaggagggagtcggggtcccttttataggccggaggggagggagagagacgccggggagggagatcgatgccggccatggtggagctcaccattaaagaacatcatcgaaatccaccgcgaataatgctggatcgagtgggaaattatgggggaattggagaggatgaggtgggaattaattcccctcaattaatttgatgaaacggcgagtggaggaggcgaatcggaggttgccgtcgcttggaattcggacgaagagagagaggatggctggaggttagggatgacgagtgggacccacctatcatcgagaaggagcacacctgtctctgactgggcgcgcagagaaggcaaaacagacttcggtctgtgggagggggaatgagctgggctggcccaaggagagggagggggtggggagagaggaggaaaaagtacaccgaaggtccctcaacttgtcgtcgggatataaaatcgtactcgaaccacaaaagcagacatgcaagatcccttaactatacaaaaccgatcaccccaaatcctttgtgattttgaccccggttttagtctacgtggtggctgagtaaatgtgagacccacgtgggccccacatgtcaggtgtccacatcaccctctctctttcccctcttctctcccttccttatctctctctcacttctctacaagctagccggggcgaggcgggagggcggcgccgcgacggccgccggtggaggcggcgggcgaggggcgagctggagcggtgtcgcacatggagatggccgccagggtggatctgctcaaggcatggcttccagcaatcttcaaggtacaagaccccggatgcagaccagggcagccgcgcatcctcactgtccccgccgccatcgccattgccatcctgcgagctcggtccctcgtacttccagatcaagaagcatgccaggaccatgcaggagtagacccagaccgcgcagagcatgaacctccagttcagccaatactcaggagcagtggtgtcgacggccatggctgatgatggcattgctgcagtgacgaggcgttatgcagccagattcataatacaggatattactactcaaaccatgtctgttcttcaactgcaaattagattcttgcgccaagataaagagaggaattattattgccgacgaagggagaaatgatcagtactacgattcttatcatttcaagacacacaaaagaaaaagaaaatcgacgctagccagatgctatatatcctgataccctgcaacctggatccccacgcatgcagatggtaaagatgcaaatctttatttccatttccatgattccatgcacacaaaaaagaaacgaacaaatgccccacgcatgcagatggtaaagatgcaaatctttatttccatttccatgattccatccacacaaaaaagaaacgaacaatatagagaagaataccaagaaacacgcattggcgcagaggagggtggaaaactaacccaatctcaacggtgattgggttcttgtttcttgacttctccaatgcctccccttctccaaccttttctgccgccgcctctctctctccatcgattcctctccctctcgcgacctcgaacaaaccgagaagaagccaacgaaccaaccaaccacgtacgtgctgcaacgccgccgtgttaggagaccacggccggtacatctccgcgagcacccggcaccccaccaccgcgtcccaccgcgcgtacgcgtcgccggcgccgctgccagtgccgacgcgttcgccggcgcgcgcgacgacacgagcgcgcccacgtcggccgagcgggacgaggaggcggagaagccgcagcgctcgcacgccccctccgccggcggccgtcgcggcgccgccctcccgcctcaccccggccagcttgcagagaagtgagagagagattaggaagggagtgaagaggggaaagagtgagggtgacgtggacacctgacatgtggggctcacgcgggtcctacgctgactcagccaccacgtagatcaaaaccggagtcaaaaccaccgaaagattctagtgaccggttttgtatagataaaggaccccgtatatctagttttgtagttgaaggactttttttatcccgacgacaagttgagggaccttgggtgtactttttccgagagaagagaggggtggccgggctgggccaagagagggagagatgggctggaagcagcccaacaggaggaagatgatttcttttagcttttcctttttataaaattctttaattgtttttgttgccctaaaattatttaaaattcaagtaaaaattggttaaatatttttaagcatggggaatttattaaaaatgtccacaagccaattttatataaatcttggtgagttttaattgttggaggctcttttaggcttttaaaatttctagaaatacattaaagcacgatttaaatttagggcgattttcagggcgttacagtggggatggggacaggttgagatctccacccgcgggtccccgtggggccctggaagtactaaaatcgatgttgagttccattggtgagctctagcctcgactctagcatgtctgcctcctcttcttctccaaacatgtgggtcctcgacttgtaactaaccccagcccaagtagggtctatgtggggtgcaccctaatctggtggagcacggtcttagggacctcttggtcgtcctcccatctctttaaatagctaggtaccacttcaaggttccttagatttcattagattaatgttttagccattgctactttaccttgtagttacatgtgtcggctagaccacctaattactcgtctttagaaccccaacttattgtgagatttaattccttttcacaatttagattacttttatcttgttcttgcttatttctttgatttacttgtaaaaataagattgatctgcaccgatttgatcaacaacccacggagaggtatatcgatcgctaaggtgcaacacaataatggcctgtacggttatagtccgaccgtcaacttctcttccaaatcatagttatctcaactcactgaaagatcgagccaatcaaaaccgtgatcgtatcaaatggatctcaaggtttatcaataacactacctatttatagccccaactcctccatctttggtaccgttccttgagtctaccaaaagttgtatagggtcaaagaaaatctggtatcacactgaattgtctaactctttatgctttttgaacggtaaccgagcaactagctattatggtataaagaggtggacaatctagttgctactccctccgtatcttaatgtataacgccgttgacttttcgatcaacgttggaccattgttttattcaaaattttcgttcaaatatgaaaatatttatatcatgcttaaagaacatttgatgatgaatcaagtcacaataaaataaatgataattgtataaattttttgaataagacgaatggtcaaacgttggataaaaagtcaacagtgtcatacattaaaatatagagatagtgaggtagtatgtgattgtccaattgtgcttctcagaaacaatttggaatacggcagaggaccctaagcctaagggttttctttttatggcttggggttcatcttccaatccaaccatacaaaaaaaatttgacactaccaataagacggtttcatctagtttgtaggaggaacaaaaagtagtattgccaaaaaatttcaaaccaattctaataaaatcgcacattttttttaaaaaataaatggctaaaattttgttaaggttacattgttaacgaacaaaggacaaaccattagaatatactagagattggggcgcgcctttgcgcgccgcctgttcacacagtgtgctcgctatgcaagaattttttagggtgctgcatacacataaagataaaggtgaaacagaatatgatagcatggttgttcatacaggacagggtgaattgtctttggttgcatataagtacaagcaaaacaaccaaagacagtacgtaaggtaccgtcagctcctgttctgtaacagcacgctggcataatagtttgggcgtgatttttacatggaaattgagtacccatgcaaagcatacaaagaatgatactaacagctatagaagtagcagagtgaaaatatagcctacgatattaaaaggataacagcttgtgttgcatgagcatcttgctcacagcacatctattgttgcttgcagctgattagtctggtggaagtgaaagatgcagattgttccaacttgtatgccgttgcttgttggaaaatgggtccatcctgatttcaggttaaagcgcttttctgtggagtggtgaagaaccatggtggttgaggagtgccctggaatccgtacttcgatctgcgatgtcttcttccgcacgattagtgcaatgtatgtcatagagaattgctttgaaaagtgctgcatgataagtatatgttagtttttaaggtaagaggtatataaaggggtagtggtgcagttatcttaccaccttatcctgcttcatgaaagttggatttatggttgtgacatagaattcgtttgaggggtgcagaaattgcgcaatatctttgaagtagtctttgagttcagttgatagattgatgtccctccccggtgcagaagcacatttcattgatagtgcgtttggtgttgcctttcgaaagaggagtgaatgaatacatcaatgcacattaaaagagacgcaaatcaatggaactgaaaatagaaagagaagtatctgtacctgtacaagctgaccctatatcggcttttaatttctgttgcatggggtgttgcatgtgtggcttagtcttggttctttttttctgcaggtgaattggcgttgcaagcattaacggaaatcaaaagtagagagtggaatcagtaatgtaatagtttcagatatggtgccatagatgaaaatgatttgttgtcttgataggagacggaaagtgggttgaagatcatttacctggtggttttggtttctgaagcgcgtttttctttagctgtgagttgcttggtttgcttggcactggacatctaagataaccactcttggcttatatgatgacatgcatcttggagcgtgataagactttgaaaaccacatattctttaagctgcaaaccagtggcttctatgaactggggccatcctgtagtgatgtatattttgccagatgctctctttagttcaatgtagaccattaggttatgggttgttactaatttgagtctctggccatcctccagctgatatccttgtgcgattgcagctggtctgcgctgcagaattgaaatgatgtattaagactggcgtgtattaagctagactgtatatgttatatctgttggtaaggttaccacatagcgctggtttgctgtggttagtctaaccgtgaaaaacctaggtggattcatggctgtatctgcaaaaaaaaaaaggtagttaaaagaaatttataagtgcaaatttaacagtggtagggaagttgcaatgtacacagtgataaacaaagggacagataacagagctgagattgcagaggagagtgttaggtgcttgttatagtgtagtggtaatgagcactgatctttgttcttcggtggatttattcagatactaaacatgagttgtatattgtgatgtataatgggtcaaataggggatgagtaaaattatacagcagtcttcttattgttgaaaaaggctctgttttaagggctgctatatggctaataccatttttatttgttgccgaagtattattttctttcggtttgtatttgaaggaatggcaggttaccaatgatttaagggctgatatggttaggtttaaccagggcatgagccatgcgcaaagaatgttggagtttgcatggacatgtagtttgagctacagtgatctgtaaggtaggaggttatttatctggaaaacaaactttagcattgaaattaatccttgattatcctttagcgtatcatctctatgcatagcatatttatatgaacacacgaatggtgtttcttcatagcgcttatatattctgaagggtataaggcacggcctacattcgaaattgttactcaggctagctaacaatattttcaggtccatttggcacatatgacatcgcaccccaccagcatgtgtgaaatagaacaataatttacctccctggaagtatcagcaccaaaattcatctttgtggatcaggccatcgtcgatgatggagcagctgatcttctactccaactccaataccgtaaagtcagtgacctgcactgaaaaacaaataaatctagaagatgtaaaacagcatgctaaaatgtttaccagaaagagttgtgacttgttaggtacaaacgcagcagtacaattttattaattgcaacctaaatcctcctttacatcacagcagaataaataatcaatggcaatatattttgtccctctgaatcagaatgtgggtaaatgcactacccggtaataacccacacatatttactaacccacatatcatggttactgaaacatctagcattaatgttctgaattagatgaccatcctaaagatttcctatttttttttttggacaggctcccagtttgccccaaggactgcccaaactaaactgaaataccatcacatattctcaatttaaaatcagttccattcaatcatggacctagagctaaatctttcgaacttaaatatatttaaaactgaccttcgcgtgaacaagaatcacagaacaagagcagagcacataactaaggacttgattcaaacgcgtccattgcctgtaacacacagagagatgtagggttacatatatttaataaaaagctgtcaattgaacaccatagctaaggaaatgcaagagagcacagaccagtgaagaccgatggcgtgaaattgtagcttctatttcatataggaagctcttgtcctctgagcaccagcaggattgacggtgctacgaaataaaaaaaataaatgcggtgagcaaagcacactaacggtaatgtgactgaaaagaatacgtagataagaagtctataaagcatggcatcaagaatgctgtaccccttttttttcccatcaatggaggctaattctgcaccctgagaataacagcacaaaagttgttatatctatcaatgcttagtcaatagccgacgataaatagtatatttcatgtgcaggtaaggaagcactgcatagcggaaaaacataaaccacataagccctgcatacatatattaatgcagcaaagaaatacaaaatcacctttctgaaacaacagctgtatctatatcctttccttcggacgcgcccacctcaaaagttagcttcttcgatgcacctagaggctgccacaataatgtataaatcagaaccttgaccgaataacaaaaaaaaaacaaatggtctgtctttcctaaggtaggagcagaacatacaaggcgcataatggggcgtcgtttcctgctatcagcatgggctttctccatatcacccacaggggtattagaagaagcaggcggtgtcgaagtatgatcaggacactcactttctctacatatacttgaaccaccagcaaaaggtgaaatgacagatgatgtgagttgcaatgtctgatccctaacctgtggaatagtgccttgtctgccaaagaagtttcaatgctattgacttgaaacgcgatgttcctctgcatcaagctcctttcggtgacagaaacgcagaaagtgaatttttgggacacaacactcgcaatctctcgaggaatattgtctgatcctcgttccaacctgacaagattcattccttgctattgttgcacagatcttccaattcttactcgtgggagatatatcacagaacagatcaaaaggcatctgaaaaaacaggaagaaacaattcgatgtacataaaacgggaaagtattaaacaaggaagtaaatgcgatgaattacctatgggagcactgcaacacaagacaggagaggaatcacagtatagctaactaagggttgctaattttaaaacagctgtacgactccaaaaatgtgaacaggacaatgatatctgtacagaacagctatagtataggcaaaaacatatattattactatctaacagcagaaaatatctcgcggtacacgatgttccaagtgcgagtagtgcaattgccattgtcatcttcaattaacacctttaagcctgcgcgagaagtgactcgggaaagagcaacgtataactggccatgacaaaaaacagggtttttcaagtaaataccaactgaacgtaacctttgtccttgacttttatttatagtcatagcgtagcagacacggacagggaactgccgacgttctaatgtgaagggccattttttgctggtcgcagataaggttattcttgggatataaacagtttcccccgcattagaaccagttataatacgcgcttcgatcaccctatcacccaagtttgtaacaatcatccttgtcccattgcaaagcccagcggtctgatctaaatttctcaaaagcattatgggaacacctatttttaggcacaattgatgttcaggataattgttaactttgatgctattcaaaaattcaattgggtataaaacatctaaatcatcagacttttcatttgtttttgcaagacgatcaaagctcaagtactctcttgcttcaccaggaaaaagttgtaaaacccaagagttaatagcagcacacacatcattcgtaggagaaacaatagcacggtcttgcagatatactggatcattgtactgttcagcaaagttggtgtaaactgcagctacaatagctccaatcttttcatcattattcatgaccaaaagatcatgagggatttcaatccaagttggttcaacatcgctgccgtaactacacgctgctgctgtgccatcaccgatagaaaggatccaatcactgaattcagcgacttcgcgttgcatatcagaatctagagaggaacaacgtaaacgcatgttgatcgatagctctaaaacacatacatatgaccaaagaggagattttgatattgtagcatcaattgttttcgatctaacgcctccttcaacaacaggcaagatctggcgaaaatccccacccagcacaactaccataccaccaaaaggaattgatgcagctgaatgatcatcttcagaaagaatatcacgcaatgttctatctaaagcctcaaaacatcgccggtgcgtcattagagcctcatcccatataataagagaagtggatttaataaggtctgctaacattgtaccacgctttatatggcaaattgttgtttcatcaatttctatcgggattttgaatcgtgaatgagcagtcctaccacccggcaaaagcaaagaggcaactccagatgatgcaacagcaagaacaagctttttttcagacctaaggtaggtaacaatacaattccagagaaatgttttcccagtaccaccaaagccagacacaaagtagaaagcaggtgattttgtcatgacactctgcacaatgcgttcatatgcatttcgctggtcagtattaagcttgctacataataacggagcattagcacacaaatcatctatatcataagacatttcatcatcgatcaatctatttgctgatccaaaggaaccatcgcaattcacagtaggtaaattaaaagatgacatagcaacaccattgcgaagaaaagcatgtgtaattcttgcagaaccatatttctaagttcattatcagggacagaatatgcagcattatttaagctttgttgcaaatcaaagagaatatcatcagacatcgcatgccaatgtttattgaaaaatgcagctccatcagcaataccacaatgaacaaccatgagcacaaagagcgatctgagttgcggcccggtcccccagctcacagcctcatcaaatgcaaatgaccactctctgtcatcaccaagcaaccctctagcagcacaagcctccttaaatgtatcgtatacgacatcattgtatgttctaatatctgcatagctcctagcgcctctcacatacataagcagcattctcatgaaatacccttcacctgcagaaggatggacatagtacattcgaccgattttataaccatgccggctttctttccagctccttgaattttcttcccaagtaaatcgagtaggatactcgcagtatgttaagtcacgtccttttgggaacaaatcattagcaacaaaccattcagttaatgttgttttttttgtaagaatgcatttgaaaccaccgatgccaggtttgcgtctgatctaaagctaaccgtgttcatgtttggtaaatggcatgctaaacgctcaacaggagggttcctaaagtgaataacatactcaaacaatctccaaatacattggttggcacataaatatcgacactcaatgaagtcagctatttcatctatcggtgctggcacagtaaaatcagaaccacgcatcttttttctagaacctgatgaaccagtatcatcaatcgcaacgactcagctttctttttttgatcctagaaaattttatattggcatgatcgggtccttttgttacatacttaaatagatacttgatcatctttgatttgttgcaccattcaacatttatatgagcctcaaatttacgcagcaatgacacattgtatggcacgaccgaacgattatcaagcttgataccatttttaagcacatgcgaaccattgtcacgccgcctataaacaacaaatcccttgtcatctactgttgtttcagagttaaaatcctttgggtattttttagaacaggatccatttctcatgcaagggcattttctattgctatcaccgcatgggccatgcatcataaattctttgaccaacaaataatcaagttcgttttcgttaggatcagggagttcagcactgatgtatgtgtcgacgatagatggtgttgcatcggtgcttggcgcatcacgccacaccagtatatggacgtgcgggaggcctctcttctgaaactccacgctgtaaagcactacaccatatggtaggaaaaccaaccgaacaaaattaataacacaacaaaaaatgcaaaccaaagaaatagcaaaaaagggaactaaccagcacgcacacgcccaaagggaacaccagacataatgtcagaaaccatttcatcaagtttcattttaaaaaccctggcctggttcgaactgcaacgcatcttcaatttcttgccactttggattgcaggtaaaagttgtaaaaatatcaggtgcgccataggcacggcaaatagccactacatcctgataattctggtacatgtatcgcctaccaccagtgaagcttgcaggaagtattcgttgcttacctacgctcgcaccatctaaggaacccttagcaactgcatctgtaattccttgcatgtgttcgcatctaagttcacgttgctggtcagctatgaatgttaatctaccctcttcaacacaagcataaccatctacttggccttgagaggataaacgaccgcaacataaataaggattaaattgatctcgacgataatggcagcagtaacagtaatgctcttgcatagaagcctttgttcgtatatcggtacgattcaagtctacccctcttaaatttataaccaagctgaaagccacgctcaccataaggaaacagaagtggatactgcaaggccatataagcaggatgtaagctagaaacatggagtgggccaggaatgctttggacaattatatcgcgctttgcattctccaacgaaaaatcacctacaattaacccagcaagttcatcggctgttggcaattcgtactgaacaggcccattctcatctgaaccgactattctaattgcgaactgctcatcaccattatcagctaaacgatctctagcaatcctgaattgcttaaccaaaggattacaattgtccagcatatctagcaattcagcagcaatctgaggatctaaatcacagtcttcgacttcttcattaagaagagcacgcatcctattctcgatctcgttttgagtgtcataataaatatatagttgagcaaactttagtggggtttcttcgctaggtaaaagtgagcctatacgatgatgtacttgaccatttattttaaagacataaggaccgccaccgcgatttaagctatcgtcaatatttgcacccattgaagtgaaagcaaacagcgaattgtactgccttatgtgctgcaaacaatgcctgcttcgagcatccccatcgaacttcaaaagcgaatttaaaggttctggtggttgtgcaaatggaggaacaaaaattttgccgcctttgcaacaaagactataagacatacggcgctgagttatagctgaatctctcttgcatcgttcttggtaccagaactgagcaccacacatgcggcactgagttatatccttcgacgtctctatatgcacatgcaggtcaaaaacatatctatatttagatataatgtcggtgcacgataaactaaggcatggaaaggggtaaaataaagtggaaataactttttaaaaatttgccgtaatcactatcaaacctattggaagacagggacgatatacgagaaagccttttacctacaggaaaaatcaacagacaacctgcaaataagagaggctgacagggacatatgaagggaagtaaaaaaaataccaagcataaagacctgcagccaccagtcgtttgagagccaatttttttgatcgtatctgtcgtctcttcgaagagtaccaagcaggataaatagggaaaaacccatcatctagtggagggggggaaatcacataaacaaacagaggggtgagcagcgatggggcacaacagcagcacaataggaacaaacaacgcacatacttttacgctgcgtagcaactgtttcccaggcatattcaccaccagccgaaacaggagagcacgctaaacaggaaacaaacaatttaacgatgacacacaacaagctgtggcagatcacaaaccagctacaaaggaacaaatgatgataaagcatacatctaagagaagcactatggcgttctagcaatcggcggtcccgtcgacgaagaggtgcaatcacatgacccccctccatagagcgactaaacgcaaagagagtaacaatgcaacgaatattaaaacaacacatagccaacaaaataaacataatggatgaacaattgattaacacacaaaataacagagagtaatgtatatacctccgttgatcaaataggatagcagagagtaatgtatatacaaaagaatgctgggagatataattaatatgctaataatcagacattttcaaggctagctttttacctgtactcttgccacgtgaacttgctgtgcaagctggcttagcctaatcctacttgacttcaactgttgaatgtaagcctgaacaataaagcagtgtatatatatactcatcaatacaaatagtatataaagccacattaaattttagcagaacttatcaacttgtgctcgtatgtgtccataaaacaaacatatgaaatgaaataatatataattcatgtttcaaatagccagcaccctaataatataagactcaccgcataatacataagacccatgtttcaaatagccagtaccatcataagataagactcatgtttcaaatagccaggaccatcataatatataattcacacctgagaccataaagaaattggaaatgcacatatgaaaagtgataatgtttcttgcattggtaggccggtcaaattcacaataaagccagtaaaaataactatgtccttcagcacataagtcccaaagaaagagccaaaaacaaccgcatcacaaagtcggtcagcacatttaatcgcgagctagcactccatgcatgcatgtagcaaaacaaataaagttgataacaaaagcacatatgacagcacttgcgtgaacaacatgtacatgtcatatacactaacattattgttaggatatatgtttgtacttttcgtaaagtattgtacgtttctgcaagcacatatatatacaaaaacacacacacacagtacatgcaggagagattcctttctgctagcttgaattaataagctgttgagtttcttggttgaccgactaaccttcttactaaggctacttttccttggtgcctctctattctgtgcaagcctcctcagtgtctgcagaatgtgcatatatatacacacacatattcacacaatcaagctgtcagtctcaaaaaaaaagtcataaaatatgcaggttatttcctgcagacagggatcgttcaacctcctaattacttttttatgcacttttgtgtgctgttgaagtgctgcggagggagatcatcaaatgtatcaaaggtatggctggatggatgattgactcactaaccttagggtctagtgtcctccttccttctctttctagatcattagatgttgctgcacccttcccactgttgcttccttccttctgcaaggcacatttttttggccccttcagaagacacacagaggaaaaaatatatatacatatatacagcatatatagccggatttctatccactgtctaaaaaatataatatgagagagagagagagagagagagatgaataccttaatgaggctattattcttgttatccttgacagagttaggcaagggaacaatcgatcaaataggatccgccatacaacctgcaggcaatataaacgtgatctagatgctatagcatatagaacaaaaaagcacaccaaattgtagcgcacaggtaagcaaaaaagacaacaaagatgctggctcgaagaagataaatgggaaaggacctaacccgaacaacacacaatgacaaggatcgaacagaggttcttcaattactttgatagctcaaacaaagactctaccataggtagaacacaaattccctagctcaagaaaagctaaactgttattgtgtcctattttgcagcatatgcatcttggtaacctagcagtgcactcaactaaattctgttgggcctaatgtatgtgatacttataggcatcaacacaatgcactgaatttagtatgcaagtgaattatgatgaattttgtgcatataatctccagtaaaaaggactccaggatacacctaacatatactgcctcagaaagagcccgccgatcttcatgtaacacaagtttcttgaaatctccccatcgggaacacttgccttcaacaaaggctttgatctacctatctagatatttgctttaatctggaagcagtgtgccaaacaaatagtggaacccttacgcaaaggtgccatagcctttaaattgtaaactacattgactgtatagatgatgttacaaggcataaactttatattttcactgcactatatagaacaaccaaatccatacaagctgtagaaaatccaggccatgaattactgtatggtggaaggatatgggctgaataaaggtaattagccagagaatcacatgcaaaaaggaacagaacacatttaatttgtctaggacagtaaactatacgaaggattgaattagacagtttcatttatataaactcgcatgtaacaggaataagggccaccataaatcaactcaagtggtggttttcaacatgaaacagtgggagaattaactatcaaatctgtagttcagtgacctaatgatcaggaatacccacctcttgatgcatgaaaagcccaatagtacaaccttatacttccctttggcttcttgcatttaccatcctgctgtaatgatagaaggggaaacattcagaacaacagtaaagcatatataccgtctttcatagtagtcatcatgtaacaatctacctctaataaatcaatttcctggtgaatacattcagataacaagtgcatcccctaaatcaaaagaaggattggaggataagatagttaagcaaaacaaatctgcaatcacaaggatttttttcacacctacataactattctaatctaatagttaattaaaataaataagcaagctgatgaggaaaccaagataattaactgtagaattcccagaggataatctagcatgttatggcaactctatgctgtacatgtgaccacactgaagcactacatgcactgatgatcttgcataatgcagtatcattttattaagtatgcacctgccctcagcgacctgatcactaacccaaaaaaataaaaagtaaggtggtaacaatattcaatatatcactgcttatttttcttgtcaaatatctgataactgctcagtaacatgacataggaatagctcaaatgttttagtgatcatattcctcatgcagagcgcccaaaatagatattttgagctgtgtactgaccctgaagctatataatctgcagatataactgtgcctcaatgccacttgttgcaactaaatgggcacccacatgattggaagtaatcagtgcctatcaacaaagataatgcaggtatgaggtgaatttacagttgtggttggcgagggcacccattgcggaagacaaagggaaaaaaattagactatctagggtagcaaaaatctagctaatgagaatctgattttcctaacctctgacttttaatttattttattgatttaacaactacaacttcttgaaatctgaataaaaaaactaaattatttaagagaacttcaaattctaggaaaagttgtagctgacaaaaatttccccaagcatgacaacctcatgaatctactccaaaatctctatgtagaattgtcatttaatatcagaagtttcaaaatagaaaataatatgtaatcttatgtttcaaagtgatctatagaatattcttttctaatgggttggaatcatataaaactcctataatttccataaaaatcggaatgggcataaatttttactcgctctgatctaaaatgtagttaatcttatcaaatttatggtactacgcatcaatattctacgacgaaggcagcatagttttacttctgtataaatattcaggagtatcgtgcccgcactctacttttcaatgtaatatcttcgataagctgacccatttcaactaccacctttattaaaacctaataaaataaacatttcacacaatgtggtgcatacttgcttcatacattgacttgtacttgtactgtctacaatatagttcatattagcccttaaaatgtaaccaatgaatccgaaaaccagaagttccagaagggtatacaagcgcacaatatcagactatcaactggaaaatagcaacgccatatttaaatataatcaaatataattgccctgaatccacaagatgctgtcagaaatcacaaataggataatatgacatgaatatgccaacatggcaacaactaaaaaagaaatggtagtttagtgctaccagccctctggacaaacgcattgtgtttagtgtttactcataagtccggaagataaacgaaagaacgagggcaacctgctcatcaccgggaatgtccgtgccaccatctcgtccctgcctcccttgacctccacatctcgcacaccgccgtcaccttgacaccgcaaagccacacgagtcaacaagccaaaacgtgattcgaacaccaaggaaaacgaccaatggggttgcagggagatgcgcttacggattcgaagaggctgggatcggaggcggggttggcggcggcggcggagtccctggatgcggcggagagggcgctgaggtagaagtcggacggagacctacctcgaacggcctcggaacttagggcggcgaagcggatcggatcggcggcgcacgccctcgccctcccccgggacgcccccgcggcgctcgctcgcacgcacgcactgctaggctaggatagggttcccctcgagctccagcagcaagcaagggcgagatgggagggagagagagcagctagcgcaagcgaggagagagaaggaggtggacgcggcggcggcggagctggacggggccgccggggcggaggccaacgcggccgccgcaacggtggtggacgcggcggaacaagggcgagatgggagggagagagagcagcgagcgcggccgcgccggagcgagaaggaggcggccgccgcggcgggggagctggatgcggccgccgcggcggaggtgaacgcggcggcggacgcggcggcgcgagggggaggcggcggcaacggcggcgtgagagggagagtgacggcgcaggacgagagggaggagtcgaggagaggcgggggaggtggctagggctggggttagtgcgcggaactttttcgaaaaagaccctcgactttctatttttacagaacgctcctatttcgcgtttgtcccctcctgcgcatgtaatatccggattttagaagggcccttacgcacaatatcgcctcaggggcaccgttcggcagggacctactcggaattacgaacaaaccgaagggctttctcgcaaaaaaaccaacccgggcactgtaggactagcttttcgctgacgtggcacgccccctcgctcgccactcatgccccgcataatatttcccgatatggaaaaatgatagcaaaatgttggttgtgccgtgcgcttcctcgtgcaggaaaatatcatatatccatttcggccgagattaaggagtttagcagatcgtttgtcttttgatattaattttgttagtcaccatcattttttttcttttgatattaattttgttagtcaccattgtatacttaggctcatccttgtgcaaagcaggtttcacaaggtttgattgagtgcgcgcgccaagaaacaccgtagttgagattttgctcaaagacctactttaattaagttagtaaaatctccttttgctctaaatcccaatgaacaaggaactcaacaacttgtaatttggtgcaaagaattctttatgtggaaacccatactcactcaggccacgcagcatcacacggtgagagggatgaactggacctgatgcattggagtgcaatcagggcagcagccatgttcgagtgacctatcacaaaggaggctggatcgtacgaggatgcaatggtgctagtaacaggatactgggatagaactgattgcggcgtaaccgtaaatccatgagtattttggatacgtgattacacgaacatgtggccctgcttgtgattggagggctcgtagcatcgactactccaaaaatcatacaattgttgtaaaatatatacccgaaccattatgtcgaggggattcctccggatcgatctcacattgataacgcgcccttttccacctatcggtagtttgagagaagtttcctagctacattctcatcagccaaatagtaattagtagctacaaatcaaatactccccaaacaagcaaagtctacatatgtcccaaaatataaaggattttaatccattatagaagggaggtagtaaaaactgaaacaaacacagttgtccttgtccatgaggctatgtgaaccactcattttgatgcggacatcactccttcgggaattgaccgaacaatttgacgtttagaatctgttccggcgctacgacgtcgtatttgggcttgtgggccgtgtatcatgttggaacccattagggttgcatcaagggttgtttgcacaaccctaaactctatatatcaatacccgtcgtcatctctagggtttgggtttagcaatttgattgtaattcaattcatgatgatcataagtagaaagttcatgttcttcagtcattgataaacaggacagtactcaacacaattaccacaaaatatacaaactccgaaatcaatactataattaagcaattgtttccttttaatatccttttcaaatctccaatccacaagaggtagatctatagggcatacgcgaacacatacttcacaagcaatacatttatcaaattcaaagtggattcgcccccagaaacgctccgatgtaattgatttttcataggggtagtgaatcgttataggtaaacgatttgtgtgggataaggtaattatgaaactttgaccaatgtaccttgctgtgcgtattgtttgttgaccataactcatgaacccagttaccatagggaacatattcgaaatatctatgaaaaaggtatgtttctttctcttgtttgagagaacttttgtgttgaaaatattcttactgttattgtattatcttattttatagtgaaacaagttgggaagaagttgttaataagagattgcccagggaaataggtaaaagaaatttccatccaagatttaataactaatccattctcatcctgggtaaagtccatcttattgtgatagaaatgaagagaaataaataagctttagttaatgtaataaagatactcattgtcatttctaaaattccaaccattttattcatttggaaaaatccaaaaaaggatatatagggaatagacaaattccacccgcctaagcagagaactgttacaaataaagaggaaactaataaatttaggtaagaaacaagataaaataaaccatatttgatagcagaatattcggtttgataacctgctactaattcttcctccgattctggtaaatcaaagggtaatctttcacattccgccaaagaagaaattagaaaaatcagaaaacctataggctgacgccaaagattccatcaaaaaaaccatattttgactgtgcttcaactatatcaactgtacttgaactgttggataatcatagtcgacgataacatcccagttcccaccgctattccaaaaccgtacatgaaaccttagtttcatacagctcctctatgatcaggaaaaaaggaaagtattgtttcatttcgttattatcttcttgggcgtagttagaattatctaagataaaatcgatttcaacgtcctaaattagaccaaaggaattctatctgctagaataataaaaaacgcttcggaattcatctcatcctttataatataatggtactttttctttgttcaacaataacttaatcttggaataaaacactcgttataacaattaataaacgaaaagagttgggtattagttcatgaagaattctgtatgaatatggataaacgatggaaagaataaataaagatcttttttttattgcattccatatcttttgtcctattcttctttccccgaggagtatttaaaaagaaaaaaggaataaagggttaattcgttcttgatagccatttccttaacaagtgaatgggaacatactctggatcggaatccgaagaaagtactacttgctcatttccaccaatttcaagtccttattatgattccttttatgaggaaaaatatctaatgctttagattccctcattactaatcctttatgtactttagtgtttctaatccctcactaacttttgatggattcccttatgattacaactttctgtatcaggaatctcttattattgcccgcttcaagatatgatgactaatcaaaaaatctcaaccttggggtaaagaatttacaccgcttatgtttacttccattttttcttgtacataggaaatgagattttttctttttactacaaattaataagcagttttgtttcactcatatagctatctagtttaacttactaacctgaatatagaataagaaaaggaggataaatattcaatgaatttcagaggaaaaacatcctattttaacgaatcgcacgtagagatattgctagtacacaaaaagttaatgggatttcataactaatagattgagcggcagctcgtagaccacctgaaaaagaatatttattatttgagctatatcctgccataagaagaccaataggagcaatacttgaaatggcaatccataaaaaaacaccaatactaagatccgctaaaacaaagcgatatcccaaaggaataactaaaaaacttaataaaattgatatgactgctatagacggtccaatgctaaataagggaatatcccctcgggatggcaagatatcctctttaaaaagtagcttagttccatctgctatagcttgaagcagtcccagggggccagcatattcaggaccaatacgttgttgtatcgatgcggatatttctctttctaaccacacaattacgagtactattctattgtgattcccagtaagagggtcaaaatgggtagaatccatatcagtccatagacttcttttaataattccaagttcgaaaaagaattgatagcttctacatgtaccctgtctattatcatttcaacgatcaacttctcccataatgatatctatactacctaatatcgtcatgatatcagccaatttcattttttttactagctgaggaagaatttgcaaattaataaaaccgggtggacgaattttccatctccaggggaaaagactatcatctcctaccagataaattcctaattcaccttttagattaatctatcaagaatagtttcgccgctagatcggtttgtaagaccccaacttgtgagcttaatcattcatctgcaattttggttgtattctttcttgttcttgtttttgttcttcaattcataagcagggattagccttctcggcgaggtcaaccgggtttcggcactgttgataaccagaggagacgtggtgctgcgattgcggggctcaagaacgtgctcgttcaagaagccggatcgatttgtgtcatgactccaccaaatcgttgattatccgaacctttcgaaaaatcgggaacccttgtccacatcacatttcctcgtgaaaatcctgccaatctaagtacatatttatcgtgtagctacaaaagttgacatatcatctgttctagtaatataaacataaattgtaaggtatagatgccacactattaatatctagcacaccactctcccacaacttgttagggctcgtgttaagttgggctacaatttcactgttttaccatgccatctgaggtagggagacaaatctatactcaactctcctccctttgctagctgagcacaaatctaatgcgatattaatggtccgcttacatcgtcttactgtattcgctctaatacaactaagaatgatccgatagttgtatttttatatcggtaactggcaatggctattaccctgttgaagtcgctcaatgaggttagtcatgttctcttgccaataatacaagagccgaaatttagggcttagaaatatgatgattgctgtcatatttatgtaatattatgttgctgtactgtttttgatttcatataagagaaaatgttggaaaatagagaggaggatcaaaattagagaacttaggagtgaaagactattccagcttattcgtgagagtgatattgcttgtataagcgagctccgaatggacaggaggacatttcacattctatgtgacatgcttagagacgtcggagggatcggtagcttcattcttatatatactatctcaccatttaaagaatagaacaataggaaagttttttttaccgaaatggagagactgtaagtaggcatttcaatttatgactgctagctgttctgaagcttcatcaacttctacttaggccttgtttagttcgctaaaagaaaatttttggatgtcatatcggacgtttgaccgaatattggaaggggttttcggacacgaatgaaaaaactaatttcataactcgcctggaaaccgcgagacaaatttattaagcctaattaatccatcattagcacatgtaaattattgtggcactaatggctaataatggactaattaggctcaaaagatttgtctcgcgattttcatgcaaactatgcaattagtttttcattttatctatatttaatgctccatgcatatgtccaaagattcgatgtgacgtgtttgggaaaaaaaattggaaactaaacaaggccttaagaagccagaacctatacctgaggacaccaccgacgatagatggaagtatttcaatgcaacccattctaaaaaataaatcacatttcctttcaaaaaaaatcacatctcaccactattaattgtaccatattttattgatgtggtgttctagattgtagaattgcctaggtgcattggatggtacacacataaaagtaactgtcccaaccaggataaaaggaagatataggtcaagaaaaggagacattgttgcaaatgtattaggtgtttgtgcacccgatatgcagttcatttacttactacccagttgggagggttctgaacatgatggctgtgtccttcatgatgcaattcacaggtcggatgggcttcgtgtccctcaaggcgagttttttttccaataaatttattttgaagtgtgacactccacagcctgaattatactgatatttctttttttttaattttaaaggttgctatttttttagggaaacactgtaggggaagcccccatagtaaaattaattaaaatataaagaaatatttacaacaagttcaaccaacccaagagcagatgtctctctattacattcaatctatgaactaacaaagagagatcacttttaaaggttgctattactttgttgatgctggttatataaatgcaaatggttttttagccccttacggaggccaaagatatcatttaggtcgtttcacagcacttgaccgaccatgtagtgcagaggagtactttaacatgaggcacacaagtgctagaaatattatagagaggtcttttggaagactaaagggtcgttgagcgattttgaggtctccatcctattttcctatcaaaactcagtgttgaattataatggcatgtgctttattgcacaacttaattttgcaaaagatgtctagtgatccatttgaggatgaggatgagatactgtcggatatacttaagggagaactcgctgaacctgagtttatctcagctatttcgacatctgatgattggacgaattttcgcaacactcttgctcaagggatgtataatagctatagggctcattgaggtttgtgttttaaatggaatttctaattgattgcaaatcagaactaaaaacaaatgttggtacaactatggacgctcactgatgttagttttctgttgaatttctaatattgcagttatggagcatcttggaagctcaagcattgtgcgtgggagaggcaataacaagaggatttggacgtacttcgaggatgaggaactgatcaaggcactgttcgagattgctttagatccaagctggaaatcagaagggggtttcaaaaatggatactgccaagttctagagaacgtgcttgctaagaagttgccaaattctggccttactgctgttccgcacatcgagtcgagagtaagacactttaggaccaagtttggggcaattgaagtgatgctaaccaaaagtggcttttcttgggatgacaacagaaagatgatacaatgtgagaaacaacaatacgatgatcattgcagggtaagtcatcaaactaactatataattatatggaatacaaaatttatttattgattcattagtgcattgaattgaaatatgtgaaactaactgtaagatattttctgaaattttgttccaaataagaggctatgtaaaattcctttgaaatgtttgcgaagacaacattatggttttcttgtagtatgctctctcataaatatgttctcttgtgtttttcatgtaattgttgcatttttgatatgtcacagtagctgcataggtctctcttctgcttgctaaaccatgaccttaattttgtgtcattctttgtattttacagaaaaacaatgaggcaaagggtctgtatggtgtagcattccctcactatgatacactagctgcaatttatggtaaagacattgctactggagaaggtgcagagggttttggtgaggctgttgctaatatggagaaagaaattgttcgagatattcaagatgaagaggatgaggaggatgaagagagagtgtctagagaaacgcctcgacggagcgttgattcatcagcacctcgacggagcatcgattcagctgcacctcggcggatcatcgattcagctgcacctcggcggagcatcgattcaactgcttcaagctctaagaagcggaagaaagacagcaacaaactgaaacataccttgtcaagtgacccttttatggatgtctttgccaatgttcaaggtgatctgagggatgttacaaagcatgtgggagcaatggtggcatctatgcaacatgaagctgagatccaagagaaggcaatggttgaggaggacccactacaaaaaattcagaatgaagctattcttgagtgtcaaaagcttggattgactggtactgaagttgtcaatgatgcagctgcttttgtaaaagtgccggctcaaatgagtatgcttcttgctcttccagaatctctcaggagggagtacgtcctgaaaatacttgctggtaattccctatacacatttgcatgttgtattacatactttattttgaggtcattaattgtaagcatattgcattttactactttagcatttcatatatgcattcactgtgaacaaattcgcatcaaataccttttattgccttatatactatttgtctgaaaccatgaacaattataatgcatgtatgggtccagctgtccagctcaatgccataggaattaacctaaggaggcataattcactccaaactactcctagctggagtatgtgcctatgcctttcttgcttgcttgcacctataaaaaagtggttcaagaaaacaaagcttttctaccaattccttgtacatattctgtgatcaaagtactgtcctatttttaagacaaaagtactaccctagcttatttgttaactaatctggtagtttcactcatgtcaattgttcatccaatcctttatcgattgaattttgaaggtgtgccattgattatattttgcaaaatattatctcttgtcttgaattcttgctgtcaaaatttgcatccaaatagaagtgacagtgttgtgcttgttcactgcatttgcatccaaacagaagtctccatattatgtattttctcgttgtgtatcagtttcagaatttgatttctcaaccgacacatgttttgcttgcacctgttagtctgttacctggctgcctaaccaaacagcgcgaatgaattggtatccgttacagcaactatccagacaaagcacgtaatcggttaccggcggaagcattcccaattacgtttacgttaacattattgaaccaaacaccaccatgttctcttgccaataatacaagagccgaagagttgccaaatgttactctgctatttgcaagttccgcaagggaccgcataactgcaaataagcctggagctcaatgcttacatggcctgaaaaggtggccatactctgaagaatgattataatgtatacatatctatgtgctgagaaatataaaaaactataggacgagaacagctaaaatacaacagaaaaaagaacatcttgaggccaaaggaagcactgagctttacaggaggctcgccaatccttgctaatagttggtcaagattttatctggtgatacaccatctgctacaagggctgatgtgatctcctgtgaagcagaatacatcatcatcatcatatacaattaatgaacgggaataatggaactcatcagattttagttaacgatagaacttaatgagataactcgtaccaaactgccatccaaaagaacaagacaacaaagaccgataaattcatctgtacaatcgaaaatccgtacagtgcacgggcaaaccgcaaactaatttgtaactttgcaccacttgcacccatgtattggtagccaagagcaggctggccagtgttgtgtgttgaaccaaacaaactcatcgacaatgaaatcgacatcgcagtgctggccatcgtgttgaaacaccatggtggtttgagcctaccacagctgctgcaatctccaccagaaacttatcatgctattgaagatggccacaacccaagcaaaaccagcttcatagacatgaaggactagcaggtccttaccatagatgacccgaaatggagtggaatgcttagctgtctagaaatgagttgcaacgaatcttagcacagggcattcagtgaactcactgtgggccgatcatcagcgacgcagtaaaggtacatctgccaatgggattggggataaaaggcaaagctcatgtgtagcatgacatataccaactggaagagatcctcttaaaaggcactggtgaagatgggatcccttttgctcataatagataacgggatactctgtagctggacgatcgcattggacaaggcccttgcgatggagcttgctatattgggatggtcaagggcgatgaatcgctactgtgtagtttggatgatgttgtacaagaaagcacttggggcggagctatattaggacgttcaagggcaatgatgtgagcgcacttcaagaaccagtccttgacggtaggacggcatacataacattcacctttcggagaacctcaaaaaggggatatgcacctacattagagatgactcctgaaggggttgcatgagactaaaggggtggaggtgttctatattattgttttgccacatgatattcgcctatacaaaagtcctataacaaatgtcgcatgctggcagtggcgtatctaggtttttctatgggtggtccaaccaatatatatttttttaaaaaaccctaaatataacgaagctaggagtataaattgatcaaatgtgcatcaaaatgcattaataagggtgctttttttctttttcccccaaaaaaattcatttttgtatatatatgcattgggctaggattttttttaggtggtcccgggaccacccttggatctgcctgtgcatggtggacacatgcaaaagtgcaactgtagttggtgcaaggtcttttgggtgtcctcgtcataccatggtgtcggccaacaagttagcgaaattatcaatcgactggcacatggaactttccacggtgccgtaggagaccatcgaccgtgctctaatattacatgttccttgtatcacaatattgcatcgaggcctgcctatactctaccctaaaagcataacagcttacctaattatttggtgggatcgtggagaggcattgatcctagatgtacttcaagctaagaggtaggtgaaaactatggaaaacatcattgttgcttgatgtgtgacaattctcacatcataggtcaacgaggagacatcgagatcaagtcacacaacaatgctagattcaaacagttaccaaatgtgcatacgggctccttttcaggcccataagtacttggtggaaagctcttggagtcctctttccaacagatttaacatcatctctatattccatcaaagttggccacaattaaagaaagatggtgttgtgccacctgtcatgagcctttatgcttataattttgtgtggagactaggacctcggtccaagtggggcccatgtggagtgcccctcaatcatgtggagcacaaccctacacaccccaaggtcatcctcccatctccttaaatagctaggtaaccttcagtatttctcaggttttcttatattaaagttagtcattgctactttgccttgcagttgcacgtgtctgccagaccgcctaattactcgtcttcggaaccacaccttatcgagtgttcgatttatcgtgagcttgaattcctatttgtattatcaaattactttaatcttgttcttccttgtttcttcgatttacttgcagaaataaggttgatctgaccaggtaagatcaacaacagatggagaggtgtatagatcgctaaggtgcaatacaacgtctagtacaattgtagtcgggtcatcaacttctctcccaaattataggtatcatcaactaacagaaaaattggaccatccttgctcatatcgattggaattacagagttgtgagcgtttcactactaaagacaaccttaataagttggatcaactctcactcttaggacaataactttgtgttaaggtatgtctgccctgttgaagaaagcaaggagggaatcaacttgatggagaatctgactgaagtctagacccaaggtgtcacaatcgactgcagaaagtgtgttgatgttaggatctgcaagacaagctagtgatcaacaaaaaatttaagagcttggaatgtacgctcgcctttggtcctccaaaaaactccttcacaagcttggatagctaaacaaagtcgtaatcctagataaacgttttgtagtatccacacaaaaccaccataagatctatcgctgtagaggattaggtatttagctcacatggtgtggcctctaagccatgctaggtgatgagatgtcgagatggttctgccactagaaggacatgggcgagccatcaaatttccatacatgtgccaacattttaaacaactatacattgacgatgtcgaatcctccaagaggaattgtcacccttttgctaagccaggtgcttgtcacccaattgttattagtgatgccaagcttacacgcattgtctcatgcacatagttgtgtgagttgtagaccatgagtgcaacacattggaggtgcccttgatagagactagcaactattctacttgtgtggatgatgataacattaagtgatacctagatgtcctcggttggcttacaaggctcttccaactctctatagtacagcaccatgggcgatgtagtggtggatgagaccaaaattcctaggcaattctaacatagccgcctgggttcgattggtcattttcttgggttaattagatccatgccatcacaaatttcacgatttagaaaaataccattactattcacctatttttaactatgccactgcaatacatctgaaatcggatccatgccactctatacaactcaaacatgtttgaaacgtatttttgctactgtattttcgtagggaccaaaatacccctcgtcctatccccataggacccacctgtcaagttcatcttcctccacccttcccaatcttcctcttcccactctctccacaagctcttccgatggtttgcagggacggctcctgatagtggaggcagtgacaatagtagcatccgacgaagccgcgacctgaattgtgctctccgccaggctcgaggtgcagtggaaacgaagctccaaccagcggtatcttctgaagaaaacttaaaaaataataacggtagcttctgaagaaaactagaaaactgaaaaaatattaaggggaaagggacaaatcagatgacgggagctagcaaatctcctctcctgtccagggtgcttctgcaaaggcagacctcctcccatagcggccaggtcggtcagcttgtcggcctgatcctgctactactctcagccatggctccggcagcgcgcgcggacaagcctgcgaggggctggctggcagtgacggtcgaggtggacgagtcctccgctgtgtactacccccatgggtatggcttatccaaagaagagaggcagagtggaggaagatgatggatctgacatgtgggtcccatgtgagaaatgggaccaggggtattttggtcactatgaaaatacaatagcaaaagaacatttcaaaacgggcctgaagtgtacaaagtggcatgaatccaattttatatgtattgcaatggtatggctataaataggtaaatagtagtggtatttttccaaaccgtgaaatttgctatggcatgaatttaattaaccccattttctttgggtgagttgattggaccaagacataaggccttacattgggggtgagggtcgctagcgccctgttagggcattgctgtaagcattgaaggtggctcattggacgcagttggcttggcaactggtttggctgtgatgtcctctatcaaacgccattggaaagtgtgagtgaggcacatggccacatggaggttgtttggcatattcctccttaaacctcttaggtggagtaattccaatttgccaacagattgttacacattcgtggtccatgtgcatattatctaaaaagtgaggtcatgaaggactcctcatcacgctcaagcatatggtaacattattgtgctactccggagaagtggtgcaccgtggtgcaaccaaccacaaccctactctgaaaacaaatgttcacatcattaacacaggagaaggtcgtacttacgttagaaacttaagctatctgcgtagtgctgctttcttaaccaacaatactaacttgaactagatagaactaagggtggtagtttctccattgggtctagggcctaggcaattttctcacccacgagttgatcggggtgaggcacttactgcttccgaggggcggaggcgggttatatgtttcatccacggtgatcggcaaggccccgtatacataggagatgagaaaatacatactccacaaaagcccatcaagaaaaccctatcccgttatgtcaatctctcggtccccacaaatccatcccacaccaccatcgcagacctccccttcgacatcgtgtcccttgatctgcactagaacgcatgtagccaaaccactatgctacgttcgtcgttgcggacctatcccttgaccttgactctgcatcccgatgaagtagcggccagggctcctacgacactgcagctggcctcaacctcatattcctctatcctaaagcgtggtggtcgacggtggctgatggctggccttgacctcctattcctctgatgtgtcgcttcatcttccacttccgtcctcagagtggccagggactgatttcgccccactcttcaccctggggctggggttgttcttgtccaatccacacccgccccactccgttgccaacccctagttacatctattgtcaccaaagaagatgacatcaacttaccacaaatcgttttggacaatgacatggtctccaaaaaataactttaaccattgttttctattataatatatataaaaatatcaacaaatatttagctttgcttctcaataaataatattataattattatagttgaactaaattcaatcttcttaaaattttacttaccacatgcacattgatggtataatacttcctctatttcacaatataagacattttgggttttgaatagattcatgcatggatctaagtatgtgcttcatatatgtctaaattcataaggatgttagtaaatatagacgagtgatggagagaccaaaacatcttacattgtggaatggagagtagcattttgtacccaaatctgaattttatattgattaaacgtatgtattggacacttcatgatgtggattatactccaattcataagtgtgcaaactaacattactagctcctgactgcaacttgcagagttcaataaaatttcagggtgaatcaaattagctttatctcaagatgtaatacagatctgagcacacaaaataaagtgcaagagctagtggtggtttgatatagctatatttcttgcaacagacagcattgggtttatcacaattatgataagaatctaggaactacactaagcgcagggcaacatttgattgctacaaagtgcagggcaacatttgattgctacagtaagtgtaaattatttttctttttttgggaacaaatagctatcggcctagaaaaaaaaggttcacttttggagtatttactgcacagtattgaattatatccttaaggtttcagctctttggccagaagaaccaaacataatatttgtaacctgtagcacacataacaataggaatgtgcaaaagtaaaaaaaaaaaagagaggataaacatgcctcagacatttgtttttgtccacagagcactgccccagtagaaaaatgatttgctatgttctgggctttcaagaaagcatcctggaaaatgaaaatgatatgatataaggttgtatgtacctatgaacatataacaagattatagtaatgttggagttttcatatattacctgaacatatccccgttctcctttccaactatcatctgctcgtgacaataccggtattattttaagcccagttgactcccagtttgtaaacctatcctgccagagagaaaaggtttatgtgaagatattgtttacatagagcagaatgaaggaaagttccaagtctcaacctgatatgccattgtttggagatttctggcaccgtaataaagtcgtacatcagctctttgatccgcagcaaaaccaaactcaataagtgaccgaaccggactgcatgattaacatacaaattaacctgggtaggattccatcaaaaggatgccagactatacttgatcaccaaaaccagacagtcagcaacaatatggaatcagactaaattatcgtaaaagatgtatcagcattcaagacatatttagccctgtctttcctatccagcaaataagataacagcatgctgatctcccttagaagcaaggaaaccttttcctgctcttgggtagttacaaacaaaatacacgtccttgacaaacgccaactaacatcatgtacatgttagtgaaactatcatgaaactccaacatctttttttcgattgccctattgctaggttgatctggaacattgtcatgtgtgcttttaatttgggacctatcctgaacagtaatcagttatttggcacatggctttctgcgtttgggaaaaaacttaaaaatctggtagtcactggggtggctgcagtgttttgggctatttggaaaacaaggaacaaaaagcttgttttgacaaaaaatttcctaatgatccaactgatgtagttttctttgtttgccattggattgaatcttgggttcctttgcagaaagtggaggtagatcaaagaaggctgctattgggggccaaactcataagacaggtagcaaatgagatcttcaattccaagtatggattgagaggaggcgcaagaaggattggactgtgaagtcagcttagatttgaagacctgtggtggctgctgccttgctatggtctttggattcttaggtgtcttagctttactttaaaactgcagggagttgagtcctttgtgtcataggggagattttggttggagtcttctggaaaaccgtattttggatgtagtttcctcagaaaactagcttgctggtagtccttgtttcctttgtatgaaagaactctgtagtatgctcatttctagtaatggaaatgggggcttcatacccttggtcaaaaaaaaaaaataaaatcatgtacatgtccttgccaaacgctaactaagtttgctttgatggtgaggaaagggaactaaacattctcacaatattctaacaaatgtgaagcaatagttcattttaggtccagtaaattggtacaaccattcaaaaacatataggagcagaaagagaaagcagaacccttactactatagtacaaatgcatttatctatttaactttatgcattgttctctttactactacagtacaaatgcatttttctatttaatctctactattataaaaattgaagatgtttatgccggtcctttggtatgtcatccgtgtttgagtcggtttttaagttcgttcgcttttagaaatacagaaggagtcgtataagaaatctctttaaaaaaactcgcatgctaactaagacgatcgaactcctaattgcagctcatgattttgtaaaacaaatatccaagcgaattcccacaggcagctatgagacattaacattggcatctactccctccttcccaaattgatcatcacataatggaattcaaaatttctcaaattgatcatcatataaccgcatggacacagatttcatcagaatacaattaatacaacatgggagaatgtgtgcatgctaaggtgtaagagcaggtacaataacaggctataagccagctataaacatattttaatgagataaaggaagagagagaagagcagcgggctacagatctgtagccagctgcagcacagactccaagacatacagtgtgtaggatcatgtattaatagtgttgtaagcaactattgtatgaattggctattacattggctataaatgatatggagctagtagttagctatactattaaacttgctctaactggaatgatgttttaatcgatgcatgcattgtgggagaatgtgttcatgatgacttgattgatgtgatttaaattatcattggtcttgatgcataaaatatgatgatcaatttgggaaggagggagtaatgtttttctttaattttctttttctttgctttactttatgtttgcctctatggcttcttacgaataagagactactttgaatcttcaatactcttaaaatttcacatgaacagatattaaactggcaaattagtttaatgttcggttttacatgctttatatgtaaaaactattttttttttacttttcctaatcaatttcgagtagtgacatatgatataagttttcccttgaagaaaaagtattgctatattataagcttagctttcacagaatacgatatcttccatgataactgccatcgccattttgggcccatgggccatgagacaaagacatgaaaatcatgattcttttaaacccttgattacatgatattaagttagcttaagtcctactttcttacatgtttccctacaagaatatttggggctaaatggggggtgatggccaagcagatcaacaaaaccaagagtgctgattaacctatacaaatttcgtactaaaaattgagaaagccaaaggaaattgcccactatttggcttattaaaaaaattggcatgcgaaaggaaattagtaatactaagccaaaactagccaatctgcagaccattcgatgggaaacaaacagctcacaatcttttgctgcccaatcagcatgctggggcagctgggctgacatggaaggtggtgattggatgcatgaaatatgctattggtttatttagtactaatgcttaaaagatcatatattctaaactaaaagtatttattttgtaatccatttaggaaaaatctatttctcataacttagcccagtcagtccagtcatagaaaattcacttttttttacatagagagtaatagaaggaaggtagaaccaccaattcgtcatagtcatatacatattggcattttaccttgctcaagccaaaggctacccgctaccctacctatttgccaaaacagcatgctatctacccaatccttcaatgccaaacattttgtcatgcccagatatcggttgtaaccaaatcttgatatggtttatcaaggctagcaatcaaacagtcaacacaactaaggtttggctatttcttccgcctagccaccgctgcaaattttggcatgactactgaccagggatggtggccagagggtgtgtgccccaacaggcccaggatcacatgctgtttaacaagccatctcaacttgtgtcacattgcatatgctgtaaggcaaagtgcgttgcctcaccatactgctgtagtaaacatgccatttaaataaaagtatgtaatgcagtatagcgtaattgctaatcttcgtacacataccatccatttctcatgttaatttttcatataggtaattcttttgtgatctatttcatctgtaaggaatgtttgatccttagcaaaacaaaaacaaaaggcatttttttaggaaagaaccaaaggtgaggtactaattttctaggcttgatttatatgcataagtaatagataacacaattatgtcagcacctacggttattattagagatactgttgctcgacgatactgttattttctcatcttgcattcttccgctaagtcagcctttatttattttagcaaactggattatagtaagtaaatgagtcgtccgattaatgagatacatcaaaagaaacaagttgcattacagtgacaacatgttcaaaattactgaagaacattgcgatatctctaagcttatacatatgaaatttgttatagctcagaactattttaaaagcttcactatgtgtaaactgcaaaatgctactaataaagcaatatgtgtgacaactgactattgcagtgttaaccacattaaactcagctcagcatatatacaaaaacaagcattcatcagagagagaagcaatcacctgatcccggtccctgtagcaaagaggagcacagtttgcgcctcatcgggcggatttatcctgctgatggggaacccattacccattatcgcgccaagctccagcacgtccccgtcgcggagcccacacagcttctccgccgtggtaccaggtacggtcttgaccaagaactcgaacgcggcacccccaggcggcgaggcgatggccatgaacgccggtttgagctcatcctcgccggggacgcggattaggagatactgccccggcgtggtgtaggatgcggcgaggtcggtagcgtcggagaggtccacggagaagtggacgagcgagccgtcggcggtggctgggccgaaggaggagacgggggcgggggtccagacggccgcatcctgctggacagcggcgaggcgacgggagcgcattcggcgccggaggaagggcagcgagcccattgcgggcacggcgaaggcatgaggggagggaaggagggggagggttgtgacggtgttggcgaccgcagccatggcgaccggtggcggtgggattcttgttgggagcaccctggtcgactggggatttgaggcgccgataaatctggaggggatagaatcatagaaatatagaatgatgaggtggggttcactggatggaaacacaaagataacgggtaggagccaattggttgtttggaacacgtggattatgggggggggggggggggggggctatttgaaccgaattttttggtacagtgtttcaggttacagtacgttttgaatttggtcaaagtcaaactattttaaattttactacttttatagaaaaaaaatagtaatatttttaactcaagataaatttattataaaaatttattcaattgtatatttaataaaactatattgatgttataaatatataacatcccgaaaattaattattttctaattatgcatcatgttgattcttatattcttaataacctcctaaaccaaggacattataattataattagagggaactcctaaaactaagtcgcataaaacctctccttttatttaatttctttcgtatttttcatttaactagcaaaaatacccgtgcgttgcaatgggtaaaaacattctaatgaaaatatacgtttttcatgcataatcatgtcaatgacaatgttttattttaatgagcggcttgttttttataaacaatgtttttttcttgcgagattttctcaaaccatttttcagaaatggcgtatttctttctaacagttttttcctagcattttttttgctttttttactgacaaagaaaaccatatttttctcctttttttgcttttcttttctcgtttgtttttttgcctgttttctcgcacgtttttttgcttgttttttttcgaatgttctttttttcttttttctaatacaggagaatatatgacaaaataaaagccgtgtagtagatggcaaaaaatcgatgaatcctatccgactcaagtgtccatcaatttagcttttttctgatagtttttttagagcgatttattttttaatagacggtattttttcttgcgtggttttttaaaaccattttttagaaatggcatgttttttctgacagtttttcctcgcatgtttttttaaaatttttttaccgacgatggaaataatttttctcgcgtgtttttttatttttttattgaagatggaaaacctttttagcgtgtttttttgagctttttctgacttttgcctcacgcgtttttttaacctttttttctcgtgtattttctctttttttaatagttagattagattagagatagagaagagatatatacttgttagaaataggattttttccgccctttccaaattttttttcgcgtgcattttttattttatatgaaccagttttttattttttaagaaccatttttttcgccactttcttagggaatcggacgaacttttttagatgttttttcggatttttttcgcctttataggaattagacttttttttcctgtttttaaaggaatcggttctagccttttttttcaccacttttttttgccttttatatgaatcagatttttttttatttggatctacagtttttttggccacttaggggaaaaaaacttttgttatcgttgtttttctttattttcttttttgtgcggcttttctttttctttttatgcacctttctgcctttattttctctcttttattatttttttaacaaaaacgacctcaaataccttattgcaagattatagggactcaaatgtaaatataaaaattatagagactcaaatgcaaaagtacaaacccaaaaattaaaatcatataaaaatgaaatgatctcgacctgtaggttctattttttaaacagattttcagttcggctcatcaatttttttcaccaatccagagtcggactttttttcgtttctaaaagggaatggatataggagtcggacttttttattttttatttttcgctattgtttttgttttgacgggagtcggactttttttattttttttcgctattatttttgtttcgacgatgaagaaagcatctcttattttttttaagcagtagagaaatatatttggttaaattgaggtatttcttgatggaatcctacattaaaccttctttcgactaaaattcttttattgaaatttagtttgaaaaccctttctacttttatgaattatggtccaagaaaatcctccaattccaattttgaattaattgttgacccatcctttgattctaaacctatccttatccaaattcctcctttttatctagtcgccaatttaatttatgtggcttaatttcctcctcggttcaagaataacagtattataaatatcagaatgatttctcttgtgctaagaagaatagatttttattttattcctctcttccaaattaattccctattagccacaaatatttcttcaaatattcatactaccagtttccatctctcaaaattattgcactcaaataattaggaaatctctcttttgaaaactatttctaaaaataagttcatctcaaaagttagccacctaaatttcttccaaatattaatttggattcaaatttcatccttcaaatctaattcgaaaatacaaaaagattttttattcactgtgggccaaaaaatttcaatctagcccattccttttccccttcgcttggcccagagggcccaagaggcaggcgcctctctccctcctttgtgagcgcgcgtggtgcatgcaaacacgccgctgccttttcgccgagccgacgcgccatcgctgtgcggccttgttgctccttctccaccgctactgccaccgacgtcagccgccacctcacctcgctgacgtcaaccgctagccgaaccgactccatcgtccaatcggagacagagccgccgccgtgctcctcttctccacgccgccgtcgccatgtcgtccttctcctcctcctttacgaaccaacctctcgctgcctataaatagaaggcgagccctccccttttctccacacatcaacaaagcctcaagctcttcctctctctctctccccaccatggcaaccaccaccggccgccgtcgatctccttcaccagagacacgccggccaaaccctcgcgccataagctttgcctcgacgaggcaaatccattccccaaattcatctaaattcaaaatctacattttgatactaaatttactattttaatattttatttgaatatccaatttaaacatatatttacctttcaaatatttccctttatcccaaaatacctattagctactaaaaagccgccggttggaactttacgtcttccatggggacgttcatgcggtctacgggtcccgatgtcagatcattggttgtaaagcccggtagaaccaaacccaaggtttaagtgctgctcttggcaccccacgccttgatgcgtacagcggtcagagcttcactattcccttgacctccaccgcacgctgcacagttagctctcgggctctgtgtgatcctagccactccgccgccacccacggttgtcggagtaacacttccgccccgctaaacctgcaccaacctcctattcctctagccgatatgctatctgttgacaccaactagagaaaataccaaacctagtcgttatactgcccaactctagcaacgactagtaaacaaccaaaccctagccgatatgcttccctactccacaatcggcttaaatataaccaaaccccagacactatactacctaaacctatcaccagctaatactagccatatgcctacttagccagttcaattacctaatatactctgtatctccaaacaaccaaagcccatacataaaatgtaagcaacaatagttgcttaatcctctatccaacctagcctacaaccctttagaacctacatatgaaatataatccctatatcctatagaagagatagattataccctaaaccctagccctcctagttgtttatcgttctcttgttattttatggcttttattgaatttggttcttcctcttctttagtagaatctattatattttggatgacaacctgtgatatttcgaggatcggataatcaggttgcttatctcggatttatttgcgttggagcaaggcaagttattattccccccctttgagcataattgttgtcgtgacctaagggcatggacaaagttgggagatagaagggaaaatgtaatttcccgtctatcctaagagtgagctcaaaagacaaataccaaagtgaatgaatgtgctttttctatattcatctcctcccgtgcttacaggatcttggttggcttaaatagtgctcaaccgcatgtccaagatttacaagtttgtcattacaggcttacatgaagttaccattttacccctataaagtttatgacctataggggcattttggtacattctggtggtccctaaatgacatctggtgctagctggtgagagtggttgaggtggtccccatggtactttcccaaattagaccatttgctcaatggcacttttcctcaacttcatatgctcgagtgagatcacccgtgctaaggctcgaacacattctcccacctttcaggctccttgtcaccttaacctgcctgaaacacagcttcattaattagtgatgttagtttgagcaagtaactttactcgaatgctttttccttgggacagatcctttagggtgaatacatatatattcccatacctaaaactactttttgggtggaaacttcattcgagtcaataaataactcgaacacattttccttcttgacatatgttttcggccgggcatgggggatggtgtttaccacctgctacaacaagcccctcacgggtaagggcgaagtgttttcggccgaaaccgtgctagatcaaaaatgcaggggagtaaccgccgtccccctgttcggtcgaaaacatcattgagatagctgcggtggaactccgcatggcggggaatttgcatatttccatatcgctcggcactacacaaagcagaattctcagtttgaatgcatcaacttcatcgtcgcaattactttttagttttcgagctcgaatttgggtaaatgctttagagctttttttatgtcgtgttttcgagctaaggcaaaaaattgctcgaaaaccgccgtccccctaacgtttcaaaggagtgacgaggtcgaacgtgtttccctcgtcgcaattactttttagttttctagctcgaatttgggtaaatgctttcaagctttttttatgtcgtgttttcgagccaaggcaaaaccttgtttgaaaaccgccgtcccccttacgtttcaaaggagtgacgaggtcgaacgtgtttccctcgtcgcaattactttttagttttcgagctcgaatttgggtaaatgttttcaagcttttttttatgtcgtgttttcgagctaaggcaaaaccttgttcgaaaaccgccgtcccccttacgtttcaaaggagtgatgaggtcgaacgtgtttccctcgtcgcaattactttttagttttcgagctccaatttgggtaaatgctttcgagctttttttatgtcgtgttttcgagctaaggcaaaaaattgctcgaaaacccccgtcccccttacgtttcaaaggagtgacgaggtcgaacgtgtttccctcgtcgcaattactttttagttttcgagctcgaatttgggtaaatgctttcgagcttttttttatgtcgtgttttcgagctaaggcaaaaccttgttcgaaaaccgccgtcccccatatgtttcaaaggagtgacgaggtcgaacgtgtttccctcgtcgcaattactttttagttttcgagctcgaatttgggtatatgctttcgagcttctttttatgtcgtgttttcgagctaaggtaaaaccttgttcgaaaaccgccgtcccccttacgtttcaaaggagtgacgaggtcgaacgtgtttccctcgtcgcaattactttttagtttt

SEQ ID NO: 7827 - DNA, 5325 bp, Oryza sativa
atcatctttagtcccggttcgaatgctgtcagggcctgtcaggcccccccgggatctttagtcccggttggaggacaccaaccgggactaaagatcttaactttagtcctggttggtaataccaaccggatcccggtgatctttagccccggttggtactaccaaccgggactaaagtcccacccctatatatatgtcttcttcctcctccagctgcccgagcaagcttcaaaatttcttcaaaaaagaggggaggtcatgccaaaatttctattgaatttattttggtgattacatacaaatcggaggtgcctaaaaggtttgcaacttcatcctccaatgtttttttttatcatactacatttgcacctatgttttacacactttttttgtctccaaaatttagttgtaagttgatgagagagaaaatgtgtgtggggaagaaagaatatatagaaatttagttcatttgctaaacaaggttttataaaatagttgagaaggaaaactctagtgaaagttaatcttaaataatagaaaacaaactaaaatgaaaattaaaagaagtaaaacacattaaaattagtttaaaactttacaaatagtttttaaaaattatttggtgtaatattttatgatttttgtatgaataaagatatcttataattattgtatgactgtcattattgtaagaataattatttgtgtacggttttttttgactcatgtagatggatcagcaatggatgtacgctgaccggtggtccaaagagtttattgacggcgtgcactattttttgagagtggccgaagctaacaggcaaaggggttttatttgttgtccatgcaataagtgtaagaatcagaaggagtattctgcatccaggactattcatttccacttgtttgagtcggggttcatgccaagctataattgttggacatcccacggagagcaaggtgttgaaatggaagaagatgaagtggaagacgacaatattccggactttgctcagtatgttggatttgaaggaaatcaaacgggcgaggaggaaatagctgctgatggtaacgacgttgcggatgatcttggtcagatgttgcaggacgccagggaagactgcgaaagtgaaaaggaggcccataaattggacaagatgttggaggaccacagaacttcgttgtacccaggttgcgagcaggggcacaaaaagttggataccactctggagttgttgcaatggaaggcaaaaaatggggttagtgacaaggcatttggcgatttattgaaactcgtcaagaacattcttccggggggaaacaaattgcccgagacaacgtacgaggctaagaagatagtctgcccgttaggactggaagttcataagattcacgcatgtccgaacgattgtatcctatatcgcggtgaggagtatgagaacctagaagcatgccctgtttgcaaagcactacgatacaagattagacgggacgatccaggagaagttgacgggcagctaacaaagaagagaattcctgctaaggtgatgtggtatttccctataataccacggttaaggcgtttgttcaggaacaaggggaatgctagaatgttgcgatggcacgctgaagagcgtcaacaggacgggatgctgagacaccccgccgatggttcgcagtggcgaaacatcgacagaaaatttaaagaatttggaaaggacgcacgaaacatacggtttggtttgagtacggatggcatgaatccttttggagagatgagcagcggccatagcacttggcccgttacgatgtgtatctacaacctcccccctggctatgcatgaagaggaagtacataatgatgccgattattattcaaggccccaagcaacctggtaacgacatcgacgtgtacctaagaccactggtcgaagatcttaaacagttgtggaagaaggaaggtgtccccgtgtgggacgaggacaaacaggaggagtttaacctacgagcgctgctattcgtaaccatcaacgattggcctgcacttagcaacctatccggacagtccaacaaggggtacaaggcttgcactcactgtatggatgaaacagaaagtacgtatcttaaccactgtaggaaggttgtatacatgggtcatcgtcgattccttgcagcaaaccacccggtacggaagaaaggcaagcacttcgaacataaggccgaccaccgtacgaagcctaaacatcgcagtgggaaaacagtgtttgctatggttaaagatcttaaagtagtgttcggaaaggggcctggaagccagcatatagagagcgaagatggtcacgcggcgatgtggaaaaagaactctatattttgggagttaccatattgggaattcttggacgtacgccacgcaatcgacgtgatgcacctcactaagaacctttgcgtaaaccttcttggcttcctaggtgtatacggaaagtcgaaagatacactggaagcatgtaatgatctgaagcatatggaacaacgcggcgaccttcacccggaaccaaaggaaaaaggaagccattacttgagtccagccagctacactcttagcaaggcagagaaggaaagtatgtttgaatgcttggagagcataaaggtaccgtctggatactccacgaatatcaagcgaataataagcacgaaggagaagaagttcacaaacctaaagtctcatgactgtcacgtgttgatgacacaactgctaccagttgtaataagggctatccatccagacaatgtccgggcaacaataacaaagatatgtgcattcatgaacgcaatttcgcagaaggtcatcgatccggatagattagaagcccttcagaatgaagtggtgcaatgtctcgtcagttttgagttgatatttccaccttcatttttcaatataatgacgcatatgctttgtcaccttgtgaaagagatccgtattctcgggcctatgtacctacacaacatgtttcctttcgagaggtacatgggcgttctgaagaagtatgttcgtaaccgtgctcgtccagaggcaagcatcgccaatggttatggaacagaggaggtcatcgaattttgcgtagaatttatcgaagaccttcgcccaatcggggtacctgaatcacgccatgaagggagactacggggaaagggaactctcggaaggaaagcaataacgacggtagacaacaatttattccgtaaagcccatttcactgttctgcaacactcttcattggtagctccttacatcgaggagcacttggctctagttcgcgccaggaacatcggtaagtccgatgcatggattacacggcatcatattgatactttccccgcgtggctacgacaacatctcatgggtaacgagtcgatcaaccaacaacttgccttcctggcgaggggaccgtctgggtcgatcgcgacattccagggatatgagatcaatgggtacacattctacacgagagcccaagacatgaagagcacgaaccaaaacagcgttgttcgtgtcgatgccatgggacacgatggaacaactgccacgtattacggtgccatcgaggacatatgggaacttgactatggtcctctcaaggttcctctgttccggtgccaatgggttaggttgactggtggaggcgtaatgattgatgacagtgggatgacaactgttgaccttaacaaggttggatactcggacgaaccttttgtccttgccaatgatgtaacgcaagtctttttcgtgaaggacatgtctagcaaaggaaagaagggcagagggcctgatgagcctaagcgtcaagtggttctcccaggcaaaagaaaaatcgtcggagttgaggacatgactgacgaggattacgatcagttggatgggcaaccccctttcacggtgacgattgaccctagcatcctcctatcaaatgaagacaccccttactcacgcagcgatcaccaggagggaacaatagtgaggagaaagtacgtgccgtaattattgtgtacacgatgtaaactattttggatgtattgattatccatataaatcaattgatgtatggcatatgttaattacgcacgattattagaggtttcaacaagtttaaatcatgtatatgctagttatatgtgatacttacaatttttaaaagttttaaatcacacgtgtggcaatttcatatgtatgttaattagagtttttaacatttaatttactagcattcatatgctaattataattgactagaggatttttaaaagttttaaatcacgcaagtggcaatttcatatgttaattagagtttttaacatttaatttactatcattcatatgctaattataattgactggagaatttttaaaagtattaaatttaatatatttttaaaactatcattcatatattagagtttttcacaatttaatttactacctttcatatgctacttatatatgactattcgaatttttaaaaggtttaaatcatgcatgtggcatttacatatgttaattagagtttttagcatttaatttaatataattcctacgctaagtacatatgatgattacaatttttattaattttaaatcatgcagtatgtacatacatatcttaattagagtttttaccaatataataatattattcatatatatgctaagtatatatgattattggaatttttattaattatatttgcttattacgatttatccacttaatttattacagacaaaaataatttttcgaaataattgtcattaatctttgtactttaaataatgttaatgcattaacttctattttataaacacatatgtaagcgaaaatcatatgcagtgctataatctttagtcccggttcttaaccctaaccgggtttaaaaagaatttcgaaatagcgggaaaagatatttactcccggttgttgagaacaaccaggactaaagatatctttagtcccggttgttgagaacaaccgggagtaaagatccgggggtatatatattcccggtgcgccctcgtcttcttcaccaacacttagacgttttcggccgatcgatctctctcggcctctctctccttcgccgccactgcctagggcaaatccccgcgccgacgccgccgtatctcgccgtcgtctcgagctcgtcgtcctcgccgccgcctccgcctcctccgctgccgccgcatctctggggtgagagccgccgccgccagatctcccttcatgcatctcgatctctccgatctcgatctctctccgtcgcgccgcccgccac

SEQ ID NO: 7828 - DNA, 36148 bp, Oryza sativa
attgactagtacagaagcaccaaaacatcccctacaagactttggcctaaaaaaatgacttcaagactacaaatagtaggtgcctaacaatgtttggaagcattcgctgcttcactcaacatctcaaccaccatgatattatagcacatagcacatgcatttgcactgttccattcagccaaacatgccggtgtcaaagcttagttttttgaaagttcagtgaccaagcttctcggtatagtctaatgcatcaaacgatggttggttcacccagaggctaaaaatggttgagagcatgatgtaagatgttgagcatgtgaacgagaacttgtactgtcaagcgatgatacttcagagtatgcattactttcatgcaagaggggaacattgccaatcaactttgctgaaaaaaatgagacagctaactgaaatcctatgtagacacataaagaaatactactaatatatattgcaagcaaaatcccagtccatgaatgacttgaagttgtatgtactaactcttttgaattccctcatcaagttggtcttttcagttgatcattactgaatgaaacaatttgatcataaggaataaatattcatcagcatcgatcctgtagtattaccaatacgccacacgaacaattttgcataatcaatattcaattaaaatcatgcataccctcctctattcccacaagatggttggagcaaagctattagcttgaactattcaaatatgtgatcgctagatacagctttcgatgcaattatgcaagtcggaccatttattcgcccaccgaatgttctcaacttgcagtagtagcatgttataaatataaaccatatcatgttattggtctagctaagcaatagtgcgcaaaaaagaggttgagctagctataatatgatagtgcagattatagatcttatgttaaaagcatactcacatgtccatcctacatcccaggttcttctttgagaactgtgtcatttttcagactgaactgctgatttaagactggcaagatagcttttttttttcttctatttgaagaggcagttttcatatgacaaataaatgtcaccaattatcaacagaaaagggtgtgtaaccttaccaagtcacaccttagcaagtaaactctatgtgtaaacctcctaatttttcgtaatgacaaaattcaggtggggaagctctcccccggtgatttagtcaaaaaaaaaaaaacaccttagcaagtaatccagtgggaacacagcaacgcacctttttttgtttttgtttgaggaagtaggcctcgcctcacacagtcacacctattcagaacttcatgtcagtactgtcatttaacttgagaatagaacacagaacaggcaatacatgaatggaacccataagttcctcacacttgtgaatttgtgatggacattcaaagcaaaaacagaaacattatggagggaaaattcaagatcttcaccctcagtcacctgccctgcattccttggcaagatacatcgtcaatgttcaaacctcgacaccaaaaacctccaaatcggtccgagtcaagtatcactcggttgaccactagcagcctcgtaacgtttgcctcatttcatcaggtggcatcaaacattcgattatcaatcagaagcaggagaatcaaacgaaataataagcaggtagtacatcaacgaagagaactccttttccaacctgttaatgggcctgactgggcctgaaaggctagaatcggaggcccaataaactgccacgaaatcctagccgtccaaatcaaatcagtggctaggattgcttgacgcagctctcgtgcccttttatacttgcaactgcgagggattctcgcctcctccgccgccacacctccacctctcctcttccttcccctcgccgccgccgccttctcgtcgacgcagccatgtcggcggcgcagcagcagaagcacgaggtggaccgggcgacggtggccggagccgtggccgcgctgttcaagtggatgcgcgcgcgcgcggcggaggctccaccgaacctcctcgccgacgagcgcgacgacctcctgctcctccagctctccctccgccgcatcccgccctcaccgacgaccaagccgcgcctccttccgctcccccaccccgtcatcgtccccgcgagtcggcctccatctgcgtcatctccgacgaccgccccaagtcccgctccccggccgcctccgacctgctcgacgcgtccaggtcccaccacctccccgtctccgaggtcatcccgctctccgccctccgcaccgactaccgcccgtacgagtcccgccgccgcctcgccgcctcccacgacctcttcatcgccgaccgcgccgtcctcccgctgctcccgcgcgtcctcggcaaggccttctactccaccaagaaggcccccgtcgccgtcgacttcgcccgcaccgggtggctggagcaggtccgcaaggtgatgaactcgacttttctctacctgcggacgggcacctgctctgggatcaaggttgggaggctggacatgaaggaagaggacaccgtggagaatgtgatggcggcggtggaggcggccgtggagaatgtgcccaagaagtgggcgaatgtgaggtctctccatttgaaggctgtggattcagttgcattaccaatttaccaggctgtgccggagttgggcatgaagatcgaggtccggtttgcacaattggagggagaagtcggttccggggaggttatcgatgcttcggaagctggagctgcactgaagggtgtcggcaagaagaaggcgaagaaggcattgaaacatgtggaagaagagaatgctggtgaggaagctgcacaggagagtggcaagaggaagaggggtaagaagcaactagctgaggatttgatggagcaagacatccaagatgtgagtgagaaaaggaagaaggtgaaggagggcacccctgctgccgaaacgccgaagattagcaagaagggtaaggagaagagcaagcgtgcattggacaaggagggggaggatgcaagtgtggaggaagccagtaacaagaaaaagaagggcaagaaagaggtggtgagtgatgttggggagaagaacagcaaggtgaagaaatcaaatggtgataaggagaagagaaggaccagattaagggtataggttttattctctatctcctgagagatgcttgtgatattggttgatcgacagtgtcgtgatgttcatcgtgttgattagctgggctaatctgatagtttatctgctggcagaagaactatgccactgtcaagtttttggtagccttgtagtactttataagatctccaatctaccgcagaatgttctacttttgtgtgcactagaggtgtcttcaaaagttgtatcttttgtttttgttagcttactagcctgactgcctgagccttcaggttaaagatagtatggtaaaactgtttctggcttcatgtggttcgcatcaattttgtgatcatctaagaatatgtctcagttgttgtcttccctgaattactcatctagcatatgctgtacacttggaacccagtttcaataggagctgggctgggccatttgtactctcttactttgcatgacttgtgaggcgatggaatggaattgaattgctgcatgctgtttaccttctcagtgtttatcatcccttgtggcttgtagatcttcaagcaaagagcagaagtgaaactaagacaaataagacatgtataaatggagattagatttttcccacatcatctgttgtgttgtaagttccaaattgtttttcatgtcaagtggttgattacaagacatgaaaactgccaacataggcagtttattttgctccatgggaagcttgaaaagatttgcctgcatggactggtttagatcatttggcaaactagccaccggctggtaagcagtaacctttttttttttgttgttgctgtcaatgctgaaaaacagagtatgataagaaaatctcaaaattttaacttttcaaaatttgataagccagcaagcaaaacattgaagagttggaagctgcagttcctgatgggcaactctgcaaaggttcaaaggctcaaaggttgcatctttggcctttatgttttagctatttaaatgtcaatgctaaaaaaaatagagtatgataagaaaatctcaaaatttcaacttttaaagtttgataagccaacaagcaaaacattgaagagttggaaactgcagttcctgatgggcaactctgcaaaggttcgaaggctcaaaaggttgcatctttggccctggaagagttggaacatcttggaaagccaacttggcaagctcgaactgccctagtctaagagcaaggataataatgggctataagggcacccacaatgattatctataagctctctacaagagatccatgttagcatatttttctacttgaaagaggttaaataaagagaaagagcaaagctaacgaggcaatggattagagagctatagatacctatatagacataccattgaagtggtttactataaatctagtctattgctgagatgtacatattttatagatagcatcttactttaccattgtggatgctctaagcaagctatatgcttatatggaagagagagataggaaaaagtgggtagtgttggctctcatacaagagctagctccacacaacctccaagaaatatgcattaaatttatagagtgagaaagagagagaatggaaaaaataaagttaacctgttgacttattatacaagttaagtaacagtgagctttactattaaacttgttctaagcggcgagccaaccaaccagagcgcgacaagaccacacaacacaagcaaacactggaagcggggtcactgctcattcagataggttcaaagatttccagagaagcttgaccaaaacttttcccggagtatgggcgccgctcccaccggcaccacgcatggcgcgccacggaagccccgctcgagcggaccatccccacgcggcgcccatgcgcctcacccgcgcgtcgtcgcggcgtcacgtagcgcaggcaagccagttcgccgcggattgtcgtgagggcttctttttgacctcgttccctacctccatccatccacgcacgccgccccccacattgggagagacaaaaggcgggacgctgatcgagcttcttctcgggattttagggtatgttcttgctgtgttttccctcccctgtattcgtgataacggtgcgttcttgaggctacttcggtttgcgctccacgtgttcggtgaaatgcctgtgagagaggaggaagattcagtactcatgcctctcctactctcttcttttattctgttgttgttttgataatttgtctggtcttcttgattattttgttagattgcagatgccaaacggccgcaggtctgtgattgtaccagcccaaatattgcattcctagtttctcttaacaaatgccactcgaatgtgatgccaaagagccaatattgacaacaaattaatgttggctcttgccttgtgcaccacagcaatgaatgaatgacagttgtataatagtttgtgagccatatgaccaaatgaagattatagtcatagacatgtaggcaatccatctctcttgataccgtagtgtggatgtatgctgagttgctgacatgtccatgttttgttaggaaggtaaaacaacacgagtgatgctctttgtcattttcatcctggaacacatatggaggactatttttcacgcatcctagaccttgcttggcagttacgacatcaactgacacgattaataggtaccaagcatatagtgcccttgttgattataataaagcagaatatagcctgctaatgtttcattctatattgctgtattttctctgcggaaaggctaaaaaactgtcgacacatttttctttagaaatatatcgatttctgatccattagatcaactgtaagattcgtgctattttggttgacgaaaataaaattgtactgcaaagaatcgaacctaggatttccggtggcttgtccagcggccttgaccaactgatcgagcaaagattttggcttgaattgaaattacatactaattacacttaaattacatactatttacatatataatttagagacttacattgtaaatacactaaaattacatatgtaatttagagacttacatatgtaattttaggacttacattgtaaatacactaaaattacatatgtaatttatgggcttacaatgtaaatacatgccaactattttttggtgaaaaatatggtgccataaatatagctactcccttttctctgtgctaattccgaattaccagctccctgtaaataatggacactttcctttttagtttacacatagagaatttgttggaaatttgattagttcgttagctactagatatggatttaggatgggcaaccagttatgatgaacttgattggctctataagaaacacactctcaatatgaaatttgcatatacttattcggttattcctcttgagttttctttatattttttttacatgctgatactttttttttccatgccagaacatgtgcttgggtatattgattggatcccagaacatcatggattccagttctctccttgttataaaagatcattacctgccaccgaaagatacatccgtggagaggctcccttgctgtctgtcagtaattctacagaagaccagaccccaaatggactatctgaagccattgttgtcagaaaaggcttgtccagtatttgtcaaaggtttagtttttctttctaacttcctaatcagaacgttaataatatacataattatttttattcacattgcaactatttgttctgtctgatcatatggcaggtttcccagttttttgcatgacttcagattgggacaacagttggcattccatttgcgagaactgtgcagtgctgttgcaagtgaaattcatgctaaactagctaggttagttgctgtcttcaaatttccaacttttatgtgttgcatccgttctagtccatgtgatgaatttctgtttgcttgagccaggtgctaaaaaactgctatatgcttgcaggttcttacatcgtttctggacaacattacagggatcttctaaagatataggatggctaaaaagaacaaaaacattgccttgttcagttgatggtacagatcgtttcaaggagcttttgtatggcatcaggtgatcttttgttcatgcctattaaagtaccactgactttatttggagagtactatcttttacggaccctacatgtagaactactcctatctaacaacaatagggaattgagccactgaacatcatttacggaagtaacagatttattcctggtatcaatccatatggaggtccaacattcaattattatcagttcatgcaaagaccaatgatactaaaagaagcttaatgtttcagaaatggcatgcatcatcttcctaacacactggtttacttattcatccctggtgagacattttttttcattttttgcaaatgatgttaaaatgcctagctttatattggttcgctgcccttgtgcaggactttttagtaatcacagtccactttacttcgtcaatacgaaaagaatcttttcgaagatggggcttacttgccatattgcaaggattcatagtgaggtaacagagctcaacaggggtacatgcaaacaattttctcatgtttaccaagctctagattgtagcatttcttctgtttgtccctgtactcacctttcatttcgcccaggcatcagtggagaaaaatgcacgggaactgaaattatacattgaagagctgtactggggttctggtaaacaggtgttgctcctgggccatagcaaaggtggagttgatgcggctgcggcgctttcgttgtactggtctgaactcaagggcaaggttgccggactggcattggttcagagcccatatggtggcaccccaatagcttccgacatccttcgcaaaggccagattgctgataaggagacaaggaggatcatggaactgataatatgcaaactcatcaaggtcctcattatcctggtctctgtgttacctaatcagatcaaaccttatgactgagttattaggcaaatctttcaaaaaaaggactttatgaattgttcatatatcactgttttctcatattcttgtgcatttcatatcatgatcttaacaagtaaacaaatgcagggtgatataagggccttggaggatctcacatatgacaagagaagggacttcatctccaagcacaagctccccgtggacgaactgccgatcatctccttccacaccgaggccagcaccgccccgacgatgctcgtgacattgtcgcgcgtcgcccaagccgagctcctcccatggctcccattgccgcggttcctgtcgtcatcggagtacgccgaatcgttgctcgcctctctgaagctccccgtggtcgtgccggcctcggcggccatggccgtcagcgcgctccacctgaggctgcgctacggcgagaggagcgacggcctggtgacgcggcgggacgccgaggtgcccgggtcggtggtggtgaggccggagaggaggctggaccatgcgtggatggtgcactccacgctgagaaaggatcatgccgaggctgatgccactcagatgtgtgaagccctgatggccatgctcgttgagattgggaggaagaaatgctgctgatcataatcttacagtttcttggttaaattcaagtttgaacttgagtttaaaccaaacttaggatccaatgccataatcatagatgatgttacaaggcagtttacaaatacagaatgatttccactttgaaggaccaatataaaatgctctttatttcccccgaaaaaaaatactacaatatatttcgtgatatgctgtaactgctaccatcatttttactcccattaacttttaacaacttccctttcaatgaaaatcaggtggggctccccggtgaaaattcaaaaaaaaaatatttcgtgatatgctgtacagtttgtttaaaatggacaggtacaatttctgcacttctacattcttgtatgcaaactgcgatgaagatagaagagcaatgcaacatgcaaagctgtaagccgagaatacgcgttctgtcccgctcagttacgccttcacctctagaaagcgtagactcatttgacgtttctccccgatacgtgataaagagggcccactgtcagtgtcacactcctcgtctcctccccttaaaccctcgtcaaaaccgctgcttcagagaatatttccatttctaccccttcctccccttcgcctccctctccgccgccgccgccgccgccgcagccatggcgacgcggcgatgcctcctccgcctcctctcgcgccgcctcctcgcccacacccctcaacccgcgtcgctggcctcgatcgcgacgcgaaccctagcctccttggccaagcccctcgtgccgcaggcatcccgcgtcctcgcctccccccgcctcttcccctcgcgctgccactacgcgtcgaaccgatcctccggcgacgaggaggagggggacgacgacgatcactacgacgaggaggggagcggggatgagtggggggaggaggaggaggaggccgtggcggcgaagccccccagcgggaagacggaggaggagaaggtggcggaggcggcggagatagggtacacggtggttggcccgctcggtgccgacgagaagcccttcaagccctacgagcccgtgttcgccgtcgtccaggtctgctcagtttgtttcccaagctttcgttttgcatttgggcgtggatctagtgggtgattggatgcgttttttttaatccctgcagattggttcgcatcagtttaaggtgagcaatggcgactcgatcttcacggaaaggttgaagttttgcgatgtgaatgataaggtaattgtgcactttgaacgcaaccgatcacatttattatgactgagagtgtgttcgataacttgatctgtaacaagccgcaacttataattgatagggaatagttgaggttatgagatcatgttttaataattaatacggaggtttatcttctttggtcatttaggcgaattgtacccaccagggaagtttcaagttctgatctgattgtaaggcacttgtcatttgaagatttgtaattgcatgcagtgcatgatctgatatttggtatattgaacccaccgtgattcctcagaatttctgctagcactttttattgtttaattatgtttcatttgtgatgggaactctgaacttccatattgatggcttaaatcgtttgttcaatagagtacacaatttttttttggataaacattttccatacataagctgtttaagtcgcttcaaaaatgggtcgaacattgaaatttaagcacgcagagtattttgatgagtttgtggctactcgttttagttgctctagtgccagttctgaaactgttccattattgctggtgccactggttctgtgtacttcttgtacttccattttcatttataactttgttgatgttgtttgtgtgatcacttggtgcagttaattttgaatcgagttctcatgcttgggtcacaatctcaaacagtcattgggaggccaactcttcctgatgctactgttcatgctgtcgttgaggagcatgtaagacacttcttaaactctattactccattttttttttggggagtatgttattcagcctcttcattgaactaaagttcatgaaataactgttaagacttatttgttgaaacaagtttcaagaacatctgctaagtattaggtctgcatttttcaaatcatgctaacatctatatatatttctggtgcatctgaatccatgtttatcaaggaatcattaatatgccttgaaacctccttttgcatgacctaggtttatgagtgattgttgtgtttgaaggctgacaatgctctagtaattgtttattatactaccatcattaaggttggaaatgcgtgctgtagtaggactacacactaaagaactaggtagtgttagaattcacagaaacagcagtgcatatacactctccctttgatatgctaccatcagctgatgattggaacatgcaaaggtatatacatctacatgctttgagcatgttctgaacagtatattggtatcttcaacatatatttgtaatgtgtcagtcgcatcggatgtctactttacgtatattttgtatgtgataatggataacagagttttttttgtcacttctatataccaagagctaattcattggactttgttgttcttattgctacctttcatgattcctctaaacttccaaaatttaactgaaatggaatgcttaatacttgtaacatgatgtacattttgaggttaattctcctacttatgctttggattttcgttttttgtaatgcgtacagaaacattggcatttggttgacaaatgatataccttccccaagcgtgtcttaatcttttcgttaatacacatggctttttttttttacaactagtacaatcggttcacatggtaacatcattacataatttccagctcaaattggattgacattgtttttcaggccctagatgcaaaggttatcatattcaaaaagaaaagaagaaaaaattaccgtcgaacaaagggccatcgtcaggtaattttatatcagctgtttacattattctgtgttctcaaaataaaatatgatattattgatattatcctctgcactatttagttcttactttatgccctgacaatttttaggaattgacaaagctgagaataaccaacattgaaggaatagataagtcagaggccactgctgttgctgcttaaattaagatgaataatgaaggaacatggcttcatgcccaggcagtccttcatactggttttagtgtccaatcaaatcttgatgcggcgtgctgttgcttattgtcagtcactgattgaaagaaccatatctgaaggtcttgtctatgtatccacattttgggaacgggccactcaagctatgccctttctcacaatgccaatgtcttgaccagtttggatattctgatgtggatcacatcttgtagttacagccaaactaactttttgttttctttctccatttactagcgtacctccttgaatgtgttccaatgcatcagtgccatgtataccgttctagccatgaataatgaaactgaaagtttgtggttcccatctatttagaaatctgaactgaaattgtacatgcttatgctaatacaaccagatgcgatgatatataaataatatggaggggtgtcgcctgtgacttgtaaagtgttaacaaaaatcttcaaaacatactgtgacagtttcctgtgcagttcttgcatcagttccagcttcctgaaacatattgcacaagttcttccttcagttccaattcccatgttaactatcccagcttactgaaacatcagatttgctcatgttatagaggaattgaaagtcgatatccatcgatgttatagaggatatcagacttactcatgttcatatttgcagaactgactccacttcgttttagctgctattatatgctctcttttagaagaggatgccacagaagaaaaaccaagtaaatttagtataatgctttgaggatagcaatctaatatcgatcagattactgtctttatcatatcatttttcttaatcgaaacagggttactctgtctgagctatccgttcattgtaccatctagttctgaagttaatctgaacgctagatgcgttgtggttctgaagttgcagtcagtgtggcactaactttagaaacaacttaaaaaaaggttaaagaactcccagtggatgtgttattatcattttgccttctgtcactttcacacaaagtaccatactttagtatgcccatgaaacctacatgaccataagagtttatctacctgtaaataaaaaaaattcatactatcctctcattttctctcgagtcaacacaaccacctttaagggtgaaaacggagcggattcggtcggatagtagtcataccatatcctaaaccatattttttaagcagattcggagcgggtgcggatagcgtacggatgcagagcggatttgtttcggatgtgggaaatgatgcggaatcagttcggaaatggattaaatttatcggatgttataagtgtatgcaatcaatacaacatcgagttagcaatgcaaggaacaataatacaataatcaataaacgacccatcataataattatgtgcttaagtgctaaacaacatgaatacacgatgtccataatataaaaatacagctacgcgagtgtgacataagacggtgaaagcttcggactaagaaatctaggttaatttatgaattagtccattggatgtaccaacttatgttatatgcaataaataaagtggttacatgtgttgataattttggattatccggcaaacggcttatcggataatccgcatccaccggattttagagatattatatcatcatctgtatttgcatcatactatccacatccacatccatatctgccgtatttctaaaaacccataccatatactcgtttcgaacggattcggagcggatcggatcggatattatccgatccgttttcaccccacatcgattctttgtgcatgaattttcttctcaatggcatagactttgcaaggcaataaacatgatgcaaccagcattagcaacaagcaatgctttgttaatctcaaccatgtatctaattgctcatctgctgttcagtaatcttgatttttaataggtatggtgaacttggtgactgctttggtggattggacttctgatttgagccttcttttgggccatttttttttgtggtcgtggttgttcaggcttgcatttgctttagtttacacatgcatatacatgattgcatatttttctgctttatttggagaagaaagctttgcgcatcgatgctgaactataaattgaactgcactaggaagatgattttgctgcctcttcttggctgcctcattctggcaactacagtgcagtatcttaacattttttttgcagctaaattgcctcttatgtagtctgtagtaaatggcaacgacaagtaggctcatattttcaattacatctgttcctggaatgggaccattttctttctaagttctgggtagtttaggctaattaaaaaactcaaacaggtgaataaatggaaattctctgttcattaccaaattttcttttgaatttacttgatattatgttgtgttagacttcacatgtctacttattatataagcggacaagtttggctttttcgaagccgaagatatcaaatattgtgtccacatacgatagcccttttctgatgataacacaaatgcagatcccccaagtttgtttgaatgcatgcaattccagacattcagctatgataaacaatctggctactctgatgttatgcttaaaaacagacaatcaataataaacagggatgtgcactataatactggtggatctccaacctaacatgaagtttcatgaaccatgatctttgaaaatctcacagtgatttggcctgtctttgagactgtttcattaggtgtagcatcaggcatctgcaggaggaggacccagcccaaattggaagccatgttcatctacataagcctccaccaatccaaagttgccacaccaaaaggcaaatgatgcccaaaggcactttgtcaaaggcaaagagccaccattggtgggtgtcaatgctagtcacacataaaaacattaaacacatcccttgagatctaatggaggaactgttctaagcatttactagattggagcatatcctcttcaagtgcatgtgtttttggtttattaaagaaacttgattgtttgtagcctgctttgcatcttcctttttgagtgccttttacccccactttgtgcaatggaaattgatgttagagcttatccaattccttctctgcacttgttgcattcctctcttatctcagcctgtgacacatttctctctttctgaaaaatgtcatgatccttcctaccgatctaccttcttatggaactcaaaaatgtactcagctggaaaataaaatttgcagattctttttagttgagattattgtatcaaatttaagccaaaggctaaaaggaattaaagtatatgctttgggccttttcttgtaaggtctcattcataaaatctcaaccggcctgctgtgactcgcctggaaagtcataacagaatatgctgccatagtgatctgtgctttattcgtgtaaagcttggctcaagaagattctgagactattctaatctcatgatttttgtagcaagtttccattcagacaacattaatgtgttgaattctttttttttttttttgagaagttgagagtacaaatgatggaatatgctgcaagagaaacctatacttttgacacaaaatttggtccataaagacactgaatactttgtatttaagctccatgatcaatgttactgcacaagtagtcgtactaccctcttgatcatacagtcatccactcatcctagaataaaaatcaacagaaacttcctagcatcatctaccgatttggcaatgtctctagactcccttttctcacctttcaacaatccattttaatcattacaaaatctatttataattgatattcaggagaaaagaaaagtcctgtgcattattcagtttaatgtcacaatgaaacatgccaggagagctgggaggacagaagtaacaggcacaccagttgacctaaatgctttagtagtggctcaaggatctagtggacattccaaaagcatatcattggctgcataatggagcacagttcttgtggcacattgaatttggttgagaacagtttctgctgacagctgaaaaactggcaacaagcactattagcagtggcattgcaatgtagcaaacagtcctcccatttctgcagtgcaactgtggatagtggaaggtcagagcttaattagcagataacaagctaacaacataatatatgatctagctagtaaacacctgaaccttttttcctgtccttagctctgaagaattggatgcagatgaggttttagaaaagggctttgctgtatgcatatgcagactcagatatgttgcagtcgtgttatttttgccgcatcacattcaaagtacaaacgtagatgctcaaatagtcaaatagatatgtgcacattcctccctatgaacacacacttataatataagtgttggaggagaatatgggagaaatgcctggtggtcctccggccagctccacaaggtggtgggctagacgatctgagttcgaagtcttatcccttctaattatttggggcctgtttactttgatgtcattttcaaccataccattttttggtaaagttgctaaaaaatatctacatttagtttgttgctaaatttggtcaatacataagaaattatgctaaaattttggcaatattgctatcttgccaaaattttagcattgccaaaacttggtaaggtttattttggctacaatctgaacagactaatattcacctcttcttttagagaatatggacatttttttccttttaacctttggctgtacattttattagatcatcagaaatggtcaggttgtgtaagatatgtgtagttcaccgtgcaaaatattttttccaatcactgatccggtttccactaagactgaagagacaaatgggtgctcatttgctaaaactacccaacaagaaaaacacaatttagagctgatgacgtggcaaatagcagtcttaacagatgttgacgtgtcaatagctcgatagatctgcatcttaatgacagatgctaaactttgccacgttggtaatattcagcacaccatgttctttttaattagcactacgcaagacggctactttcagagaatgatgcaagagaaataaaaaatggatttcatatttggcaaatggggcactaaactatcgccttctcgtcccacttattgtgctagtggagcagtgacgcagctgcaaatgatgaaagaaaaaaaattgccgttcgtgttcataattaacataaattaatttcctaagaacaatgggtgcttcattgaaagatgtcactggaaaagttttcattcagcacatgctttgatcggttgatgcatacgactagtcaaggaatgccttttcataaaaaaaaaggtcggagaaatttcttccgaaaacgatttgatcgattcattgaaaaaaagtaggcatctaaattcaagcagtagattactcaaacttggattctagaggtgataatcactacactcacacaactgtaccaatttaaactaggcttatttcctaagtgatattttctccggccataaatatttactccatccgtttcacaatgtaagatatgtctatattcattaacatcaatataaatgtgagaaatgttagaatgacttacattgtgaaacggaggaagtagtgcttagaataaaatttagttaaacttttaaaattcagagcaccaataacatctcaattgtttagttttaaagcaaaagaaaagatatgcatggagttgcctcggaaatgttgtcataatttttcatcggactggtggcagatgtcctgaccagatttattaagatggaagaaggtttaattgagaagaacactcaaggttgttgttcaaaaacacttccctaccgacacaagtccctcagggtgtaaagtatcataatagtatcatatatttaatagatttgataaatttattttaatataaaattggtggttggatatttaaaagtttgactaacttttgttctgaacatcaaatgtatatacaagaaagtttatgcattgatgatgtgaaatgcaaatattttggaattatacatgagaacatagggactatgcagacaacataatcaagcatgctgtcatgttgcctggctgcccattaagaaactagtgtttttacggtagtctttactgttactgatagtattctaccatcggtaaaaaaacctgccaccactaatattgtcggtaaaaaaattgcttattatgtaaggaaaggagcaagcctagatgcatgggtgagtcgtgatgcctaattctaccaggctccatcaaatattaaagtataatcgtcggacaaatcgacaaagataagaaagagtcatctgtcagccaaacgagaaaaactgatcatctatctaccagacaaaccataaaaggagactgtctctgtgcttggcctcaaatttcaggcaaagcaaaacacctgctaatctgtcagtcaaatgcgaaaatgatatcaccattcgtcacaaaaagtgtggctgtaatcaagcccaaactctctgacagaaagctcgatcagaaatacacaggtatatcctgcaaattatccctctcatttcgctatcagcatttagttcatcccaaccttgctccctggaaaaatggaatatcctgttcagataccttaaaaaagaggcgacacatcacaagatcccttgaatattcagacaacctgcacgagaaagctaagtgcagcaagcaaccagcaatgcagccacattgtctcgggggagagaagggtttcaggttctgatacatcaggatctctaccgaattttaacaggtgattagtattataattattgttcttgttgttgttgttgctgctgcactaagcatgacaccatttggtggatgttttgtctagtgaaaaattcagaaaacctaactcgcatttttgtgcagaaagctggggaagtgaggagctgaccaaccaaaaggcagatgcagatgatgagattgtgctgcactttggacggcgaattcagcagccgtgtggatggatattctgcatgcgatcccgggatcctgtaaagggggatggatgcactttcatgggtatggagtgcagccagcatgctatttctgaatgagatgtagtattgtctttgtttgtttttttttctgttgttacaggaaaataaatagcttagaacttttacgaaaaaaaaacgtagtagtacgtaaaagtaaagtaagggaaaattggaaccatgccattataattttgtaaaatttaagatatgacttatgtttttttggatgagtataaaggttttattatgtgacattctgatttatcatgagtctctaagctatttactacactcaattctcttttaccattttttcctgctaccaatcatctatctcaaaaaaatgacaacctaaaatgcgtgaagtcaaaccttaaatcatcaatagatgtcaaacatcaagatttgaaattaattgggatatttaatgctttccttttcttttataaataaacagcttgagaaaataatgataaaacacgtgcataggagactgtccaaaacatatccatttgagaacagagttagtgtgtgtttagtaaatttggtaacacacgcagataatgtttttttggtttatgaaacacaatacaatttgcatggtattaatcaagatgcttttgtgcacacagcagtacagcacaccgatagccaatattcatgtgtgaaaatcatgtccatatatttgtctcaaaagtacattcatagtattgtaagtttatttgagttttcaaatgttttgaatatttattagttgttaaaactgtattttaaaaccgtaccatagtccaagttgatatatttttatgatcatcggaaatatgccacatctcaagacagtaacataaaaaattgtagccctgttcttttcggactattaactggattattaaaataaactatttaccccatgttttaaagacaatgttttcaaaggaaaaactttctctatagtattacatagaccacttgttttgtactattaatgaaggttatttttgaaaattttaaatttttatataattaaatagacaatttgtgatagtaatgtgctcaataaatcaaacaggtgtatagaaaaagaaaaaaagccatgcaaaatagaattccagtacaaccataccgtctaaacaaaaggagaaactcgacttaaaaaacttaaaaaacaagaatattatagaagaacctaatatcaaataaatagaacgagtgagacttccaatctggatcggctagccatcatatctacctctactctcaagggaaggaaaataacgccacaatggtgcagcatctttagttccattaacttgaccactaattcactgtcttaaattactgctgcagttaggcacacatcgtttcacttcacacaagtggcaggagcaaacagtgagagcatgggaagaaaacgagtaaaaaaaattcgattacgttttccaatccgcacttgaattcttagggaaggaaaaaaaagtaagcacaagaaagaaagcacaaagtggctgtgaggaatcccattagcgcaattaggaattaatttaggcggccgaattaaagaaatcaaaagaatttggagaggagaagaagcaccccaaaaaggcgaagcctttgcgcaccatagaaatcaccaggacccatcgcaagagcagcagcctagcggagcaccgagcaagaacaagcagcagcagcagcagcagcagaagcagaagcagtagaagaagaagcttttcttgctttgcttgctttctctctctctaggctccatctcctccctccaccactgcgtctcgaaatatccggctttcttgttgtgcgatttggtgcgaggtggtggtgattgcttcgtcggctgttgatttcttcgaggaattggagctgtgttgggggattcaggggggcttcatggtcgaagggctcggggatggattgaggcgtgggagaagaggagcttagcttcctcttcttcttcggtgatcgggtttggggttcttggaatcgcgaggaggcgggacatggcgggagattgggcttgtcacagactcaggtatggattgcattctcctctcgaatttggtttctttccggctgccctccgcgcagcccctgccccggcgaggctggccggcggcgactgccaccccgccgccggtgatgtgcgtgcaagaattgcgcttcaatggcgaatttccttgtgttgtctcgattttgaccatcacgtttacatggttaaaaatggtagtagtctttaaaaaaaatggaagattcaggtgttcatcgttagctcttgatagcaatgcgtctgatttttttttctttttttgggtcagtctttgagacttaggattgttggattgggggagatttgtcatatatgagtactttgtgggtgctacgaattgttttcgcgccattttttcttctggtttttgggagagcgtgattagcacggaaggtagtttgttggatttgattagttacgtcggaaaggttaaatattagctgcttatgtcgactacgatgttgaaatgtctgagatttttctgtactgttgtttcaatcaagaaggcacccaaactggcaattccaagtaaaaaaaaactatgttttataacctactaggttcgtctaatttatgcatgattgatcatttcttgcgttaataatatgggcatgattttctgttgatgttttgttttcgctcgtatgttaatcctttagatatggactttcagatgtttccttgtagtattagttttgatttgacccctatctgtatgtggtcttttaatagtaaaatctaaccatataaatgtgcagatatttggagtaaaattcttctatttacatttctttcaacgactgttatctgaatttttttgcgtgcagtttgattttatactctcttttgcaagtaacgttaataatttttttaatcttaatagttttttgtgtcagtttaaagccttaagctggtttgtaagtaccaatgatttagaattttagatacttttactttcgattgactgttacgtagcaggatcatactgcagaatgctcatctgtgagctttctataggctctttactctctcttttaacatctgctatgctgtattgcaaactagctattcattatgtttcctgaataatgaaaatgtgtgtctgccggtctgcccctgtttggataagaaaatttcaagtactggcatataaaggaaaatggactatttcaggcaaatattcatttttgcttgttatgagacttatattattttactttagatacctttactatcaacaagtggtggttgattcatatcctacccttttttgtgtgtagagctgtaaatgcttaaccatgagcattgtagtatgtacatgagttagttccttgtagaactcaaattatcgtcaaatcatcatactaaagtatccgtacaagattcattgtacaaaacctttttttttggtaaaatttttttcgataatgttttggtaaaatttgcatcctatcaacaagcaacatgaaaccatgcatatacatatatgtagagttgtaaatgatcctttttttttatatcctcaaaaagaccaaaacgcacgcatatgtccagcacaaacatttgtagcaacatataaatctttatgaggttgatctttgtgcctaataatgccttttgatgagagtgttctctaaagcatctaagatactaatatttttctcaatttggattgtcgtgaccaattggactgaagttctcaccacatgtttgcagggcctgctgatcaatgcaaatagacttgaaagaacattatattctcgtgatcttatcaagtgaagccatatctaatgaaagcttgttatatttgttgctttcttgatgagatttgttgcttatgaccacttgtgtcctctaatcatccaaagcaaaaaaaatcattcagccggtctttacctctccaggaattaacacctgtgacaagttattccttgttttagggcaaatctcctttggcaattgcaccttcctgtcgatcgattatcctgagcatattcctcttattgagagaacccttcagctgggcaaatctcctttggcaaaatacctatctatagtctgtctattcgggcaaatctcctttggcatttagcttagattgcttccgggcaaatctcctttggcactacctttagcttcagattgctctttgggcaaatctcctttggcactaggtactctactactatccgcattagatatttggatcaaatatcctctggaagttagtggtattacatcattatttcctgcaactatatatcgtggtaattctcctttggcattagcactgtacacacattggttctaccacaatatcgatctcagtgaaagactgaacaccaggaagtccagaacgattcaaggtaatttgtcctcttttatggtgtatattttttatgtgagccgtcattttctataatatttattcacttacaaaagctttcctattttgactcaattttcagaaataatttttggctggtggccgttgtattttagcatcttggacaggaagctttcagattctgattgttcagtctggaagattgttttgttatttatcaactctatacatcagtgcgcctatcctaagaaggtgagcatgtagttaatagtatatttcctttaaatatttctgtgtctattccattatctaaaaaatatatatttctgtgtctgattccatgtgaaaaatgacaacgtactttgttttagggctcggaaagatggatctatatgcaattgactcggacactgagtcatacgctgaaactagtgacagtgaagaagaccaagaagaatgtgaacttacatactgtggtcatgcccagaacatcttgtccagcttggacgagagcattggaaagatcgataactttctaagttttgaaagaggatttctgcatggagacatagtttgctctgcagctgacccatcaggtcagctgggccgtgtagttggagttgatatgcttgttgacttggaaacgagctctggtgacataataaaacatgtcaacagcaagaaactttcaagagttagatcctttgtctctggtgattgtgtggtgatggggccatggattggacgggtgatcagggcatttgacctggtcactgttgtgttcagtgatggggcaaggtgtgaaatgctcttaagagattctgaggtactgaagcccattcctccaatcctttttgaagatgcaccttatttttactatccaggccaacgtgtgagaattgttcatccttccatttctaagtcgggtacatggttgtgtggatcatggaaagctagtagagatgaaggagtagtgtctcatgtcgacgttgggctggtacatgtgaactggatcacctcagtaacaaatgtttggggaggtcaatcatcaagtcctccaaactttcaggacccaaagaagctcactttgctttcatgcttcccttatgccaattggcagttgggtgactggtgcactctttcggattgcgagggaagtctctgggaaaattctgacaaatcttgcttcatgagtatgacctggaagtccagctccgacactcaaacggctatcggaacttatggttcagattattctcaaacatatgttgttgcaaagacaaagagtagtgttgatgttttatggcaagatggaagtacatctcttggtttagaacctcaaagtttggttcctgtgagtactcttggtgatcatgatttttggcctgggcaatttatccttgagaaattgacagttgaggataatggtagatgccagcggactgggatagtgacaagtgtggatgcacttgaacggactgtaaaggtaaaatgggctgtttcagttgatagtgacactgtcagttatggagatggactcactgaggagactgtgagtgcttatgagctagtattacacccagatttctccttcttcactggcgaagtcattattagatctgctgtcaacatagaaaattctgaagcaaatcttaccaatggaaccgtggcagttagcagggagagcttggatacctcctctgccttcttatcatgtattggcaatgttcttggatacaatgatgaaggacttgaagtccaatgggctagtggtgcgatatctagggtaagcttaactttgagaaactttcttctcttttttttgttgctttgatttattttatttacagaagtgttgctttactttataccagttttatttccaaactttgatgaaacatggatcggtccctggtcagactaatgataacataacttatcttgtacaaatttcaggttcagcattttgaaattattgcattagataggattctagatgattctctagaatccatgatcgaggagcacactactgatgatttggtagacatggctgagcaggagaaaatgcaccttgaggatactaaggtccgcttctgtctacaaattccattgtacggttattaaacttatgggttgaaatttcatcgatgatttatcattttcattcagagtgcgctggaagaatctgctggagactgtacaggatccttgcgcaaagccactgctttcctcttttccaagacagcatttaattttctgacaaatgtggcttctagtttgtttggtgctcatgattcaacattttccagctcggtaagttctatttctctctagatgatgcaagctaaatttttatagaattctgagacaacggcattgtttcaggtcaatgcagattctcagtatcaaattgtgacgacagcagaactgcagccatctgcagaagatatctctgaagagaaacagaccatggagctgataacacagtttgagaagccaacattagcttcagaaaatgccatgacaaaaggatttgatgttgtgaccgactgttctgatcaccactttgtcaaagaaattggtcacgaaaatgtaatggtttacttagtgcaactttctttctttatttttctagcaaattgcaatgcctattaatattggagtatatgcaattcaatgtcataataattatttctgttcttctaggtcaaaagaggttgggtgaagaagatacaacaggaatggtcaatcttacaaaacgatctgccaggtttgttttcttctctcattgtatagtttattcagttgcaactcttcattaagtcttgttgttaaatttgatattttggcatatgtttattttaattttaatttctgagctagcatggcttaatactgacgatccttatatcccactatttttttacttgatatgacatgtatatacttgtggtcaaagataggaataagttaaaattttctacattccacaggatagcatagcatgtgagaatcccagaaacaatcaatctcggtagcaagtatgcaaggagatgagtggagttataaaggcaaaatttattttagttttatcatgtatgtgacctgttattatttaataaatcattacttgttaatcagtgggaaaaaatttagtcatggcacaagaattttgcaaatgcaaggacaactgtatagactggaaattttctgccgaaaactcagtaactcattctagtttttagttgcaagtaacatcttcgaataatgatggaatatatagtttcttgtacagcagttatatgatgttctttctttctattacacagatggtattcatgttagagtttatgaagaaaggatggacctcctgagggcatgccttgtaggtgcagctggaacaccttatcatgacaatcttttcttctttgatattttctttcctcctgattatcctcatgagccacctgtaagttcttcatttttcattgctcttacctacatcttctattccagattttcttgctgctgaacagtaaataaccatgttcaattttttcccccagtctgttcactaccattccggtggcctccgtttgaacccaaatttgtatgagtctggcaaagtgtgccttagcctgctcaaaacatgggcaggaactggtagtgaagtgtgggaccctgaaaattcaactgttcttcaactgctgctgtcccttcaagctcttgttctcaatgaaaaaccttacttcaatgaggctggctatgacaaattcatggggaaagcagatggagagaagaactccatcacttacaatgagaacgctttcctgctgtcatgcaagtccatgacgtacattttacacaagccaccaaaggtgcgtctcagctctggaaattctgtacacagcaatttctgaaaaaaagagccattatggtgtccatactgttgttttcttctcctaatttaaatgatactcagaagtcaaatctcctatggattctcagggaaaaagataatttttgaaaatacatttttacacatccatgtttcagaatgattggtatagttcaaagaagtttggaatcttgtgaaaccaaaatctaaacgctgttcagaattaagaatgctatagctttagtttgtaatgcttcatgtgaattactggatctcacaagagtttagtatgtttaatcttatatataaccaagtcagctgtaagagtcacccctttaagaaataagatgtgtatactgatagttctttcttttccttgatctagcatttcgagaattttgtcaaggagcacttcacttgttgcgcgccgcacattctggatgcctgcaaggcttatctcggcggcgatcttgttggacatgctcgtgacagcgcctatatatcggatgacggatgcaagaactcctcaaccggtttcaagataatgctagccaagctcttgccgaagcttgtcaccaccttctctgaagccggcatcccctgcagcccgtgactcatggcattgtgagtttgtgacactggactactgtgtatttgtgacaaaatcgggacaccaatatatgctgtgtatgtactgtatatgtgcaagctttgtgactttgtgtatcccaaaataaaatgctgcctggtttgtatgatacttaacatggtgatgtctgttgtaacttgtaagtgtggttgaggcagctggtgtggttgggtttgtggtcagttactcagttcacgtgtgttttgagcatgtgaagtatgtagatctgcttatctgaaattctaagcagtagctgcctgattgcctgtatagcctgacagagcagctatctgctgtaattgtactactactactgtactgctttgtgaaatacagtacatacatagctgatatatgtaaattggttttctcattttctacagcagtaaatgtgatgtaagatgccaatcatttcatcatgttattctcatctccagctttgtgctgacacaacgaaatctacataacttcctcaattctctgtttaatcgacagtaattttgtggtttgcatcttccatagccttctacccattataaataaacataactttctgggctaatgaagctggtgaaatccagctataattttggccgttaaaaattggggttagtttcatcgtgttcctgaaatgagctgggagagagatccatcgccttagctcgccggagtggcggcgcatggaatcgactcgccgtcgccggtgaggtgaacttgtgctgaagatttgcaggagcctccggtaatttcggctgccctagctgtggctgcggcgcagccggcacgaacagtgtcgcactcactgtgcgcagccgcagtagttggcctaccgaacagacccactgggccttcaggataggatgaaaacggtccgaaaatttttatatttatgaattcaactatttaatgtaaaattcaatacaacgttgatagaaattagacgattctcgattcagcaaaccgatgaagtcacgcagtgtgatgaaaggatgacagctaaaagcaatcttgtggatatgatatcatctcctttggctgtaccgaaaagaagtcacgtttaaattgatctatgctaccatccatccaccattccaccaactagcttgatttctaaatactcagctttacattctgcttggcaatacgctgttgcttctccaacctctttgccagacagagacgcctcagtgagttaaatactacaaggaggattgataattgagtttaacaaaatgcagctgaaaatgaaactagcactaacaagtagcctcacgagatgaggacacagagatacagctatggtttttcttttgaacaacatctccagtttcatgttagaagtaatatttttcagaggacagagaaggagagacatcaaccaataaacccaagaaatcctctcatttttcagttctcctttttgattgaaaaccagtccgatttttttttcaaactcctgaatctgtatgaaatgaaacagtttgttcaccaaaggcatgcaattccagaatccatctttcttatcttctcacctatccaaatgtcacacacattatatatctgcacattgcagcatttactgcccacaccaaactcccctactgaattccagcaaaccactggttccctgcgctttaaaccaacctttggcctggtttacttcacaaatttttcttcaaactttcaacttttccatctcatcaaaacttttctacacacataaacttctaacttttttcttcaagcttcttattttaacgtggaactaaacgcagcctttgattaatttgtgtggatatgaatttaaattcatattcatttgttcatattctactatacatttagcagaaaactatggatccgtgcagctgtatcccgtcgttttttctgacgtggcacgcatgtggaaggcgtgggacccagttgcctgccgaaacgcatgctgggcccacctgtcagtggcttttacccaaaaaaaaggcctattttttcatatgaacccctcaaaaagtaaactttttcctccatgctcgacacctgccacgtaggatttttttcccctttttgggaattgatttgatcacaacaaatagccttcgtctcccccacgctctcctctctacccaaaccctccctttcctcccccaattctccatttctcctagctcgccggaaaccctaagcgggccacctcgcgccgcggcgggccggcgagcgatcgcattgggcggcggcggcgatggcgacccacgcccccaagtgagtcccccctccctccgccgatctgatcggccgcgcgcgccgctctttgttccattggaatttttgtttttgtttgtgacgtggtcgtggttggttgctgctctgggtgggggcaggggctacctctgcgcggggagctcgtcgttcgatgatcccgacgtggtcgaggtgacgccggcggcggccgcggcaggggggtggagctccggccaccagaagcggaagcggagtcaggtgatgtgggaaggcgcctcctctatctcacctttgtttgtggtgcatgattttattattttttttggtgatgttggaattgggaaccgtaggggggactggggcgcgtgattgctcgatgtgggaaggagggttggtgatcgttttaatggttgcgtgttgattccagttatgccatgacctgttattttggtgtggaattgcactagaattgtgtgggcagatgatctttgattgtgccaggaaatggttgagatggactggcagtggcagtttgatatattgaattttgatcttagatgcgctcaatgttgaatatcaagtggagtttgtgttttttttgtatggtgagaagttgggctgtttttgttagatgattgctgaattatagtttatgattgcagtactgaaatttttagagggtttgattgcattgaaatgcctgataaaccaagcaggagagaagcaatctagactgtctagactttagagtgacaccatgtttcagcctggttcatgatggactagaattcatgttgaaggaaatctagcatgggacatctttggttgggcttttgagtggtagtctagcattctctggcactgcttgagtaaaaatccttgtttgtttcttatctggagagttaggcatgtaaatgtgatgttggcatgtgcaatattttcagttccagagtggatgggcagactgaaagtgcatgccatttgattattctgtctgtctgttaggtcaattgttcaattatttgacatctttacctactacccaatattctggtttagacataatctgacatatgacgttggtagtagagactggaagctgtaagtacatgtcatctgattattccagcttagtctattgggttgtttggttctttgatgtctttctataactctaggattatgttttaacaatcatctaaaacttgtggttaatctagagatgcctcaagtgaaatttgtttgtttaaaggtgtcactgggccttctttttctttctgtaacatatgatattttgtgaccaaaagcccatctccatcaaccatcattgttggaaatcaagatagagttcagactccaaagaacataaagaggccaaatataaagatgaataattagtagtaaccatgtcagtttttattctatgaactcagcattgccgtgacgtttctggctttttcagccaccacgatttcctgtataggatcaattatttcccttcaaaacatttttgtaatatcatgttatgaaatgttaaatggtggggcttgagtttttttttatacgctgaataggttgttcctcatgaagtaattgaactggatgctgatgatgatcctgatggagttgtgattattggtgaaaaatcatcagttgataagaataagcaagctgttggatatcctatagactggctaaagcatgcaaaggtaagttttctcatgtcttctattttcattttcctttttcctataccacgtcagtttgacttattttctgtgggaacaactccagagtagtttggctggtgaaattgctggcccaagttcctacccatcaaaaaatcctgatatattacttggtggcctgaaaatatttcaagagaacccattttacaacaacattgatgactatgcttatgaggcatttgaagaagattatggttatgatgaagatgagtatgatgattacgattatgatagtacactttatgaaagtgaatataacttcactttggcttccaagtttgatggtttggatatcccacctggtgtggaggctcctttaccatggttgcagacgactgcggcagagatggcaaataagaccaaacctgtgaacatgatggatgataaaattgatgaaaaatacagtgcatttaagcaattcgatactgttgatgatcacagtgatcattattattcgaagccagatttaagaaaggttcaggtagtgaaaaaggtaaccttttttttgtaccctctgtatattccttttcttgttagttcgatactaagttttcccattgacagccttcaaaagaatgggcaaagcgtattcagcacgagtggaaagttctagaaaaagatttaccaggtagttttgttgcttcatatgctcttttttttatgaacagctaatggtacagtgtttatgctaagtgtcgtgcatgatgcgatcatgctgttgataagtactacattcatgaggtccttttatgattatttactttggatttttgtcctatatttacagataccatattcgtgagggcatatgaggatagaatggacctgcttagagctgttattacgggaccagcaggcactccctatcatgatggtctcttcttctttgacatttacttccctcctcattatccgagtgtacctccagtaagattttttttttgacttaaccagcatcgatgatgtttcactccatttttaagtatcttacaatagttagtaatctatgcagctggtgaactatcggtctggtgggttgcggcttaatccaaacttgtatgcttgcgggaaggtgtgccttagcctgttgaacacctggtctggtagtggatgtgagaggtggagtccttcaaactcaacaatgctacaagtcctggtctcagttcaggctttggtgttgaatgccaaaccttatttcaatgagcctggatatgccatgcatgctaatacacctcatggcgagaagagttcattaacttataatgaagatactttcctgctatcctgcaggacaatgctatattctctgcgaaatccaccaaaggtatggatatgactctgttcttatcctagtacatggagatgattacttattttcataatagtactaaagttgtttgatgaatatctagacatctactgtaaaatctctcttgtttgatgaatatttcatccattaaaggtctctttgcaatctcctctcgaaatatacatatttattgatgtttctcattttcgcactcgtatgttcctttcgtcaatattaattagtaataatttacacagttacactaactattctcaattattttgaagacattaacattgcgatcatctttaccattccttctactagtctttgttattattatagcatccataattaccatgcctaaccaaaatatgtcacaaaaggaaatggagtgattactatgggaagctattgttgtgcttatgtggttgcatgccatggattccccactatgaatagatatacctgtacatcttcttaacaatttatctttttgttgtggttcttttacagtggaaatatgtgttgtttagtttctgttattttggatccaatcttcacatctgcaaatttaatactaatgcattttttttgcagcattttgaggattttatcgccggtcatttccgcaagtatggccagagcatcctgatagcttgcagagcctatctggacggtgcccaagttggatgtcttgttggaaatggtgtgcaggatgtcgatgagggcgacaagagctgctcggcgaggtttaagagcgcgctgaagagattatttgaggaacttctgatggaattcactgtcaagggagcagagtgtgacaaattcctagctgagaaggccaaagccgcggcttctagagctccagcagacaccacattgaggctataagttgatagcctcgcgtggtcgatagacgggagtaataatttcgctattgaaataggatcctcaactcattatgcccccggattctaaccgtttcctggaagtagcctatgtaaatagccttgtagttgccccggtaaacataaacgacatatccgtgtttgtatttaggggctatatatcttttttccccatagcatgagggtgtcgtctacctgcggagccttaatccgctgtgtatgtgattgacgccacaccatcttggccttctgaagaatatcatattgaactcttatcagcagatccctgcttctacgctggaattcagctagaatgctagattatcagttggtttgtgctcgtgcatgcctggctccgttcaatcctactagtatattttatatatatctggtggtggtacggagcatatgggtctgtttggaggagcttctagttgctgcagcttcttctaaaatcaaaagctctcctaaacagtctagcttttggtttagattctaagaagatgttgttgtggaattcagaaaataaactagaagctggaaaatccggttaaaatgattcactgcttttgggggtgcaattcactgctgtgtgatggtatttcagctctaactcatgacagatgccaattaaaatgaatcattcctataccttttctttgtacccatgcggccatgcctttttctgtacacattccaattgcgattctcaaaggttgcacttttcaccctctaaagtgcaaaatataaaccttctaaactagtacgatttgacgatttatagtatggccattttaaaaacaaatttcatctgaatgcaaaatcgaatgtggctcgataatggcttttacaaataaatttgggataaaatttataatgcatttagagacacgctttagggaagtaatgatagtgtattgatggaatcgtgggtatggctgcacctattaaaaaattcaaatcctgaggatcaaaatgtcatattcatacttgatgtgttttaaattggatttaagtagggctagtgaaagaaaaatgccatgttgctcttcatcaccgtcatgatcacttggatgaaaaactaaaaaaaaagggaaaaaagagaaaaaaaattctcatctacccggaggcttaaacccatagtaaaaaaagccggaccggcactcgaaccgtcgtggctgctgggtcaccgggtcagcggtccaaccgccggttcacccgggtcaattgcagaaccggactactaatttctacatatatgttctttcgttagctcattaaaacaagtagcagtgtagcccaatggtaacatgcaagggtttctaacctagccatccaggttcgagtccccacaatagcagtatttttacacatattcttctaatagtaggtattgggccttagaaggtagtgcctttgggccttcgcatggcccatgtctttggcccactaagcgaaccgtcggttcaaaatcagcaggttcaccggttttcgttaaaagccgtccggttcatccggttcaccccggttcaactgtacaaacggtctttgaagcaaaccgaaccggcgaagtccctggttccggtttttcccggtcgaaccgccgggccggtccggttttttgtactatgcttaaaccccacaaagtcaagaggctgatgcgactgcttcctcccctccacctctccatttccttcgggaaatcctccccaccaaaacaaaccaagagagaggagcggagatctcacaactccgcctcctcccaaatggcgccgccgcgccgcgatccaaaccctaaccacctcctcctcgttgccgtactcctcctgctggtccctgccacggtgtgatgaactact

SEQ ID NO: 7829 - DNA, 10315 bp, Oryza sativa
tttataaaaccttgtttagcaaatgaactaaatttctatatattctttcttccccacacacattttctctctcatcaacttacaactaaattttggagacaaaaaaagtgtgtaaaacataggtgcaaatgtagtatgataaaaaaaaacattggaggatgaagttgcaaaccttttaggcacctccgatttgtatgtaatcaccaaaataaattcaatagaaattttggcatgacctcccctctttttgaagaaattttgaagcttgctcgggcagctggaggaggaagaagacatatatataggggtgggactttagtcccggttggtagtaccaaccggggctaaagatcaccgggatccggttggtattaccaaccaggactaaagttaagatctttagtcccggttggtgttaccaaccgggactaaagatcccgggggggcctgacaggccctgacagcattcgaaccgggactaaagatgatctttagtcccggttggtaacacaaaccgggactaaagatcaaatatgcccgttacccttttgaaccgggactaaagatattgcatccgggactattgtggaaatcggccgaccgacgaaagatggtttctccaccagtatacatatactttagtaaaataagttgaatttgctacaagagcgttattttcaaagaaccccctaatgtgattttagctttcaatgtaaccggtatcttataataatgtagtgaaacatgtatttttgaagaaaaagacataatatttctccttttctaatgctattttttctcatccttttattttctgttagtgaccaaattaataaacctgtgaaggagtaagatggcaaatacatacagatatttagtagataatcatatcatcgagctagttgggtattggagaagacacgaatattagggaatgatctaacatcaaataattagaaagggtgatgcttcgaatccaggtcgtctagcccaccaccctgtggagctagccggaagacccctgagtatttctcactagtaaggtattggaacgaccgaagaagagtaagatagttattcatatttataaggctcgggtttttctccgttttagttcagatttaagaaggttctagattttcccttagtatttgtttgatttatctcagcttttgtaagtgccgcgtacgtggttcagtcatcattgggcaaaactgtcggtttgagaataataagattggccaagtgccacctgccaaatcacctgtgaataacacaggagtaagcaggaacgagttaccagctaaacagagtatggaggattcagccatcagcacagcaggccagcagggcttcatggcagcatgggcatatatcacaatgtcagcatgtgttaagcagcatggaaggaaagaaagacgggcataggttggctggacttgttcaattcccctgcgtaaaagaaagcaatacgagcacgcatgcgccacgtcagcattgccagtatggcgctgcttgatctgtctatcacgcctatctacaaagcaactttacctgtgtataatctcgtaagcgcacaatgataattcatacgtaattcatactcttatcttaattacctttcagcagatgatattgaaaatttgaaatcactaccagcgattaccttactagcaaattattaagcagatcgaatgcatcctgatgctggcatttgccgtgggagcagtattactgtcacattagcatgcatgtaatctgttttcttgtcatatctgtatgtagctccaagctcttggtagtagtaactccaatttgcaaagcttccggtatcgcgtatggcgaaggagacgtccccatcaacgacaaaaagcttcatccagcggtcaaaattgatagattctctcttaggaagccggcttgccagtgctcgccactgccagtagtactctggcgtgtcgacgtgttcttcactcgcgtcaatctgatcaacggtaggcgatcactttacagtgcaagcagtagtatgaattttgagacaaatcgaacaagagcaagcacagttgtgtagtaccagacaggatacaacgtcgaacgcagaacggagcagataaaatgtgcttctcatgatcggcaaaatctagccatcgaaagggctcatcatacttgtctgccacgcccaagatcggctccgcccagcccaccaactttatcatcacggcctcattgcgtgtcagcctaatcgagaacgtgaacattctcgagctcaatttcaaattaaccggcgccgaattccgatcggttttgaacaaaattggtcgtgtcagcgtagcgtgcatgggctgcttgctgcatgctcctgtccagtgtccaccacgctcgacgacatacgtcatgggcacgtaacacgctggcatgcacaagctcgtctcgatcgcttttcttttttgccttggaaaaagaaaccttaatttgctccattccattctcctacaagcaaagtgatagtggtgggaatatggggaaatggaatgtatcgatcaacgtcggattaatcgacggcgcaccggcgaaggaaaaggcagccacagccacagcctacgcgaggattggggaagcgccaagtataatacgcgcaatcattgggtactcaacccgcgaccccgacacgctgccgccccgccgcgcgacacgccagcggcgcgtgcggcgtccagggccccgcgcgcgcgcgcacgcgcacgcgcccgagcgcgatggctggtggctagcggccgggccgggccggcgcggcggcttctgccttcttctcttcggtacgtggacgtggctggtggccagccggtgcgtgcaggcgtgcggcgccacagcgagcgatcaccaccgtttttcgctggccggtgggtggtcaccccccaccgcacgccgcgccgaacgcgccacgcgcgtttcgtcggaaaaacggcggcacgcgcgccgcgcgcggctggctggccacctcctcactcgcgtcgcgtggccacgagccgttcggggatgatatgcttgcacgggccgagtgagtttgcccaacggatacgatgcggcttgggccaaagtccggatgggcctgaagcggcgggagccgggagaggtagtggtggggtgcgagggattagtaccacctcggggagttgttgcggatgacgaggtgagagctgctataaagagggagtgctatggaataggtgaaatcacgcagctgcgtggtgagcacaaagcgaactattctttcgccttttactaaagaataccgtgtgcgctccacatatagcagcatacgctatttttttgaggtgtccctcctttctggaagggcgccaacaattcaaacttaaatctttttcttttcctggttgcaattttgcatcttttccttttcctggttacaattttgcatccattttgccaattggtgaggttatcgtatttgtgcaagataataggaaatgtgttgatgaactcttgcctcaaatctaacatgaatgaaagggaatgtgtaacattatcagcacaaaataaatatattattaaaaatatattcgatgttacgtttaatcaaacagaacagtggaaatatctgagcagaataaatagaatagtgtgacagccttgtggcgtatgataaaagaacttgtcaatatcgtcagttttataatgaatggagtgaaatgtcgtcagtcttgtggcatttgacaaagacattgccttcacccagatgcaaaaagaaaggaacagcaaagcaggctaagcaataagcatttgatctcacactggaaaggattatacatattcatcgttttagttgaacaacaaaagcttatagctcgaacaagaggacatattatcatataggtatggcaaatctttcaagttccagcaatcaggacgagctaatggtaagattttccatctcgtttgctacatcatcagctatctccacttctagagctcccagggacttctcaaatctttcaagggctacaaaggcaccctcaggtgagccaccaaggctcctgatttccctccgcattgcattggcgccaccatacaatcttttcactgaggatttcatctcagataagtcttgtggtgggtacacagacgccccgaggtcgttaatctggtcagcagcctgtctgcaacagctcaacaattgttccattgtctcaactttttcctcattagctccacttcggttacctgagatcttaagcaaacaagtaatgaaacgaattgtttctttcaccacaacaagcgcatcggaagccacagtgacaaccaatttggcaacagcaacctcctcttcagtgaagtcctcatctaactcaaggtcacttgacgatccatctctatcagaacaacttgtggtgtccacagctccattagaagatttttcagcagtgccattagaatcaccaattggtagttctttcatctctcggagaatatccttcagatacacacctatctgagtcatggctcgtcctatggcaacacagttggttgttggtaccttgttgagagcaagacatgcttcccatacagttcctgtcacctgaggtatagttgttttccggtcaggactgcgtgattctgcacgtcacaaaaaagctgtgaatgctagtaacatcctcttgcatactgcattactattcaggtttcttactgcttatccacttatgcattacatcgtgaccaccataaggaaaataaaaagcagaaaatggtaaatttgtccttctcactttagtcgtaaggaaattagatcatcaaatttagttatgagggttgtccgcatacattagttaattctgaatgactatttagttatctactcctaatagttacgaagacaaaagggagcttcagacaaaggaagatccttgagaaaggtttttacttaccataagcagaaacagcttgattgaacaatgagaagctggagtcaacaacattctttgcagagctacagatggatttgtgaagtgtgggtcctgcgccaactgtgctgccgtggcaacccaaaaggaaaccctgcaggatgttgaaatatgcgacgatgttctccttgagtgtttctacatcaggcaaatcaccactccagaccattccagctgtattgaaaaacagacatcagcgaacagtgacaaagctaaggttacatcatcacagaaacggtatcagtatatcgcgacaccacattggttggatattgcatttgctaccctaaccactagaaagaaacaaatggccaatgcaaataacatttccctgctatatgatgatatacagcagctgaactataacctaatgctgctacattaattccttgccaagcttaattgggcggaataataaactaacaccttgatttccccaacagttttttctatccaagcgattctttccgctgaaattaaacaatctaaacctaccgacgctaaattaagtaggtgtatagtccgatcaactgagcgcacgaaacgtggggagagaaatcgttcgttcttagacctaccaacagtggcctgcctggagacttgctcgccgagcttgacgacctcagaccactccgtccgctccaagccgccgggagccgcctccgccatcatctgagaacccaaagtaaataagcacgccgccgcgccgtgagttaccgtgggattggaggcttagagccgtgctatgaccccatcgggatagagagactcgggtgccaaacctggaaggtgtcgttgatggtctggaggtgcgactgcaggaagcgggacagctcgccgccgcccgccggcttcttcgccgctccacctctcctcggcatggcaggcagctaccgcctcgtcgcgtcgcgccggcgaagaagagagggagaggaagagggatgcgagccgcggcgaggcggcggcggcggcggcgggggcggaagggtttatttcgttagggcttttgggggaagttgggcttggccggttggccctcctgacattgcgtcgatgtgggccgttcgattgaagttaagattcgtgctggaatacgaccgtgattccccgtcacagctggactagccacttagtcgcacgttgcgcgacattaaatacccgtatgaaaaccttgtatacatgagtcaaaatatatggtatgaaattctactttaaatttgaaaattgacaataccatagaacttaataaataattgttagaaccaccgctgcataggttggaagtatctctctcgcctatcttaagtaataatcgcaagtactgttatcagtacgaaattggaaacaatacctataaatcatctctgcttggtgatgagaggaactgactcatatactgacagagagtagtaaaatctaacaaagtgatgtacaaaatatttctgacttcaaaagtgtatgaacctaagttatcctaccatgtgcacttcgcagagttaacaaaaatgaattaggttgggtttggagtatgataaaagagtaaacaaatccgatgtatatccatacggatttctgtatttgcagctcttcaattcaatctagctttcagcagcaaaatgaaatatgtgaaatataaagaccaattagagtcataggagttattctaaaagaaaatttaccaatatttctaaaaccgaatatgagcatcaaatgaatcattgtgatgctgtacatgcgcatatggaatctgacaatgtagtaaaataggtaaattggcattctgtgagttactttatcatgtgacaaacaatcatacgttttatcaatcgtagaaaaggttggtgcttcttccttgaagatgtatatcagttacagaaaatttcagtgccttctccttctagaccataattgataagtgttcatcactattctcttatttaaaatgatactccagtattaattatttagttaatgagggaagacaataatgttaggacacaccaacagaagagaacaaaaatataatataggtcttgtttagattccaactttttctttaaacttccaacttttccgtcatatcgaacttttctacacacacaaactttcaacttttccatcacatcgttctaatttttactttcaattttagcgttgaactaaacacagccataaaaccaaagcacattaagttcaaaagctacataccaaaagccatcatcaactgacggatgaatgcatcgcttattcgcttcattgcttgagttaaattaatcgcaagtttaagctagctagctagctagctggggagttcccacggactgatcaaatagcagaccaatctcaagtaaacttttcatcgagcaccttgtgtgcatcggccaaagcatagcgaagatcctggcatgcatgcttggagcaatcctgacatggcctctgcagagagaagaataaggatgtggtggcgcacagctagaaggcctaagcatctatggggtcgccggagcatgctctacatgggccacagccgcatctacacggaccactactacgaccccatcgagctccatgggcagccgccgccactgctgtgagtctacatggcactgacctcaatggttccatttgagtttcatggctttcgccgccgccaccgccgcgtggaaccagggcgcctctttgtgatggctggcgacgaggggttagcgctggccggatttgggatgggctgaccggtgatgctgtgatctctttatacctagtggtgtgccgcaatctgtgaatggggaggagacggaggggattgggaggagacgcggtggcagcaacgatgggaggaggcacggagagatggcaccggagacttgaggaggacgcggcggcgagggggacgcgcgctgtctccgactatccgcctctccggacgcgagtagaacgaaaggaaattattctttccccaatagggcagggacgtggaagggcctattttttaaaaagcaacttcttaaaggaatcttgatattttatctattgagatcggacggttgctaaccacggaacgaagaatcggacggtccatgtttttctggtgacgtggcgcattgtggtggtgaaaaactttagttttttcactactttagattcgaccaaggaaaagaaaccgatggaaaaaaggtaaaacagggaaagatcaggtagcacccccgcttttgtatgttttagattttttataatgaaatataaattccggcttttacttgaaaaatatccaagcatattcaaatattgaataatatctataacatttttattaaagctaatatttaatatatttttttaatatgtttgttttgtgttaaaaatattgctatatttctttataaataatgtagttaaacttgtgttttaacttgaaaaaagttaaaataacttattgatatgaaacggaaagagtcgataaaaatcacaggagcaaaatcacgtcatggtaatatttcacttattaatctgaaattagccatccctcttgcgaggcaacaattggctattgtaaaacataatgtgaaatgtagctgaaaattgctttatcctaggatttaaagttacataattacccatcacatttaagttacatcatcacccatcacatatgtacatcctatcaagaagaagaaacaagtttgaagggggtccagagtcgaaaatcttccgaaaaattaatccattatagccgctttctctgatatttcaggtgattcctccaagaccatgcaagcaagaaaaccactagtgctacccccaccgaactccaaaagatgatcaaccaagtaggcatgggatcatgaaacagccctatccagattacaaaaaagttaggcactcttaacatttaatgttccaaatatatactactccctccggtttcattttaattgatgttttagacaatgacacggtctacaaaatatacctttgatcttatttttctattataatatatacaataaataaatacatgtttacttttattatagtgttttgaaagacaaatctatatatgttgttctagtttctttaaactaaatatttttaaagttattgatggtcaaagttataaaagtttgaccttaactttgtccaaaacgttaattattatagaaccggagggagtagtatatatcacgagaaaatcaagcgaccataaggtaatttttcaaatcagatcaattatttcacaagtgatgatgatgtcagaagagagtaactcaccatgtccaaacttcatacatataagaagctctacaatgcatatagctagagagagccagcaaaaagccccaaccttcttcaccggtttgctggtgtgaccatgaaaaaatatatattagcaagccattaagtaaaattgtaaaaaatgtgcaatgctattgggcgtgcagggaaattgggataacctgttttgcaagtaggagttgtactcacggatggttggaatagcaatcaaccaccataggattaatctgtacacaaccaaaggattccttggaggaatccagaggcaaaatttaagaaaaaatgtgttgagctccactgtcatgaaaacaacgcacaggaacaacacttgaacgaaccgcaacggccccatgaaagggtaccattgatccttgtcccattgtgcaggggtgaactggctcagtgatcttttcacctgcatatgcaagtaaaggaaggtcggtaaactgtaaatgggttcaacctaactatagtatgcagtctgaagcagaatgtaactgcacaaatgtgcatatagtccaatcagataaaacacactgaatgccagaatggtatacaacaaaataaattatgaagtcaggtatcaataatggcaattgacagtttagagtttggacagagcaacagaaatcaatacagtcccactgggaaaacctcacatgttgtttggcgtactacagacaagaagtcaaagtgatttacttttgctcagcgactgcattgttatagaatgctcccatggacttagcagtagcaagaggctcttgtaagtcgtaactcaagaaagaatcgatgaggaaattcttacaaaaagcacaatagcccaggaaaattcagcaggtacaaaaaaaaaatctaggcctaagggccatgatgaatgaagattaaaagaacagtcctaaaaaaaggtactaacctatttgcaaataagaaacaatttgtttgtttggtaacataccttgcccatgatgcttggctgtcggctcagcccaacccactcatatgttttaccgtcaaagtaacggactggggtgcaggaa

SEQ ID NO: 7830 - DNA, 15507 bp, Oryza sativa
tgcatggtcggcaccggctccggccgcgccgccgacggcacggcggtgaacctcctctccgccgtgctccgcgtccgctaccccggccgcgccaacctgacgcgccccttcgtcaccggcagcctcgagagcaccgactcccccagcttcttcgagcccgtctctctcgtcacctacgccgaggagggatacgcgtacgcggagagcgcctcgtgcccgccgccgcccaccggtaggctcgacgcgctccaggtgttcgaaggtagtaaattctcatgcgcacacctcagttcgctgttcaaggcgacgttcaggctcgactacaccaacggcagcagcgagtcgaccgcctcatcgctggggcttcaccagaggttcatgttcatcaaccggatgcgatgtgccgacaatggcgcagtgcgagcttatgtggtgttcgcgaatcagacagatgtatcggcatactactttatgcttggtgagaaggccatggtagtggagggtttctgggacgagaagaggagcaggctgtgtctcaaagggtgtcacgttgtgaattcgggaccatcccgtgcggatttggcggtgggcgagtgtgggattgggatgagcttctggtcccccgctgtgtggtcactacaggaacggagctttgctgcaggtttggtctggaacacgagcctgaagagcggtgagggcatagctgcaagctccaacacaatagctccatactttaggggaagtctttcgggtctgaagtataactacaccaaggttgatgaggcaaagaagtattatgagaagtatggcttgaacaagaagagaaagggaaagttccctgatagcaattcatatcgggacttaacattccggttcttcttgcagaaaggagggggctctggatatgcatcaccagtcacaattgggtcaatgctatatgatgggaactctttggttgattcagatcattcctatcatataatgacagagacgaatcataggttacttaatgtcagctatgacattcactatgtcgggaattggtcgctagaaacatttcgccgtcagcatatctctgcagagggtgtttatgatgctaagacaggctccttgtgtatgattgcttgtcgggtggttaatatctcgttggactgtgaaattcttgtaactgctcagttttctcctttggatacaaaagtagcacagcatgtcaaggggacaattagaagcttgaggaagaagactgaccctcttttctttgaaccgctggacattgcttcgtatgggttgtacatagacaaagtggatgagtcgatgtggagaatggacttggaaagcaccatggccctgatctcgatgacactatcctgtttgttcattgctgtgcaactgttccatgtcaagaaggttcctgaagcgcttcctgccatgtcaatcaccatgcttgtagttctctctttgggttacatgatacctcttgtgttgaactttgaggccctcttcaagaacagtaacaaacagacatttccactttcaggtggtggttggcttgaggtgaatgaagtcattgtgcgaatcattaccatggtaacctttctgatgcagttacgacttcttcaattggcatgctctgcacgttccatggatgtaagcaaagatcaatcatgggctgctgagaagaaagtgctttggatatgcttgccactgtacattataggtgcagtcgcagcttgggttgttcacatgcaatttaacaacaaccgaaggatgcttagaaaggttgctcgcttacctcgggttaatagacatgcattctgggaggaccttgtgtcatatgggggattaatactcgacgggttcttgctccctcaggttatcttaaacgcatgcttaggctccaaagtgaaggcactttccccgggattttacattggaagcaccatgattcgtgcgctacctcatgtgtatgatgtgttcagggctaagcattttgtgcccagcttgagaccattttacaggtatgcaaaccctcgcgatgatctcttcagccttgcatgggacattgccataccatgtggagcaatactgctgtcggttcttctgttccttcagcagcggtttggaggcgctttcttcatttgttcgaagaacaggaaggcaagtgaatatgaaatggtttccacagttagctcttaacaagttttcatctgtgcaagagaaatatagagaaggtttctataggctaagaaataggttgcttcttatgtctatgtttgctttacacacttacatacctgccttgttgaagcaaaattacatacaaaagaagctattcaggttgggcattcagcaataatgtttaaaatgctccgttcatttctatgtgctactagtcagtttacaattacgctgttattattctggtattcagaggcagtcgaggtggatttctgacccatgagaatttacatctgcgtgaagttatggcaaatgctgtttttgggtagtcattgcagatcttgttcagttgtccgggttgcaggccatgtgatgcatagtcgattcggtagctcactgctcaccattgattttgtttgccgttgtccgtacgttgcaatgctcaccattgatttgtttgccgttgtccgtacgttgtaattcaccgtacgagtatgtagtgttttaaagcaacaacatttgttagaagcttgacggttctttaggagcacagaaattaggaggttcagccagcgacgcacacgcagatgcttttggtctttgcatgataatttagtgagagagaagaaatttaccgttagcctccgtgttccttttcttttcatatgttaaagaggcgcacatgcgtatgtaagtcgttttcatattttttttagttaaacctatttaagtttgatcaagtttatagaaaatatatagtgacattttcgatacaaaacaaatcaagatattaaattttagttttaaagaaactaattttggtgttgtagatgttgtcaaatttttttatagatttatttaaatttaaaaagttttgacttgagaaaactcaaaactgattataatatgatgaaacgggagtaatatacatacagacaacggtttcagcatcatctaagccctaattttccctgtggtgaaagctagtatattttttattgggcccaacgcgtagtgggctggcccgaagcctagcccaaactatatcagcccgttagtccatcctatctttgttaattgtaatggtaagtttgtactcgctcccttccaaaataaaaaggatattggatagatgagacacatcttaatactacaaagaatttggatagagtctatcaagattcataatactagtattatatgttccatctattaaaaatctttcatattttaggagtggaagtaataacaattctactcgtttgtgtccgactctccgtcaacgagggcttaggtttttaaaactaaagcatattcaggttgatatatgccttcttttttttgttagtcgactagtgtgaattaatatcatctaatttaggtgaatagttaaacgttataagaaaaatttaaacaacatctgatttgggtggaggtactagaaagaaagaaagaaagaagaaagagagatatatatatcatagaaccgcgcccatctctacgccaatccaacgtgcacgccaccatgtggtgaggcagaaacacagtcgcatcgcatggacatgacaacatccaccacattccattccaacctgaccccgtctgcctcacggcccctggactggaccgcgccgatgcacgcataaacccctcgccctcgcccaacgcgcggttttaccctcttttttttttttcttttggccccgtttcctcccaaacttccccttcctccgcgtcggttgactccgaccggcagccaggccagccagagatatttaaccatttgccacatttagatgtggcaattaactttttgttacttgaccccatatatcataaacacatgtggatccacatgtcattgagataggggtgacaaatagttatttgccaaatctaaaaatgacaaatggttaaaagccccggccacccaacccaaaccccgtcgtctcctctcccgctcgctgtccaatcattcacaagcgaaagcgactagccccacctcactcctcccctcgcgaccgcgtcaatggccgcacccacgccgcacgtcactccactgacgacgacgtcccgtccccgcccggcagccaccaccggaggcctccttgactcggccgtcgccatcgttcgcctcgtcctcctcctcctcctcctccccgcgggtagctttcgctgccacacacacacacacacaaacacaacgacctcgccctcgcgaagacgacggacggactagcactagcgtggcgggggacggggccacgccgtttatagcgcgacgcggacgactcggtggtggtggtgatgatgatgagggtgttgggtttcatgggagatggtggtggtggtgggatgatgacggcgcaggctgcggcggaggcggcggtgggcgcgatcgggtgcgggtacgacctcacgagcgacctccgcctcagccgcgtcaaggcgggcgggaggctggtggacatcgacggggcgagcggcgcggcgagacgggagctggtcctcccctggggagccgtcgtggggggcgtgccggtggggatcgtcgccgacaagggggagcgcacccggttccgctccgacgtcctctccttcgctcaggtaacgacagtgcctcacaggtgttcgatcgggtgatccctttcagttcactcggaattgagcttgagagttttgttgtgttgggtggtttccctgccatggcggttcgcagatggcggagcaggtgaaccagacgatgtcggtggcggggaagatcccgtcgggcgcgttcaacgccatgttcgactaccacgggtgctggcacaaggacgcggccgccacggggagcctctgcttcgacggccgcttcatcgagctctacgccgtcgaggccccccgcgcgcacctcgccctgctcgaccgcgtcaagcgcgacgtcccgcccttctgggaccccgctgctctcgccgagtcagtacgccttcccccgtcgcgcgccgcgcgcccggcgttcgtcgcgtttgctgctaccccagtggccactgactctagtgtactgacatggtcgctgccgaattttctgttcagattcatcgacaagtacgggacgcacgtcatcgccggggtgaagatgggagggaaggatgtggtctgcatcaagcagctcaagggatccaatctcacacagagcgatgtgcagtctcggctcaagaaactctccgacgacaagctcgctcaggattcacctgaaagtttaactgcaagagacgacaagttcttgctgggattaaacgtgagctctctactctaacattatatggcttcaaaattagctttcttaggtggtgtttacatccagggacttaacttaagtctctgtctttagacactaatttagagtattaaatacagactacttacaaaactaattacataaataaaagctaattcacgagacaaattttttaagcctaattaatctataattagagaatgtttactgtagcatcacataggctaatcatggattaattaggctcattagattcgtctcgcaaattagtctaagattatggatgggttttattaatagtctacgtttaatatttataattaattttcaaacatccgatgtgatagggacttaaaagttttagtcccatctaaacagggccttagaagcttcagaattactgtattggactttcataacccatgattcggtttctgaagatacaggcgccattaatgattgtaagtagccttgctaattgctgtgatgttgtgcaggggagtttattattgggtcctggatctgctgcttggcggtcgttcagaccatcagtcgtgtcacacaaagatgtaaggcaatcacacatgtactgacgatgttcattgcgtgatttatcactccaacagcaggaaattaatgagagagccatgattaatttgtttggtcgcatgtcctttcgtttcacaggacatcctcagtatccacatcagaagagggggcgttgataatggccaaggccacagtaattggctttcgacgatcagcggttcaccggacgtcatctctatggcttttgtgccgattacttctctgctcactggtgttcgaggctgcgggttcctgaatcatgcagtgaacctctacctcagatgtaagcactttgttagttactgctggtgacaaacaaaaccatgccagttcaaggatcacatcgtatctcaagtactgacatagctaaattactcaggttacaagtctaattatctgtctgttttctgctggtaaattcagacaaacctccaatagaggaactccatcaatttctggaattccaggtgccacgacaatgggctccagagtttggggagctccctctggctttgggcccgagaaagaagaagaacagcctgccatctcttcagtttactctcatgggtcctaagcttcatgtcaccactgccaaggtaacaatcaataccggcattctgcattagtgaaattcgtcagtttgattccatgttgtttgtagtagaactcagctcacagtgtgttccgttttgtttcgtgcaggctgattctgggaatcgtccggtgaccggcattcggctgttcctggaaggcaagaagaacaaccggctgggcgttcacctacagcatttgtcagcgacgccgggcacgatcacgatcgccggcgaggtggcgtcggcggaggacgccaccgtgagggagcgcgactacatcgagcccatcaagtcgccgctgctgtcgcacgtgtgcacggcgccggtgcagtacaacggcgcgcggatcgacgactgcgcggcgatcgtgacgagggcgtggctggaggtgcaggagacgtgcctcaagaaggtgctcttcctgcggctgggcttctccggcgtggcatccaccaagatccggcggtcggagtgggatggcccgttcgtcgtgtcacgcaagtcgggctcgctgtcggcattgttcagcgcgcggctgtccgccgccggtgccggtggctccgcgcagatgatgcagcagcagcagccggtgggggagaaggtggaggtgaactccgccatcttccccaagggcccgccggtgcctctcccggtgcagaggatggcgaggtacgtcgacacaacggaggtgatgaggggccccgccgacttgccggggtactgggtggtcaccggcgcgaagctctgcatcgaaggcggcaaagttgcactcaaggtcaagtactcgctgctcatcgcggaggtgctagactaccctgagtgactgttgagaagaactgcacggtgtgtgcatctttttggctcgtttgtgatgctgttgtgtacagtacagtacagtacaggtaaggtcggctcagctcagcgtatacttgtacagattgggcacacgctagtagtcaggtatactatttgtatgtataaaccacagagtagagcagtacactaccagcaggcaattgttttggtttgcacttggattctagcaaaactaggagcatacacagttgttgaaattggtttccttaggcatgcagctcaaaaggttatgtacgattatttctcacctctggtattgccctgagatgggatcatttttactggcaatgttgagaatgtgagacggtttggtaatttggcatcagcaatcatccttgttcccaacagtataacaggaggccttttacattgtttgcgagttacttagagaaggagctgaaccgttgattaataaaggggcaagataagaaataaaattattgtaatacgatagcaatggaataattaactagtgaaatatgggcatttcatgtgaattgaatacctgctagctccatttatcagttttgttatagagaaaaaaaaacataaatcatagatacttcgttgatttagcgttcaatatgatccgtactgatgaaaaagaaaatcaaagatcgtgtctcatttcttctttaccttcacttcattcttgttctaggatgtaactggttcaatggaaggagagagagaagacaccggcatggttgagggtcgaagaggagacgagatcgtccaatcgatggctagttgcaagcgcatgattagttatttatgtagttcacaaatttgttgaataaggggttgaatcgagatctcctatatgttttttgttctagggtttgaatggtgcacccacaaggagacacggtcgtggaatatttcatctttctaggaataaatcgataaaatgtgtaacttaaatcgatgcaaatcttcggtgatattttaaccaatcatgtttgtgaaacacaatataaatctcttcttgtaaaacaaaatatatatctcaaaagaaataaagggaggagttttgacatgttctttagaatatagagtaatatagagaaaataacgcaaataataaaattttacgctagtaacgtgttcttcgaaacaaaatacaaatatagagaaaatcacgcaaatgagaacattaaagtatacgacataaatctagaaaaaatcacacaaatgagatctactaatctagtactaggcaaatgacttaattggttgattaaaatttagagacaattctaccattttctctcaactagcatatttgtcataaatacttaactagcacataattaattaagttttaatatagagaagcttaattgttactaacatatggctatatgaggaaacttgatttttactctagttattgatacgagctatgctgaaaactacctttatttatttacaaagtgcatgcgcaagatttacttttgaatttacaagataatcatgtgtatttaggcctgcgccactgaatttgtcggagtgtgaaggattcaatactaacctttcatacttcaacctgcatcacacctataaacactctagtcctgcgcgttcttctcaaacttccattatctttactgaggaatacttttggcatttatgtttcccatttaaggtgtttataagacatctgatcatatgtgttagcagtacttttaacaacaaaatatgttatataaataataagcaagaaaatatttgcttaaaggaaaaatagtgagaattcttggagttggtatgattgactatacatttaagaaagcaattagtaatttaaacaatgttgggttttttagagttttctaaagcggatggatttgcagcagatttgaagctagtcatgaaaaactctgttgcgattataacatgatcaagaatttatctgttggagggatgaaaatgaaaaaaaaaatcatgtcattaaggatctggtgggtaacttaacttgaggttggttagtatttcctgctttcaatgtgtggatggataaatttgaacagaaaaaactttctttcgatgattgttagggttttcaatttccttaaaaataaaacttaataaacagaaaaactttatttcgaggatttttagtgttttcaatttgcttaacaagaaaacttaacgtagacgtagaagatttgtatgagataagagatttgtatgagataagaaccgacctacttatcaatatgaatcatgacaaacatttagctgactatatatacagtggtaggaattactttaaatctatctacaatgtggtgaaacatttaatataaactccgtttgaaaagttatatataatattctttcagttttgtaaacagtaataaccttaacttatatttaacttaactcatatttttatgttttataataaataatgcttacagaattgtggttttatatgtgtggacagttacaagttggttggatgtgtgtctcatagtttatttatatgaggaattgacaaatgtatatttaccataatgtaattattgttaataccgtatgccaagttaagttttcgacctaatttcaattgtatgttgctaaaataaggttattgtgatctttttcttaatatttcttttttagatgtacatgagtagtcactgttgcatataattaatatctttatgcaggattttagtaatgtacttagatggagaagcgatggctaactgttgtaacaaataatggacactttctacttgagttggtgtgttctttataaagtagtagaattagctaggatgatgttttaaagaagtaagttagctaggaggatgtttcaaaggtactaatcaggaataacacattgacatatttgttgttgatggactaaaacgtctatcgaaaggtaggcttcactcacaaggtggaatataaagcaataaaaatgtgttgatttatatagtggtaaaaatgtatttcttaaaaattggatccccaattacacaccctttggggtctatttatagctgtgcaggcttacaaccccaggggctagggttactgttcactcgggaattaacttaactatccttataatagggacatttataggggtaataatcgtcttatggcccatcctacaggcccatgggccctaaagggtccttgttgggccatttgttgggcttccagtgtgaaggccccaccgaggaatttgtccttcttcgccattcgatgcccctttgttgcatgcttggtgaagacgcttgtcattggcctagcgaagttacttgccgcttgccttcggcatttgtgcgggtcacatccttcggcgtccgacttcgtgacttgacgggtgtttcaagagtccggtcgaaggttctcatgacatggctccaataatatttttttgcaattagttggaaccctgataatcttggaagcaagtggcgtgtgagtcggttatggtgccaaagtttcaccttgttggcctggcgaagctacttgccgcttgccttcggcatttgtgcgggtcacatccttcggcgtccgacttcgtgacttgacgggtggaaggttctcacggcatggctccaacaatattttttttgtaattagttggaaccctaataatcttggaagcaagtggcgtgtgcgtcggttatggtggcaaagttgcactcaaggtctactcgctgctcatcgcgcaaatggactacccgaagttgagaactgcacggtgtgtgcatcttttttggcttgtttgtgatgttgtgtgcggtacaggtaggggtgaaaacggggcgggtatttcccgaccgcccgcctggccgtattattttgggacaaattcgggtcagaaattcgggtacccgaaactttatacggatatagggttcgaatatgggtttttttggaggatatgagatcgggttcaagagcgcagtatctgacggatacggattatccgggaaaaatacggatattacccgattatatatacggatagtaccagtattatatgttacagccgtacaggcttgaggctagccagcccaaacggccaaccactagccaccaggcgccaccagcccatcaacccactggcccaataggccaatactaagagcaacttcaatagaatggccaaatgggtggccaagctaaattttagcaaatatgaggggaaaatattctccaacagtctctccatccggttagccaagccatctggatggcccaatcgcacctctcactggccaaacttagagtctctctgcctggctattcgtgggccccaccactccccctcccgcaccatctctccctctcctagctagagcaagaaggcgtcgacggtgctgctcgtgaacggcgatggcacagaggagagagacactggagccagctgcgaccaccgccgccgtcctcgccgtcccagagccaactgcgaccgccgccgccgtcctcgccatcccagagccagccgcgactgccgtcgccgtccgctgccgtccccgcgtggatttgactgggcggcgtggattcgggagaggaagagtgagaaaaagaggaagagggagagaaagagaaagaggaagaagaatgggtatagagggctaacacatgggtcccgctatcacctgtcatagactcaaaataaagaggatagatggagaggctgttggagtaaacaatgaatttgacttgacaaatgaaatgaaaaattagctaaatagacatctggagagtcgaatttagagagactgttggagatgctctaaccctaagaaataggagagagcttgagggagatcgagagtcagagagagaggtgtgaggccgtgcggcgtgcgcccgtgcgtgaggggatttccgccgccgctgcccgctggcctgccatgcccttgcgcaggctgcgccaacgtcacctgcgccaggcgccaccacgcatccatgccggctgcgccaccctcgccactacgccggctacgccacctgcgttgttgacctgcatcgtgcagcttgagcccgtcgccatcgccagtgctcgtcgcgacggcgctcgtcgccacctctgctgcacggcctgcaccggtgcccgtgttgcctctccctccatcctagcaaacttctcgcttcattggccgttaaatcatcaggtagcgaatagtgttgaggctgaaaacaactgatgatttaagtggcgctggtacttgtgaatttgtgatatgtttcctggttggcaaggcttatgttgtgagcgatattatgatgacatagtgtactgataagtgatatcaggggcgggcctacaagtctacaacaattcaaggtattcaaattgttagagtgtataaagtgaattgctcgtctttccctatcagcttaggtttttaggtgtaactggctgatgcatgcaacttaatatggtatcagagccagaggtctcgagttagaatcctagcagcccactccaatagtccacgcttgagacttgaattttatcaagaattttggtaaagtatatatacccatatgaatacccaagaattttggccaaaaaaaagatatatatatatatatatatatatatatatatatatatatatatatatatatatatatatatatatatatatatactatgtattttatatgtgtattcaaaaaattaaaaaaaaagacatcaaacagcccatcaagcaaagaaactatccaaccgtgtcctccctcttctttattggcccattagcacaattgattcactccattttacccaaccaaaaactctatatacatgaaattatgctcaattttgtgttatatatgttatatattatatacaactactagtatgtgatattatataaaccaattattatcattttttagtgtagaaatttttttccctctttattttgaatacccaaccttaaaactctgggcccgcccctgagtgatatgcttggcaagactattgttctgagcagtattatggtactatgtattggtgaatggtgacattttggatgatgctatggtactatgtattggtgaatggtgacattttggatgatgcctacttttagcttgtggctgtgaggtacatgtttcctaagcccctaatggcttaatataatcgcattatggatatttaggattgttgaatgcttattgtctatgtggtatttatgattgttgcttcgacttgatatccaaacaagtattggtaaccgatagtgtacatatccatttttttgtacgtattcgtcccatatttttacccgatattatccgatcttatatccgtattcgacactatccgtattcaacccgattccgtttataaaatataggttaggatatgagaagggtgagatccgacccaacccaacccgatttcacccctagtacaggtcagttcagctcagtgtatactgtacagattgtggcattgcgcacgcgagtagtcaggaatgctacacaacaggtcagctcagctcagcgtatactgtacagattgcggcattgcgcacgctagaggtcaggtatgctattggatgtatgaactagactatatcagtacactacacagcagacaattgttttggtttgcacttagattctagcaaaactaggagtatatatagttgttgaaattggtttccttaggcatgcagctcaaaaagttttatgtatgattattttcactgcaagtgcaagagatgggatcctttttactggcaatggtgagaactgagaatgtgagacggtttggcagtttggcatcagcaatcatcctcgttcccaacagcatccactgagttatattacttagctgaaataacagtatcttcggtcgtcaaagacatgtttagcgcaccaggaacacaggtggtacatccatcatctctatttttggttaaccatatacaaaaagccagctgcataggcatcctcagttttctctgggttgcaaaggttagacggcctgtgcttcaggtaaagagttaaaacctctctgccgggacaaccaccggctgtggctccacacgcttcctctcagaaagataaggaccccttttaaccgcttcattcaactgtcacaagatgttttccttggtggtcagcacctcactattcacaatccaacagcaagatcagaaaacaatggaatttacgaggatacctttccaatgagttcagaaaggcttggttcatgaagaagatgtgatgatgataatgccttgctgatcgccagacaacaatcatgccgtgcttccatgcctacaaaaatgaaccaacattactcttttttcatttggtaaacagaaaactgtatgtccacgaccacaatagtaaataagagccactactccattgcattgctaagcgcaattctgattagtaactggtgctaagtgctaaaagtggagtaagaagttgcttaagcttgaaaccatgatcaactctaagcagtcagcaactccaaaagcagttgtacaaaagttctccaaatactaaagcaaacatcatactgtatcacccttgggctggaaaactagaaaaggaggcgctaaatttactgcatcagcatcatcgcaattcataagtcttcctaggtacgtaccaagttttgtcatctccattttgggatctgtaacaaggttgattatgtccaactttgaacaaatttccattaggcaccattctctggcaacaaggccagatattactctgtaaccctgcagacatccaaaggcaattagcatagcctcactatcaagggacagcaattcactttctcactcataacgggtcagcaactgggggatagaagtagatattcagtataaaataagttaagagaactgcttggaatacaggagttccacgggaaatagttaagtcccagctgaaatctgggatgcttcctgtgttccaaacaggttctaacttcaacaagcatgtgctgcttacagttatccttatgtctgg

SEQ ID NO: 7831 - DNA, 37192 bp, Oryza sativa
gctcccatggactaagcagtagcaagaggctcttgtaagtcgtaactcaagaaagaatcgatgaggaaattcttacaaaaagcacaatagcccaggaaaattcagcaggtacaaaaaaaaaatctaggcctaagggccatgatgaatgaagattaaaagaacagtcctaaaaaaaggtactaacctatttgcaaataagaaacaatttgtttgtttggtaacataccttgcccatgatgcttggctgtcggctcagtccaacccactcatatgttttaccgtcaaagtaacggactgtgtgcatccccgcccatatacctgaataagaatattagcatttcagccaaaatatttagatgaagctgaacacataaaacactccatagcctactgctaagagtgaggcttatatggcagatttgttcttcctccattcacatttacttgtcacttttgaccctaacgtgcatatgcaggtactctttcaataactggttactgaaatagaaagattgctttcaacccatgaactgatagaagaagataaattatattacttcataaacagtaagtgtttaatgtcagcagtatgcatgtgcatcaggtctaagttttcttcttaaaactctcagatacatcacatcgctattcattttctatattatcatgttcagttgataagagttagatccaaacaaactgtataaaatatgcaaacccaaaaacactatattattttaatctgcctaactttgttttactaataactttagatgtaaaaaatgtatcatcaatgtcactgaatgtatacaacatgaaagtcagctgtctccgattgtcctaccaaaccagttgcagatcaagatatccaaaataatactatcccaccagcactcattaaagtttggcaacatatgtctgaatgtaagctgcaaaaggtcataataagcacaataccttgttagagataacaagtaaaagataacaaaaggttgagtaaccatatctaacctccattagctcgaaaccaatcgagaggacccaaagaagaagctggtttcgtatcattacggctttaccccaccaacccaaaatatgggcaaccacaaattcgtcaaataatgtctcctatatgtatatcaaaccgtcaaatatgatggggtaataacaatgataataactacaataataacaaaaaccagagcatgaaataggaaggttcaaatgaaaaatcatacataaatatttatgaacttgtttttagggttttccggaacatacagacggcagtcagctccataagatctctccggcaattctgcattagtgtacagaaatgtttgtcagcaccatttcttctacaatatttaatttccagtgtaaatcctttcgatgtaaagatattaccaactccaagatcagggtaaaggtgtttcatgaactggcgagcatcatcgcggttctggaaaacgagaaagaaataagaattattacagtacaagatatccaagatgtagcatatctctacgtagttgaggcccctcgctcaagagtcttgaaaaaatgccatttatactgaattttgataatcaaatagtttggatacaagacttccaacttttttttttgacaagacaatttgcatttgcttggatctcaagttttttctttcacaaatacttgccacttcacgctcctgtaagaacttcccaaaataaccctatgaataatagacatctcccgccattttctaacattttacgtgcatgggatattattgaaagggcattttttgtcctactttatcgatgtatgaatttttcaatagtaacaactaacctggaaaagaagaaaggctagagcgacaaggtaaacgacagccagtccgtgcaccaggcgccagacagcaggatggggcctaataagtatcctgtgacaatattgccagaacattgaatcatcatcatgcaaaaatattagagatgcacagtagatttacaggttctcaaattgttatgaacccaaggagataaagaagacaaaagtagcaagtacaaaaacagcatgagaatggcattggtattgggtccctcaaggtaatttttgtgtcaccattaaaaacaacctgacgaataataagccctacactttcaagagaattggccactatatggtctcactcatacagtaacacgtgggtcacctctttgaagcagaaaaccttcaatttccctacttaaagaaaaatgcctgacaacgacagccactgcactaacatagttccaatgtttgaaatacatataagaagaggggggctaactcacgttgaaggtgcttggagagtgcagtaagcaaggaagactgcaatcatagcccagacacccctggagagtgtcagtgagaaaatatgagtcagtgtcactctctcccaatcattgtgcagtggtgagaggagaacagctcaagtccaaaagacacaatcaaagtagagaagtaaccagagttcccttagatgattgcatcactttccagtaaagtaaaaaaaaaaggttttcggtcattacctcttaatagatgtcgcactactgtgataagaagcaccctctggatcaagcgctccacttgcccaactgaaacgggaacatgattgaacatgaaatcagacagcaccacgagaaagtgaaaaggagaacgccccagcaagttcacaaccaaccactcaacagcctagcctagctaatggttgtttcagacacaaagttatatgcttaatcctttcatgaagcaatagcaacaataaagttcttggtgagccgtttctacagttaaaaaaaagggacgagaggaatgtacttcccatgtaatttgcacctgctaaaaatgatatgggaaaaaatgattgttctagggaagctttcgcacgagattcttgaacatgattccgattctcctcagccactcgtacgctcggttgtttgctagccttgctgaaccagactgccatgctttcatgttcgttcaatcattcagaaacctcaacttgctggcacaaaatcactaaatttcccgacccaaaaatttcacctttttctttcagagaaagtaaaaaaatcacaatgagtactacatgccctgctttcaactctgacactgttgatgcacctgataggcagaagccctggcatctgttgaattgtactttgccccaacacaacaaggcctttttttccagttctcccaccaagaaatttacagccttagcccttaagtcacaggcagaggcagcaaagcgagaaaaaaaaataaaaacgaatttgtgaaatttaatcgtggaagagcacttacattagaaggcaagcaccgacgaggagcaccgagatggtgtgcggcttgtagagccacgccgtccatgggtcgtactcctcggcgccgccatccgccgccgctacgagcctcctctcctctccgtcgcgatgcctcgtcctctgcttcgcctccatgttcccacttccagaaccctctgcgatatgtgacaggagaaaactgccgcggcagccaaacaacacgccaaaccaagcgaagcgcctgcgcgatataaccaccacggattgtcgcggtcaggtcaggagaggcgaaagcaagagacgagacgagacgagacgagacgagggggacagacaggacatgcagaagaagaaagaagcagaagcgaaggattacttcagagcccgagagagggagagagagaacgggtgtgccctatctccacgcgcacgcggaaatctcggcgtcggccgcgatcggcgccgcacgcgcgtgcgtggggtggggaggaggaggaagtaggaagacgacgatgacgacgcgggttgggtacttgggttggatgagacgaagaagtggcggtctcgtcttctttaaaaccaggggagaggagagtggatgatgacgacgacggagacgaggggagggggggtcggcgtgcgtgcggcctccacgtaacgcttcggccttcgggggcgcgcgcgccgcccaacgccgcagcggccgcggcgccaccgactccgcgagaccgagaggaggcgcaggcgccgcggcgttgttgggctggtccgtcgtgtgggcgggtggccaccgcacctgtaacggggctggctggcagagggtcccgggcgggggttcctgggctggcaaaacccggggtacggtggatttcgtcgccgagttccaactacctttgttgtatttttgcgtcttgtatccaaaatcccattcatcgccgtgtcacgtggctggtgacacacggatgtcttggtgtggtagcttctgcattatggcggcttataattgctctgtttagcaaagcttcatatcctttaaatgtttatattgaatataaaagacctgttcggctattatttttgtggctgcggcgtagccggcatgaacagtgccatcctcgctgtgcgcagccgcagctgtggcagctggcctgccgaacactcccaaatgtttataagttaaattgatcttgtttaaatatgagccctagtgagaagataaatttcagatatctcattaaactcgatgaactgaacggtttgagggagcactaaaattggaagaaagaaatttgtagaaaatatattagagaaccgaattaatgcatacaaaaaaatatgtaaactccttgcgtatctccgatggtgcatgtcacgtgagtttcatttacattttttgaaaaaaattcgcccaaaatgcaccaaatactcatatacggcatgccgaacagattttttagcaaacagttgccgaatttaagcaggtttcgaccgtatctctttttttttttgatcattttcgaccgtatctagcacaccatttgtttgtagaaacgatccggtctagatacatgggcagggataaatgacggcaccagtctacctacactgcaattgccatggggtccttgttaaagaagaaaaaaaaatagagtaagcgttaggtaaaagctactatgacgacggtgagctcaatttgttcgattccgcttgttcgttttctcggttagccgcgggtagtcgtagtactagcagataaggagaggaggacacggtggtggcgacaaccgcggcgctggctgtacgatccgcgtccggagcgatccgggccgtacgtgcggcccctgtcccgatcggcacgtgttggcttgggcgtcgcgcccaagcccgcgcgacgcaggcgacggccacgggtggcgcgggcgggcggggcggcatgtccggcttggagccggccgtgccatttgaccggcacgaggcccgaggagaggctgtttgagtcaaatggtgtcacaccgtcgtcacctcatcaccggcgctcgcagcggaaatcagcgtaacaggacggacgaatggacgaggaggacgatgtgctgctgctgctgatacggcggcgagggtacactgaacggactcaccttacggggcgagttccctgttcgcgatatgcaagttgactgtacgtggtacagagttttttttttttttgggtgcgcgcacacgaaagatgcacatatacgattcattgatctcactattactgagagtgttcgtgcgttcgttagaatgagagaataacggaaagcgactgttttccacgcgcatgtttccttagttgttaaatgttgtgtttttaaaatatagataagttattttttaaaagaaatacattaacctgtttttaaatttaaaatgactatactttcaattaatcaacaataatcgctcacctaaatatttttaggtcctgtttgtttcagtttaaaattattgtaatctagattattaagtcagattactctaaactggattataataagctgatataaaataatctacgagttgtttgtttctctgcattattagagacatttaatggtagtggatctttagccactcaataatctagaaaaagctcctctagaggagattatagattatagtaatctagtataataatctgcttgtttgtttcagcttactcctaataatctagattataatatctaagctgaatcaaatatgaccttaatctactgcttttccctcctctcaaacacaggatattgttttcacgactctactactacatcgctactccttcccgtccttggtttatgaatagaaacttgatttgcacttagaaatacttatatttatgaatagattccaaatgctgaaattgctaatgtttataaagagagtagatcaagcagacagatgtgataaaccacaccaaacacgaacacgtcacaaaaaggctccaatcccaatccttcggcaacacatgtagtactgtaataaaaatctcgcagcagtatattcctctatgctttggcatccgattcttccaaaagattcttcttctcctcctgtaccaaagtgccatccagcaatgaaccaaccctagattactaaacagatcgagatgattagccatatctcatcagcatctaccattgttaagcttcccaaaggtcaaacctggcaatcctctcctcgggccccgagctgcaaaaacttaaagaaaccagacttaggacagtcctaatccataacaatagacatggtttccataaactccacatcataaaaaaaaactagtactagacactactattccaatgcaaacaccactattatatacttcaatttaatgctacttatctcacatgatatcttggatgttgtgtagaaaccatgtctcatgcaagacatggtttacttatctttcctcatttattcacttgtcacattattttttttcctatgtggcaacttatttaatgctatagacatcatcttagtcattgggttgggaatgctcttagatgtgatttgcatacagcgcatgaatcggggattaattggaccacgcgtaccttatgcatgaaatggaattggaattgtggcgatgagctgataatgcaagcaaggaacctgatttgcatatggttggttggttcggagatccattgcacgctctcaccggtcgacagcgtgatcgatcgggaccaaatcgcggctggaaatggaccacgaggtgggtgctatcgatgctacagtggaagaagattccttggaaccccgattgtcccaccgtatcttattttttttctgaggatgatgacaattatttgaaggtttttagcggatttggatggatcagccagtggtttagcatttggatcgtgatctcagccgtttgatgtcgtatctgtctatccaaatttggttggcactgctcgtggagtctgtttgaaatcgataggcagatggatttagtggttcagatatgaggtgtgttcaatcaacaaggtgttcattcagagggatagcagctgatacatgattttttccgactgattgctgagtcatgacacagcacaaatgttggtgccactgctgtagtagtgtttaaactttaatccagaatgagctgcgatgatatttttgtcaaatcgatgactgatatgttgattctttccccagggatttgcaactgtcgtgattgatccgacaatgagcattgttcatcttcctatcagtgtagcacgatccaaacgtttattaatacattattattattattattttcacttccagcacaatgttatcttcagttttatctcaaactattattcgccaactttttactttgagaagacaagagtgaaataatttgtacaccaaaatggcattcagttttttttagcttgcagagtagccgcccagcccatcaaaagatatataaatgggccctttctgggccaaagtgggcttcttcagatctgaaatttctaaaaacgaggcctcttcagtccaaaacctcagctcccgcaccgcgtcgaacacactgacaccagagaaccctagcctcgccggtcgccgccatggccgcctcgctcctccgctccggccaccgcctccgcctcctccgccacggcagcctctcctgggcctccttctccgccgccgccgcggaggagctcatcgacgtccgcaagctccccactgactacgacgcctccaccttcgaccccaccgccccgtcccgcccaccgccctccgaccgcgtctggcgcctcgtcgaggacgtctcctccctcaccctcgccgagtccgccgctctctccgccctcctcctccgccgcctcgacgtccccgctccccccatcgccatcctcaactccgccgcgggcctcggcggcggcggcggcgcgggtgccgcgggcgccgccggggagaaggccggtggggcggcggcggctgagaagacggtgttcgagctgcgcttggaggcgttcgatgcggcgagcaagatcaaggtgatcaaggagatccggtcattcaccgacctgggtctgaaggaggcgaaggagctagtggagaaggcacccgctgtgatcaagggtggtgtctcgaaggaggaggctcggacaatcatcgataagatgaaggctgttggtgccaaggtcgtcatggactgatcagcatcctcatttcaattttcaaggttagatgcagatttcctcttcgattttagattcaacttaaatgcacgaatgattgacatggttactgtggataaatcgatgatgtatagtaataatcggagatttactttgtgaaatgtcctcagaatgctgtaaatgtgcatcagttacatgcaagaatgatgtactgtagtacctttgtcccaaaatatattttgggcaaaatccccgatagttacatgcgcaaaatcccctatattttgggacggagttagtacgaattaggatgtgaaagtggtcttgtaaacttttgaaattgcgaatctgtcatgcaggagaagcattgggtttgaaaatagctattttgtaaagctgtgaagttgttattatgtcatgccgaagaggcgtttaggaaattgagttaatataacctcttgggtcagttgtcacttgtcagtaaatgcattagggaattttatcgggaagttgccagactgattttttgtttttgctggcatatacttctatgcactacttggaagttaaccttgtgctgcattcttcgtgtaattttagtgcacgtgtgcaagttttgaatctgctgtctttgccgagtgcaggttctgttcacagtttttaactgtgctttctcatggtttgatggttgatgcggattggggtgccagtgttaatatcctgtcaattggcattttgaaagcccaatgatcttacaacacactggccaatccgatggtgccatcatgtgtttcttgttcggtcgatgaattctctgtcactaacaagaaacatggaataatttctgttgaaaaatgagatcaacagggtgcagagctggagtgtgaccttgagcctggagtactatcttttttggttggcttcaccggctgtatatgtatctcatttttgtaatgttactgaagctactgagctagatgcacgctgtggcgttcaagtttttatcctctgcatttgtgaaatgacctcacatgacggtatgatatgggtcatatggacatagataatccatttatgtgtttcttttttgaaactaccatatagtgaactgatgaatgttgtggactatattttcaagtatggaattcaggaacccctaaaatgacaatgactgatccctgtagggctgtatgctgaatcctcaaatttctcaaataaaaagggtgtgggtagtaggagtgtgtaatgtctaaataaaaagggtgtgggtagtaggagtgtcttttttttttttttgcgggggggtagtaggagtgtctaatgtcttttgtgtagtgaactctagccatgagccaaaagcaaagagaagaaattgtcacgccaggtcggctaagagtggcagctgccgtgtggctttcactttcacaatgggctgcagaatgcatgaagaggcgaattcctgaagaagtttgctgctccaagcagatagcagtctactgacttgatcatcagtatcaccctccctcctggggattaaccgaacaagggtgtgtttagttcacttcaaaattagatgtttgattaaaattggaccgatgtgatgaaaaagttgaaagtttgtgtgtgtaggtaaattttgatgtgatggaaaagttggaagtttgaagaaaaagtttggaactaaaccaggcccaagtcatgaagaaggcaaaggaactatcttggggattaatcgaacaagccctgaaggagaccgaggaactagcaaagacgccatggtctgagagggcacatgcatttcaaggtgaaacgaaagtttcctcttcgattaatttaacttacagatgatttaatcttgttactggggacaaagcaacggggcttttaactatttgccacttttagatttagcaaataactatttgccacccctatctcaatgacatgtggatccacacgtgtctatgacatgtgggtccaatggcaaaaagttaattgccacatctaaatgtggcaaatggttaaatatctccaaagcaatagtctgctaatggtaataaacatcaagataatttgccaaaaggagtgtgatccttggaatgcctgatcatgcatcaattacatgtaaatatgtaattacgctgtatgatgtaaaaaaaaaaagccttttttggtatttggcgaagttatgataagtcattcagaagaggttagcctcattttccgagagaagattagccttttattctttctgtccacgaagagtggaaaatttatctatacttctataggctggaagtattcggaacctcgatctcgtacatacatatcgccatcatacatttcacatagagttcttgatacattctcccggatccaacaaatgcaacagtacaactatgcacactgctttacttcttcagcagattccctacacatccagaggagccagtctcctccacatgatccgatcatccgcttcagttcgcgtcaacggatcaggatgcagaatcagaccgaattcgttgcatcaagcaccaaatgttgcttctctgacggtgtctcgccgaaaattctctccctcgctttctcggcctgcagaagcagcatcaggtcagtaggcgggagaaacatgattcagttttcgagtgatcaagatttgatgatgttggggagaaggcttggagtttcagataaagaaacaaaccatcttttgccagttgctgaagaatgcaatgacggcgagaagcaagaattgtaatacggaaccacaggcgatgcccagccaaagccctttgccttccatcttgaaaccaaagccaagaagtagggctaccggaatgccaaccaggtagaatgaaccgaggtttacataggctcccaggtgctgccatccgcaaccccgagcaatacctgataacaagtaatatctgtcagtgttaagcaatgacgtgtggtgcatctatcttgatataatcttctagagaggagaaacaatagtatgtttccgtgctggagctgaatgagatgtgtgttttcgcaagttcagttcattgtttttggcatgtccacaactgctcagaagcacaaacaatgaaatagacctgtgaagcaaacaccagtgccacactaccagtctaccactagccaggggaaaggtgtaattgcatacttagtgaagtggagtccacacttaagacgacatcgctgatagatgcgtgttgattgtaaacaccaccatatccatgttcacgtaagagcacatgtttgaaggaacaaacaggtaactccccgagtaacaatgtcggcctccacaacacaaaatagcattagtttcattgaacaaaggaaaaacaagaagcggcaagttacctggtatgtctttacgataccggagtgactgaaattaacttgctacctgaggtcttggtagagatttgacaacagcgcacacattgaattaagcaatcaaactaaggggtaaaagataccgttgggctaacaggctaaagatactgaatggtgtaaatgtaatggccccaaaactataagaaccagttatataaaaaaaatgaaataagagagaggcaaggccagttagatcaaattttcgaaaacttcaggcatagctgaatactccattttttccattcttttgaagggaatgaataattaacagataaatcaaatgttaggaaatgtaacctgataaaactccttgtaggctatcagcagcaactgagatgcacacaaaaggaaccattgaggtgaaatatgtgacaacctcctcatcactgctgtaagcatagcccaagatgcgctgtgctgcaaacagcatcccagtaacaagaactgcctctgtcccagcaatagacattacaaggtgaacagccgatcgagctccttcaggattcccagcgcctaactcatttgctactcgagtgctgttcattaaaacaaaattcacaaggctgttaacacatgattattctctgagaaaaaataatcattcacagtagtggtttggcttctaccttgcagcgcctccaagaccatatggtatagtatacatcaaagaggtagtcgtcaagctgcataaatggagtgcttataaaataacaaaaggtgcagctataagagaatatattgttaagtgcgacattgaggactcttattttcttaccatatggaaagaactgaactttcaagctctgggttgggtagaagtcctgacaggagaacaaggatctcaaatgaccaccattcaaaactacaaaataatagaagaaaatccattaatccaataagtgggaattttttaacaggaaataagaaatacttacatataaaacaaggagattctgaagctactgtaattaccataacattagtgcagatggtagtgctattcgcagaaacaaaccgactcctctgaatgcctcgattgtaggaggcgagcgagtcaccttacaagaacatgagaatctgatgtatgcagcgagcatgaatgtattcaaccagtaagatatgctaattgctaaagcagctccagtaaatcccatgctggtcttgaacaccaacagccaagacagagggatgtgcaggagcagagttgcaatggaggaccagagcatgggaaatattagactctgagactgcagaaattttgtgagaggctggcagaccgcgtatgcgaagagtcctggaatcaaccacactatgtatcttccagcttcatgtgagatcacggggtcctgacctattagggtcaagagtttgcctatgaatacccatagaagtgagatgggaattgtgactactgttagtgtgactattgctctgtaggtttgcactcctaacttgtcatactgttttgccccataagcttgaccgcagagagtttctaatccacttgccattccaacctgttttacaagttcaaaattcaaattatgggtggtttcaaaattaagatcacaaactaaaaaggcaatccgtgtacaactgaagagaaaagtaaaaaaaaaaaatcctacagaatatttcgccagagtatcgaagtagtcctctaggctgtacacacttcgcagattctgaaagctagttgaaatcgtgacaattgactagctcaccatctgtgcaggcaatttaaaattcatcctagaaaagcattcagcgtggagtagtagactagtagtgtaacttgttatttatctctatatttaggagaacgttgattttaaattttgtaggtttgcaaactgctacttgtatacccaaaaaaaaaaaatctgctacttactatgctatatccatgatttatttcagaatgtttggaacacgccaaatgttcaaacagtattccagcaaaaattttaggcactgttccaatcaaaatcccccttccaaactaaccagccgcttgtacggctaaactttttgcctgtcctcctactgctaaatttgaacgccacattgaacaatatctgaaaccgtgaaacgtgcctctctggctaaagtgctaaacagttaatccaatgagaccaaatcacgcaggcaacaaatatggatataagcaaatcgaggacgcgtgaacgagtggggaaatcaggatatgcgatgacgacgtacgaggaggctgaagccggagacgctggcgagggaggtggcgatggcggaggcggagagcgggaggacgccggggaggtgccccaccatcatgttggacgccacctgcacggcgttctgcgccacgctcatcgcggccatgggcagcgccatggaccccacctttcctgcctcccgcgccagcccgctccaccacctatctccgccctcctcctccctccctcctcccactccggcggtgccgtccgccgggaatcgtttcgagagcagaggtattctctcctccatggcggccgcagtgcgcgcgtcgtcgtcgtcgcctccaccgaccgagctctctctctctctctctctctccctctcttcttctcagagacggctttggtgtctgtgtctcggcgctggtgggcgggggggttttaatgggaaaggactctcgcgatcagcggcgggttaaaacaggagttatgggaaggttgttatgtcaaagtgtcaaatgtggcgtcctaattttatactgcgggttaaaagtagaatgcaaagttttatacgagtgagcatccccccctcaaaaaaaaatactggctaaataaaacaactacactgtgaatattttaggaatgctttgaaatactcgctctgttttatattataaattatttttactttactctaaatcaaattactttaaatttaattaagtttgtataaacaatataataatatttataacactagattaattttattaaatctataattaaatacattttcatagtttatttgtattgggttgaaaatgttactacttttttctacaaacttagataaatttaaagcggtttgattgtaaccaaagtcaaaacaacttataatctgaaacgaagagagtaaggtttataaaacataaataaagagagtaagatttataaaacagagaaagaaaaaaacatactaatagaatgctatgctcttgtctgcagaattttaggtcacgagaatacgaatcaaacataggaatataaacttttcaggaaatttgtttggataggggagagactagatagagaaaggaatataatgcatacaagagtttgagctcatacttatttttctttggaattgaaacaaccaaattcataggatattcaaagttccattgtttcaatccgaagtataccataggaataaaaatcccaagaaattgaatcctctataaatactatgaaaatcctccaattcaagaaaggcatgttagcattggtgagcgaatcttgttgaggctttttattttttagaaacacagtacaagcgcacatatgttttttataaacgtacatacacatatcctacacctagcatatctttgagattgatgaagttattacggacacatcgctaacgacggatacattgtttaccattgaaaatgtcaaagttttcacctttccttcaaaagaaaaaaagaactctaccaccctaccctggtggtgttttcctagcatacatctcttcatagtatattgcattcttgccaagataattataaacaggctactagaaaagatcaaactgattcagtctctatgtgctagtatgtacccaccccacccagctgacatggtggtcgttctgtcccggcaccagagtacccacgttaacaaccgaagcttaacacactatgatgatcctctgacagctaaaccaaatactctgcactgagacagacagagtagcacggaaaataccccacgcaatgatatgcatcacgaatcatggaggagtttataataaaatctgaatcgaatcgaatagaacagctacagtggatcagtgaacaagtacaggcgatactggcagagatgtttgccgggtcctcttttggattggcacttccgtcagttaatcaaaagttcttgccttttccggcctcctgttatcacttcaccgtcacatcgcttgttgatctgtgtgcagtggatgtcttggcccgggagaggaaaactaggggctctgctacagactacaggccaaagctttccaacctgtaacacactgggatttgtacagtgcctgctcatggcttcttgcaattatgcaacacattatgcgtcgtcttcttcatggaaccagctgaagatgctgtcgatttttatatgtgaggacagagagaactcaagtagtagtagttcggcgtcgactatatgcatatggcaatgttttttgcagggttctactgtgagttacagcacacgcaatttgaagttcaaagatctatagaaaactgaaaacctatgtgacaaatttggcagatctgaatgtctgatgcggcaatgcagaagcctgcatccaccggcggtgccatcaggaattctcgaggaaacagcctgcagccgatggtcgctgtcgccaagacgtcggtttgccgaaaagacggcatgcgagtgcgcgcgctgactcactgcggcagcgtgatcggcattgctaccgcgtccgagcaggcgtgccgatccaaaccaacgcagcgtcagaatcgcctcatgcttcagatggtttatttatagcgataaccggataaggtagcggcgcaggcgggcgaaacaccgaacctttttcacttctccagacaaagagaccatggtgtgagacttcgaatgctggtgccacacagcttagacttgtttatgagaacttaaaattctaagaatctgagatttagagaagctaggctttttcaaaatatggtttctagtttactttttaaattctacagccatagatttttagaatctactaggtaataatatggactgtttatggactgtttagggaaactgaagcttttgtgagaagctgcagttgctaggaactaaacagacactcgattcaaagaccaccggcacaagtagatacaccaaatacacaggatatactaatgtagcatctgatttcagacaccacaatacatcagctgttacactgcatcagacattcagaactatctcatttcgcaagccaaatcatgaaaattgaggctgaacaagcatcccgcttacggatcataccatttaacttgcagaagtgcgcaaaaggattccggttagttacagtaatctagaccacaaacacaggacccatgactaataatgggttctcttggcctattgtttccggatcataccctattgtcacaatttaggggaaattggagaatgaacagttgctattgtgttagcccaaagggcatatatgagtacaatagagataggaaattactaatatacccctaaacacataatactcaacacccctgctcaaatgcaatgtgtatacaatagcattgcatttgaaactaaacacaagataaatgacacactactataaatacaaagtccatgtttgaagatgttgtcgaagcattgctcttgaatgaattagaagaagagaaaaccatcctatcctcaatgaagtagacctcgagccttcacaaactgttcttcagcccttagtaccaaaagccttcacaaactgttctttggctcttcactgattcagagacggtgatgatgacgagatgaaggaccttcacaaactgttcttcggcccttcaatgattgatgatgatgtcaactccgatggggagctggtgatatgacaaagatcagctccgacgtggagcttctggtgatgatagaaggctaacttcgacatggagcgagcgagatagtgataatgattgacaagcatgacttcgacgaaccgatggactttgatggacttgataggaaacataggaaattgatttgtagatgacattgatatactagcaaatgacttaggatactagcaaaagacataagagaacaattgatgcagatgacaagaagcaatatcaaaatcaaaaggacatgcacagggctgtgccttggttttctgttgcctatctcaaactgaagcacaatgatatgtttgcaagaccaaaggatattaattgacttgttgatggcagcagtaagcaagcatagcaaacacaaaatagatctgttgatggaacaattcaacaatcaagatagttgagactatggatggcttcacaaatccggcaagagcagaggccggctgcatgatgagggaagcataactcgatatgggcttctctactgctatttgttgatgtttgaatatggaacaaggtggatctgcatgacacttgcaaattgctgtcgctgctacttgatattagggaagacgatggcttgttgctgttaagtccagtaaccagtctccaagcatctatgtggagaagcagagagaacagagcaggctagaccaagaggaccaggaccttgacctgtgcggcgacgatgcagatggtcacgcgcgcaggcggcggacggaaagctggacgactgacatgggaggaggacggcgctggcggcgatgaagagagcgccgcgaccggccaatgggaatgcggcgacaacgacgagccacggcgagacgcgacgacaagatccgcgacgagtacggcctggctacgactgacgtggtgacgaagaactggatctgaatgcttgttcatgcatccgctgcttgcttgtggatttgattgcttgatgctgcttgttgcttgtgctgactggatctgcttgctgcttgtggacgaacgacgaaacgattggctgccacgattgacggctcgacggtggtggacgacgaagctgacgaggatgtgcacggattggatgggctcgccggtggcgagctgccaccggcgtgccggcgtggactccggatcgacgttagggtttgatcccttgctcttgctctgataccatgtcacaatttaggggaaattggagaatgaacagttgctattgtgttagcccaaagggcatatatgagtacaatagagataggaaattactaatatacccctaaacacataatactcaacaactatagtctagacaaaagaagcatccagcatttgatgaaacagaacttgcgcaagtactcttaaccagattggcagatttcaagagaacatacagttttcagcaaccaccaggaactagggaacaatttgccttccaaaagacgagacaccaatgacaaacctaggagaatgaagaagcataatcaccactctcacagcatcacaagatatcctaaaaggcacgggcatcaaaatgttagcatccccactctgatcattgatcagcagcgggcttacttccttcaccgcctgtgtggttttccggcgaagctgtctgtggctcctgctgctgctgccctgcgctcgtactgggttcaggatggaagttgattgggaacttggtgactcggggcttgtcagccagaatgttcctctgcaccctgtctattagaagctttgccgggggttcctccctcagttgctcatcgtcataatcattgttcacatagtaacctactctcatgaactcctgtcccatgtaggaacatgtcaatagcagcacagtgacgccgattatgtcttcttcacggatctttgagggatccggtgggtcagcctaaaatggtaatggcacatcaattttgagatgcaaaatttaatagttctgtaatctgagtttaaggcttaattgaagcagaaaaaataaacaaggaacgaaagtgtggtagggtttctggatccattgtgcactataaagatattggaatcaaaatattagtattttagtatagcaaaaccaaatttacctggagtacaaaacggtaggtcccaacattgacggggccaacaagcacactctctaattgttggtcataattttcatcttcagcagatccaacatatataagcttccactccagatctaaaaggtaaatcaacaaacctttttatcatcacataccctcaagaaatgaaataggcaaattaaaagcacatatagcatatcttgccactgtccaacacgcatgttactttgtgcaattatcaacaaaccagaaccaatagagtagaggctagagaagaaaagcagcacatttcctgtctatcattgcacaaaagagaaacatctctgaacacttcaaggtcccttgataatgatcaacaccaataacacacaatcaagacagaatgatctcaatcgaatgttgtagaatctcagacacaccaggacactagatgatgtcttgcagaaggatagttaatacagtagaacaatctaccagaatcgatgaagataggagagggaatctgactttttgggacgaaaactccaggttgtgacaggcaaaatatcatttttttttctgcaattgactaagccctcaacaaaaacaatagaggaaaagtataaattcacagtcagctaccaggccttgcccagtagttttttctttattaggaaaatatttataaatatttacaaacaaacatgggaactgaaattacaaggtttgtaaccaatcaaaaaccaattatctgaagggatcattcatcctacacatatgtaggataacctcttttctgaaaccatggagtcaatctgagaaacttgggtctttcttcttaaaaaaattcccaattcgttgttttactgcgcattcaattgatgggcataaatttgtctgtgacatttgcgtaaagtgtgtcagctacactactagtctattatcgcatattgaaaaggggtagcaccaaacatcctgacaacagacactaacaagatcaatctataaactggtaggctagattcgatatcataacatactgccatgaggaacaaagaacatatccaacataataccaatactagagaactccgtgacaattaattttgcaacttgaactgatccctaactaaggcaaaggagaagctaacaaaacaaagagcatcaacttctgtctcggcgcacttctgcaagctgtggccaagcaactagcaaggtgccttctacgagaaatattagtctttcatcaacccatcgactaatttggtcatgaatcaaaagatgataaatgaaacaagtggttccttgagaactggcacatagctcaatggcaaagatcttgccttatatccatgtgacctgcgttcgagccctgctctcggtgctcaccattttgcctatgattaaatgctcagcagaaatattttacttctttcttaatttgatactaagttcctagttagtatcccatataattcttctctcagtggaaaaagagacaagactatgattaaatgctcggcagaaatattttacttctttctcaatttgatgctgagttcctagttagtatcacatattcttctttctaagaaaaaagaaacaagtaattccttagtttcgcctatgattaaatgccgggcaaaaatattttgattatctcttaatttcatactaagttcctagttattatcccacattcttcttctttcgaacaaaaaagaaacaagtgattcctctgatttgtcaagctggccaatgcataagaaacatgctagagtgtgtgcagcattcgctattagcctgccaattacacaaaacgctatcattcaccatgaatgaaatcaacatgatatattaccacccacatcacaaaatttatctggttgtggtggaaaaaatggaacccatggtagagtcatgcatcactccccaacttccggactttacatgctaacgacaacgaaaccaacacggcccaaagcccagcatcgccgaatcgagacggcacccaacgaacacccccaaccacacgaaaccctagcacgccgccacgcgccaacggaaccaggaggaggaggaggaggtaaggggaggcaggccttaccgtcgtcgagggggatgaggcactcgtaggagatctcgaactggaagggattgaggaaggcggtggggttgtccagcaccgccacgttggttatgttcaccgcgctcatcgccgccgccgccgccaacgccaacgccgccgggcggaggaagagaggagaggctcgccgcggaggcgaggaatcgcgcgcggccgcggcgatgggttggagagcggcgaggcgagatggggagggagaggcgagggcggaggagcccttttgtggagggtttatgcggcggcgggaattggggcgggaagccaaatcgggatggcgggagggagccgcctctcgcaggtttggagacgaacgggaaaactgagagggaggagagacttcacgagattccccaattttagtacgcctcccagggtttacaaaaccaaaaccgtactattctcgtagttattacatgcgataatcttatcagtttttaaaattatgatatcacttgtggtaaactggtaaccgtgtgattttcatgataatcacgtggttaccgcggtaaccatcaaactataaaccccccaaacggtttggtaaaccctgcacctctctcggtccggcgattgtaacaataggtccatcctaaacggtttggtaaacccagcacctcccttgctcccgcgattgtaacagtagggccatctcaaacggtttggtaaatccagctcccgcgattgtaacagtaggatcaaacgcatactagaattggagagatttcacatgaattttggaagagtaataaaacaagtttggtaaattttggtgaattaactgcctttgattttggttcgatttctatcctcttatgaatgaattccatgaagagaagttttttctatgtgtgttatagtaacacttcaaaacacaaaacgtgatggcacaaccaaagaactgatgcaatgaatatacatgagaaggtttacatagttcataacagaatgtttgatacgctcttgctaagaattaaactcgcagatgtacagaagacgtcaggttttcgcacgcacaatgctcactgtttcaactttcaacaaggatgttcgcaagtcccggaagaacaccatactactattacacagatgagataaaaataaagggaacagctcgtggacacgtcgaaactcatccatccatcaccggaagacgtggaaaatagatccatggcacagtccggtctcacttttttagaacactgcaacacgaaagcgtggagaaatattagcaaatggtctaacaactatagtaacaagctacctcactagtatgactaaaagaaaatatgcaagaaatataattaagaatgtgggaatggtcttatgtcgtgtaaagagagaatgtcgagaagattgtttacttcggtattgaagcttgtctggaaacaaaaacacttacttgtaaagataagccgcaataccaagaataacacagagcaggacgatatcaatgcagaagttgcgactagatctcagctgataacagttcacgaggagaagcgaataagtatttaactcaagcaatcaaccaagcatgccaagggaagttagtgctaggtgttacctgaagaacggtctcttttagtctgacgttggtattcttcaaatctgtgttggctctatccacctacattcatcagtacaccatataaataagagataaataaactaagcattgctggatattgcacaattgcagaagaggaatccatggctattggagaaccaaccttctcgtccatttcatccatcaagggaacttgcctatccagttcctgatgatcacaaaaattgagcatggtaactatgtttcatataaccattgcatcgtatagtattgtataactcaagatgaagcacagcaaccaacctcattcatatcagatgccatgtttttcagagtttccagcccttcaccgataatatccaaaccttcatcctgcagaatttcaattccatacacaggtcaccttacataagaaatcccacttccagcagtagccaaaaatgaaaaggaagaaaagcgtgttcggggaattaatatattacctgtttcattttgcgcatctcatattcccgacgaaactgatttgattcttctgttcccttaaagtactcatcatcaaagttgccatctgtatgtggcaagcgggaaagtaggtcagctcatggctccttcaagaggaccaacaaaagcatctaacaggatcatgcccgaaatgatgagaaaagaaacagaaaaaccattgctcaaacaactttaggcatgactgcacgcatggttaatcagtcagctcatgactccttcaagaggaccaacaagagcatccaacaggagcatgcccgaaatgatgagaaaagaaacagaaaaccattgctcaaacaactttaggcatgatggcacgcatggttgatcaaaactctgtcaatctgatggttgtatatttcaacactgtcatactgatatagaaacaagagttacctaatcaaaatatacactaacatagtgtactaaaaagtagaagttggcacgtgacattgatgatggtgcggtaccaaaaatgacgtcgtaaaaaagcacatgtgcatatggaagcatgaacctaatattaggattccttcataaattggaaacgcgacctcatacacatgcaggatacttataaaatgaaccgacaaatgcaaaatgtacagcttactgcaatctagaacaaccgatgcgtaggggaagtagaagttggacacatctttaaagaaaaaaaatatgcatattttgtatatcaatatacagaacacacatgtgatatgttgaatgatgcttactaaccagaagtgtcaaacttaatggctccaccagtacgggatcctgaggcgccccaagtcccatttttctttgcacttgaactaccatctggtattgattgtattctatcgggtaaggcagcaaccagatcactacgggtcgcgagttcctcttttgtgagccctttgacctgttgcaagttgcaacaaaatattgaaaaccaattcttcaaaattctaggtgaaaaactgttatgtacaatttatagatatcatataattgaataatgtaaaagcatgttttaaaaatatagtataaccaacacaggcatgtatgaagaaagagtgtcaaggacatcacattgcctagtgcaaacatgcaggtggcgtggacagaaatctttagcaagggaacaacaatcttacaaagttaacactatggcaatgtcaagttaaaatgtagagtacattaagttctgggtcaacagaaaatattggaaggcttaacatcaactgcatcacctttacccaatagcctaattaaaataaataaatctagtctttaataaacacaggctactgaaacgatgaagagacctcatatggattgtgcacagcatatttgacgccaattacagaatacaatgtgtaaccacacgactatgtggtgagttcctctgtgagactatctagaccccagtttcacccgattagtgttcattctagcaatccaatgaaaagtcttgactcgttcatagtaaaatttagaaaagtctagtcccagacagtcgaaaccccaaatttccccccaaaaaatcaaacatagtccaccaatcctaaattccattccatcaacatcaaatggcccatgcaaatcacttcctcaacgacgagagcctccttacagtcatcctaaatttagacatccaccatccgcggtaaggtggaagctactacgagtactacactaaaacaaggagagaccgagtcctcgggccacagtatccgcagatctagcatgattcacccaaactaagaagggggagtgtatagatcagtaaccttcttcagcgcgaggcgctgcagcttgggcaggtcctcctcgacgagcttggccttggttcgccggatctccgcgttgagcgcgaccaccgtggcgcggttcttctcctgcttcgccgcctccgctttctgaaacaaagtgccccccagattcagatcgaggggaggagccagccaaccaccaaatcggacgcggagacagagaggaggaagggaattcgcatccagacctcgacgcattcgttgatgtcggcgtcgatggagccgtagaggcgggcgaaggggtcctcgccggcgacgttggcgccgttgagcctctcgacgtcgtacttgtcgtacttcttgcagatggagtccacccgcgtgaggatgtcgatcacgctcatcttcgcgcgcccccgatcccgatcccgatcacgatccctccgcccgcccgcgagcgagatcgaggcgaggattcgggaggaagcaagcaaccgcgacgctgcccttcctttctccgcccgagcaaaccgaagcagcgcacggtgaaagggggagatgacgagccgaaggtcagagaggctacagcctggccggccggtggcgatcccgtcatgtgggccgcaccaaccggcccggttagattggaatgggccgatttggatgaacttgggttgcatttgggctttctatatgggcctgaatttgaatttccttgggatgcaaaattctctcgaggaaaaaagtacaccgaaggtccctcaacttggcatcgagttacaaaatcgtcccccaaccacaaaaccggatacaacgcatcccccaacttataaaaccagtgcatactgatcccggttttagctgacatggcggctgactcagcgtggaacccacgtgggccccatatgtcaggatgccacgtcggccagcctctcccttcctttcctgtcccctcctttcgtctcgacttgttaggatgcaacgtcatcagcagggcggccggcggtggggagggggttgccagggtgagaggtccgacggccggcgggcgatgcggcggcggcaacgtggcggctgagacacgagagaaggggaaggcagcggaccagcgttgtggcggagaggcggcagcaggcgtgcgagtgtcgtggcggagagggcggaggcggtagctgcggcggagaggcgatggcggcggatgcgagcgtcgtggcggagaggaggcggcggcggcggctgccacgcgggagggcaggccgaaggcgacggcgtgggcgagcgtggaggcacgcgacggcgaggctgccgctccgcccgtcgcctcttctctctcaggtttctcctcgtctgggtgggcaggtcggccggcgggttgggaaggaagggaaggggttggggtgatggcttgctggagctgcttcggctgcagccggtcgatcgcagcaggaggcgaggtccggctgccggagccgttccagctgccggcgcccttgcccagctagccgcatggtctagggacttgttcgctttcatcgttcttcgaattctctccccgtttcttcgtgtactgtttaattggttcttaatctgctcataaattaatcgtcgtcatctatggcctggattgccggatagtatctttgtgcttgtaaattttcagcggctatgcgagagctcgtgccaaatttgatatgcgagagttttgttgtttgtttcgccggcgaccgagcaggacgggtccgggcaccggagcgacaggcaccgcgcgccgtcgcccaccgccacgcggaaacgaccggtgatgcggcagccgcaccggcctgccggaggaccgggcaaatggtgggcgaagcgggcaacgacgcgggccggagtggccggccggcggtgggcaggcacgctgcgggagaggaaggggctgcggcggcaggggcgcagaaggtcaggccgcaccggcaggcggctgtcgacatcgaccatttagagggcagagagaggacaagaacggggagaggagagagcggaggcggatggcgccgacggggagcgggatggggatagcaaggccgtcatcgccgtcgtcgtccatggcgtggggaggccgcctccgctccgcctgtcgcctgcctgccgccgccgacccgcctgcccaccggccgccgaacctcctcctctcccgcctcgccccgtcggcttcctccccaacccgtcggccggcctgcccacccagacgaggtgaaagctgagagagaagaggggaaagagagagatgacgtggcatcctgacatgtgggttccacgctgacatgtgggttccacgctgagtcagctgctacgtcggaaaaaactgaggtcaaaaccgccgagggacctagtttgccctggttttgtaagttggaggatgcgttgtatccggttttgcggttggaggacgattttgtaactcgatgacaagttgagggaccttcggtgtactttttccttctctcgatgccactggattgggccggtttggaccaatttgcgtgcattttgagctttccatgtgggccgtagtttgcattccttttttttttgagaaactaccagaatgcccgtatgttgcaacacgattttaattaattaaagaaaatatcattaatctattattataatcttttaattcaattgatgtagatatttgttcctgacttgtggatttttttagtctcacactctcccttttttttctttctcatgggagtggtcgatatgtgcagcgtctaacaccacatgtcctttttcttcgaaaaaagagttctcccttataacttttataaggagtatagatagtttgcattccttgcttgctgctttttttatagatataatttgcatttccttgttgcactgatcattagctcattagttcatcccatgaggacatgatgacagtatgacactacccagaatgattatttttcacttaatatttggagatttatctcgacgtcactgggtggcatataagggatgcgacaaacactccatatcaatcgaggaatttcctctcgtcttgaattatgactgatcatgacttgtcattagagaagttaaagaaaaagatgggacttatcaggagagactaaaaaaagagtagccctacgagtagtttagtgtgttttgccatactaccatgtgatggtgatgtcaaaaacatggggctcgcgtaaccgcaaaactaaggctgtcccagacacactaatcaaaagcattcgaatttagaactcctataatttgttagtttgtttaatcactctttgtgtctcatgatgattcatgcttgcataattgcatacacttctcgactctaagcttggaccacacaacccgtacataggacgaaaccgaaagcatcacccaaaaaaaaaaaaactaatgtgcccctctttagcatgtcagaataatatggaaaaggcgtcgagcagaaacaaatatgtcaagagtttgacaaacctgacaactgccaatgcagccaatgagccaagcagcaacttgttgatggctggtaggctttcccattatattctggcaaaaactttgcttccatttttctattgacgacgatgagttcgccgattccggccgggccggctcagcttttctccttcggctagcgtttggacgcacacttttgagagaatcgaaacacggagagaagtgctccgatgcatgacacctccttttccacgtacttaacgccaaagggaaacaatgatatgcagtgaacacaaagggattgaccctgcccaggatcatcaatacacgttgaggcttcttcgtgtgtgaaagcatggctaactcgtctggtcaaaggcaaaattgctgctatcctaaaacaaatagtactaggataaataaatgaaagggctaatataacactcgcacacacgcgagacgacaaaatggagagctagcacacacgatagggacggctcgacggtaggggaggaggaataatgcaggcaggatgttactatggccacgtttagttggttagtgtgacaaaaaatttttaaaagtatacagacatacataatatatatttaaagtattaaaggtagactaataacaaaataaattacagatttcacatataaactgtgaggtgaatttattaagtttaattaatccttcattagcaaatgtttactgtagcatcacattgtcaaatcatggcgtaattagactcaaaagattcgtttcgcaatttacatgcaaactgtgcaattggtttttttccatatttaatgcttcatatatgtattcaaatatttgatgtgacggaattttttaaagtttaaattcaaatatttgatgtgacggaattttttaaagtttgaagggaaataaacacggcctatggcgcaaaattgtactacaaactccctttcgcgagacgagagaatgcaacgccgtgccgctctggcggctggggcccaaccgcgaaaggcaatccatccctctctctccccgtcgcgtaaggccgctataaatcaacccgtcgcgggttgcattgcatcggtcggtctcggtcgctgccgtccctgtgcttggagtagacacgagccggtgacgcgcatatcgtcttctgctcgagatcgatcgatcgatcgcttggttggttgctgcgactgcgagggaggccgcgggtggtgaggaggattgtgcaaaaaaaatggggcgcgcgccgtgctgcgacaaggcgagcgtgaagcgggggccgtggtcgccggaggaggacgagcagctgcggagctacgtccagagccacggcatcggcggcaactggatcgcgctcccgcagaaagcaggtcggtattagtgcactgctcgtcgtcgtcgatgctagccggtgatgaaacgccatgtttgtatgtgaattctgatgtctgcgtgttctcttgtgtgattcagggctcaaccgctgcggcaagagctgcaggctccggtggctcaactacctgaggccggacatcaagcacggcggctacaccgagcaggaggaccacatcatctgctcgctctacaactcgattggaagcaggtgatgatttaagccggagatgaatatttcttttttctttcactgatcctgttctgagttcttgaactgactctgtttgcgtgcgttgccaggtggtccatcatcgcgtcgaagctccccggccggactgacaacgacgtcaagaactactggaacaccaagctcaagaagaaagccatgggcgccgtgcagccgcgcgccgccgcctcggcgccgagccaatgcacgtcgtcagcgatggcgccggcgctctcgccggcctcctcgtccgtcaccagctcgagcggcgacgcctgcttcgccgccgccgccaccaccaccaccaccatgtacccgccaccgacgacgccgccgcagcagcagttcatccgcttcgacgcaccacccgcggcggcggcggcggcatccccgaccgacctcgcgcccgtgccaccaccggccaccgtcacggcggacggcgacggcggctgggcgtccgacgccttgtccctcgacgacgtgttcctcggcgagctcacggccggcgagccgctgttcccttacgccgagctgttcagcggcttcgccggcgcggcgccggacagcaaggccaccttggagctctcggcgtgctacttcccgaacatggcggagatgtgggcggcctccgaccacgcctacgccaagccacagggtctctgcaacaccctgacataggaggacacgctaaaacctccattgaattcttgcgtagctgcgaacgcaacggcgatcgatcgatgcgtcgccacttgctactagcataattcttgctctcttttttttttcaatttttttctcttcttcgagtggcccattctctagctggcgttttctcgtgtattatgagtgatcgattattacatgtaaattaatccatagatgtatctgcactgatccaaattctccagcgattacgcttgtcagttcgtacgcgatccatccgttggcttggctctccggtacaccggacaagttagcgcgtcccgaaaacgatacgcccctgtctgtctccctctcgccgagccgaagtcacttcacatgtacagtgtcacagtgacaaatctgacgagacgaaatgttaggtgaggcacaagaggttcagaagaacaacgtgtgcgagacatggaccagttctcgtgcggcgcgcacgcacagtgtcatggacttgacccgttccggttttcgagggccaatggggaggagaggcgtgtggacggttttctgtcacgttacacgtaggagtattttttttcctctcattttgtttttgatttttgcccggtggcaagttgatcctgatcgtatggcctagggggcctatgggccgtggatcacatggtaattgggtgtcattgtttatttgggtagtctcacttggggcatggatagtgtctctttgtaaagtgattgaagacttcaagtgcacgacaaggacgagcctagttgaccctggaaatggagggaggatcggtttcgaagaagcttccttgacaattgtcatgctcgtgatgggctctatacatatgatcagaggagacctctagttaaaagtctctctaactaattactccaaaaaaaagtctctctaactttgctcattgtgggtttatcaatgtctaggcaaattaaaaccatcaataataacatgttaacagtacttaccttgttggattttactagcttagtgtacgccagggatccacacattttccaggtcttcgtggtcggcatgagaaaatccggcaaaagccaagtagaacaaggccaaaggatgggaaaaagccagtgcaatcctccactgtagttttatttggaaagtagatgaatatggattttttttataaaaaacaaacttttatttacatttgaaaacaaaccccaaaataacttattttacaaataaaccatttgtggagaaaacaacaggcaaggtccccttataacgttgcattttttcattttggtcttttaagacaattgagtcgaaaaatcctatataattcaacctaggttataagcggcatctactacacaacggtaatggcagaggattcacttccaaggtgtacatctatctggtttgtcaagcaaatctttaatttcgttgcttgacattgtcttgcgagggatcaagtttcagttttggttaaaaatatggcaccacattttttttacttgttcttaatcactcttcccctatgcgattgttacttttaaccatagttctctttatatagcgtgtattacccgtcaacaacgaggcgtctgtggtgactttgtcaatctccaagatttaccggtccagccttcaaagatgctcataggggtagggtttgtgtgcgtgcgttcataagggtgagggtgcgtgtgtgttgtgagtgtctgcgttgtattgtgtagttctaaaaaaaacgtaattataaaaagacagtgcaattacgtagtaaatataggtaatttattgtgtaaaaacgatttgataatatattttgaaaaatgtggtatgataaatatagctagttccattaagttttagtccatgtttaacatatatttgtacctcgttcgtgtttccttcatacgcatagcagtaacttatgttttgcattttacaaagcagttacgatgagtaggtcattgtagctcatttacatatggagggttgtgattttgttagtaccttgacattgactcaaagcggcacatctcggcatcaaaggtaggtggcaaaatgcattcgtcaaggacaaatagacaaacatgcattgatcgaatagtgccttcagagccgtggacttctgcgttatcagttcgttgaggtatctctttgatttgacatgagaaatggaccatgtgacagcaagaacgaaatgcatggatgcagtgtcctaactggatagcttgctcctttcagaattaaaagctgctcacttgctagctcagataagtgtcaagacatagtaacagtgtcttcagactctgctttggtttgttgctctaactgaagaattattgctcaccaaacggataagcatatgcacatgtatcagcaaccggcattcggttggaccagtactgacgcagattgcaaacattgttaactcctcgcgatgtctaactgtcttgaaaacgtccttagaaatacttataccggtcaagatcacgagtgtattccaaataattaatttcacctacatcgatgacagaggtgtcaacttaaacatccatagcttcacaatcaagacttcaaatgttttgatgcactagaaagcaaaatcagtaacctttactatgatcatatatcacacacgaatggtgcagctgttagtgtaacaccacgtgttgagatttgagaaagcaggcccaaatcaatgcattattgtagctccatttcactatatcaagtaataatagtaatttatatatatcgtagcagcgaacatgtaccattagattaaaatatgaaaggctcagattcattgcagttctttagtgtgcacttgcaatatcgaagtgcaccctgatctcaatccatcacacatgcacacagactgttcatgtcatcgctgatgctgagttggtcgtgaaatcggacgattccacgacggcaagtacagacacacgtcgattgccggcaaccgcaagcaagtgcagtgcagggtgcaagtgcagcagggcccttggaaacgaagtcggagagagaccatccgcccatgccatgtccatgtccgtgtgtgtgcgctcgctgctgttgtctctttctgagctggtactagtaataaaaactagcccgaggattattgcaagaacaaaaggtaagcagcatcttgcagagcatactatcacccaagctcttaaagctgtcggggaaaagggaccctacgttactcagatacatacggatacgcgatacgtcgatacggggatacgacattttccggatacgacattttccaaaaaaaacaaggatacggggatacgtatatatatatatatatatatattgaaaacacacaaaaaaaattaaggaaattacattaatatatattaaaaatacaaaaaaaataaggagcttttataaagaaaaagcgatataatactagtattagtgtagccgattccatatcaatattttgcaattttcttttctataagcaattcaaattaacaagcgattaagatcccaaaaactacatattaatagttcaatcatataactcttgatgactttgcatcaacattagcagccgcactaaccagtaaccactagaattgctagatgcactagcacttgtatctaacaaaaacgatagtactttgtcctaagaaaaacaagaaaggcccaacagattcaagcaagaaatgttcaaagagcatggatttacccggccaggcactcaagcaaacaatgaaaaagctccttgctttgatgttgccagcggccagcctgccaccggcctccgctatgcccggcaacggtcgtggcctccgaggttggcggcgaaggagatgcgccaccgcccagccgcggcagctcttccgtctcgcggagaggacgttgtggcccgcgcacggcaaccaagcgcgctgctgcagccgcgtctctggtggcatcgccgggcacgcacgagagacagccatcaggatgggagcgtatgaggcggcgcatccctgatgcgagcgaagacggaggcacgtcgcggccgtatcgctggcatatctcgatttattttgtttttttaaatcgcgaatatgtgggatacgtacggaatatgtatcggaacatatccgatatgtatccgtatccgttgccgtatcagatacggatacgtcgctctgtagccgtaccaggataacgttgagttagggacctaccttcagaaaatatatattcatggatgctagtacaatccagagtagtgacttcaaaagctgaagatctgagctttttgtaccgctaacaaactcagttttttttaaggctgtgtttagtttctgagattagggagaagtttggggaaagttggtaaattagaaaaaaagttgggagtttatttaagtatgaaagttttgaatgtgatgtgatggaaagttgagagtttgggggaagtttggtgtgaactaaatagggcctaatttgttttagcatcccgtgaaacatttttgctatttctataggccttgtttagttccaaactttttcttcaaactttcaacttttccatcacatcgttccaatttcaaccaaacttctaattttggcgtgaaccaaacttctcaattttctgtgtaacttttggtctcggttattggatatcctgatgcatcatgcattgactgtacatgtcataggtcttctattcattactagtacaatatacaggttttttttgggataaacttggatgctttgttcagcatctgccttttctgtcttgactcttggtaccgcttgtgaacatgtcgacatgttgttcctgctgtttttttttccttttcattttgaggcatgcgtcactaacttatgttcgagtccatttttcagcattattagcttttaaaacaccaatatactatcattaacctattattattatcatcatttttaatgtactatctcttagttgctatatatttttgctatggcatgtggaccttttggctctacagtctacactatcttttttcttctcatattaggatgtgtcctagggcaaaatcttatcttaagttacaatattttgagatggagaagtaaatattggagagttgaggagggtggttaacatgtggctctttagccccacatgttctttttctcctaaagaataagttggagatgggatggtggcagaaccatcaccaccactactatattttaaatgattataggttaataatacatatacataaaagttcatcaaaatattgtaggtcattcacttactcccccatcctaaaatataagcatttttggaacacgacacaatattcgatatgatactcagaccacttataagtttgaagataagatgttttaaataaaaagagttgcatattatgatagtttgtctaataataaatctagtaacatcaattttacatgattgatctttttatttgttttgctattaatagtcaaagttaaaaatggttgacttgacactatattaaaaatacttacattttagaacggatagaatattta

SEQ ID NO: 7832 - DNA, 82152 bp, Oryza sativa
cgccgccgccacgccacgcccgccgccgccgccacgccacgccacgccgtctccgccaaggcctcgcaacgccacgccgccgccgccgtcgccacgccgccgccgccgccgccacgccgccgcgccaaccgccgccccgatgccgccacaccgccgttaatgaacgagaacgagaacgatcgaacgaacgagagcgagaacaaacacgtcaacgtacgttgccgcgacaacgtgaacgagaacgagaacgatcgaacgaacgagagcgagaacgaacacgtcaacgtacgttgccgcgagaacgtgaacgagaacgagaacgatcgaacgaacgagagcgagaacgagaacgatcgaacgaagacaagcgagaacgagggaacgaacgtgaatgagaacaagcgaacgaacgtgaatgagaacgagcgaacgaacgtgaacgagctagggaacgtgaacgagcgaacgaacgaggacgaacgttaacgtgaaatgcaatatatatatatatatatatatatatatatatatatatatatatatatatgtgtgtgtgtgtgtgtgtgtgtgtgtgtgtgtgtgtgtgtgtgtgtgtgtgtgtgtgttacttcgcatttatcctaatacatctttttgtatcttgcagaaaagacgtgttgtcggagtcgtccgtcaagcctgagtggaagagctagccctagaaggaattggagcaggcaagtgacgtaataatataaatgattgttatatttgtaatgcaattaattaagattattagacctgtaattagacttatcatataagattgtgtagtgttctaatattatttgagttttaatataagattattttattgcaaattagacttagtatgacattattgactacggaattggtgcgactcctagcaattgactattgtagtcttaattagacttagcatatacgcacgaaacacttagcatacatgactattttagtcttagcatgtaatattatttgagttttaatataatattactttatttgtaattagacttagtatgtaattattgactacggaattggtgcgacaagtagcaattgactattgtagtcttaattagacttagcatatacgcacgaaacacttagcatatacatgactattttagtcttagcatgtaatattatttgagttttaatataagattattttatttgtaattagacttagtatataattatttactagctagggttgtataatatacgtcacctagacttagcttatatcacgatttgtaattagacttagcacgtaaggttgtgtagggttctaatgtacgacatttacacttagcatacatgacttagattgttaaaacataaatgtctcgtgacttagcagatgtttcttgtatcaacagatggctgaccgcgatgaggaacagatattgtacgatacaatcgcggagggaagcagccagtactggaatgaagaagaggggaacgaggatccaaaccagtacttgaacgaggaagggaacgtggagagggatgcggaggggaaccagcaggggcacgtggaaagggatgtggaggggaaccaggaggaggaggctagtggtagtcaaccctccgttggacagaagagggcacgcgggcaacgaggtgcagcgaagaagcttgagggtcggcacatcataacggaagtggaagaagatggacgtcctagtgccccggccgaagccgccaagaactatgtacgtcacagcggttgggttgtgcgggataacgtgcctgtcagtacggtgtactggcgaagaacaagggcacgcggagatcatgagagctttgtcccagattcggagaaagagatgctgtggaccacaatgctcgagacattcacccttcctgcgggtacagaggacaaagtgaaaaggtggactctgaagaaaatggcagaacagtttcagagcttcaagggagatctgtaccagaagtatatactgaaggggaagacaccaaactttgacacattcccaaagctaagggatcactgggacgagttcgttgcatataagacaggtgaacaagggcaggcgatgatggaaagaaacaaagaaaatgccgccaagaagaagtaccatcaccacttggggtcaggaggctatagcgtcgcgatgccgaagtgggagcagatggaggctagcttgattgagaggggtatcgaaccggcaacagccaattggccggaacgatcgaagttctggtactatgctcacggtggaacgctcaacccagctgatggctcactggtcttcggcgatcagatacgagaggctgcgcgacgactaacagatgcagtggaagcctcctctcagggcacgttccgaccagacagagatagggacgagctgacactcgccctgcagactccagagcatccaggacgaacacgagggaaaggggtgattccttggaagattggtttcaaggaggacatccacacgtacaagagtcggatgaggagcaagagagataccggggcgaagattgcagacctagagttccgagtatcgagctacgaactcaacatgcaagaggaggtggcaagaaaggttgatgaacgcatggccgcacatcggtcccatgatccctagccgaccattcctcctgcaatggtgagcccgtcaggaaaccgtagcagctgcgcctcaacggggcaggtagaatcacagagcatggacgccatgcaaacacaggacgaatcgacctgtcccgttgatgacatcactcagcggacaccatgtgagctacatattcctttcaagaacttatcaataaaggtaagatttagccattccgctagttgctgcttatatatgttgattactaataaataatctctcacaacatgaaggtggcgtcgggcatggccatcccaacggacccttcaggtacttaccactgcaggccgattccagcaggatactcgaaggtcgaagttgagttggtcgaaagcgcgtacgaggacctcgagctggattaccctggaggagacggtgagacgcatctacgagacacatgccatgccattattctatggcgcaggcggtacatcatcctccctgggcgacaagcggcgtctcgtgcaccatctcctccggctccgccatctcctcctcaggatcctgcaccgtctcctcctcatgctccgccagcaccgtctccacctcaggctccagcatcgactcctcctcaggatcctgcaccgactcctcctcgtgctcctacacctactcccccgcaagctcctcttccggcaccttcaaagtcaaggccccccccagctccaccacctgcccacacaagggcaacgaagaaggcgaaagttgacgccgccaagaacaaggacccggggtacgattgcacgcaagaggagcttgacgcttacgttgcatcagaagtcaagagacaattcaagcctcgaagtccagaaaagaagattcctatagaccccagtgtcaggaacttcttcaggggtatgtctgcatctgtcaaggaggccatcaagctatcggactatgagcgaacgctgaagaaagcatcttctggaaagtccaaaccagtccctcagcttagagagcaaccaaaccaggagatcgagccgttggtgaccggtaaagaaatgacgatagaacaatttattactgacaccggtctaactacggatcaattgctaggagtcgcaccaatcgaaaaggcggaagtgaaatacatgtacgaactcggtaaaccgcttgtcaagcctgagctgctgcagtccctacccacacaaatgtacaagttccatcagctgtacatggagatgagcgccaccggtagagagatgatcggagcgaggatcagggacacggacttcttgcaaggagatgacattctctggatcaatttcaggggaatctacgaactataccagctggacgccctcgacgtctctattatgagttgctggattttgtaagtatatcgttcagttagatttcttactatacgtctcctttaattaattaggtccttgtatataagtagactatagaaaataatatactccctttttatcgttgtagaatggagattcaaagggcccgacggcggagggttttcgatactggattcatcgaccctcggaaagtaaacgtcgcaatgctcgaccaatatccacaagaaacagaggacaatctcgtccatctcctgaaggcgcagcattacaagacgttcatactgttgccatacaacacagagttagtttaattttgctgtcttcctacataccaaatttcattcccgtacgaacttgctaagtgtttcatatgtaatgcatcccatgcacattgcagattccactgggtgcttttactcttcgacctggaggcctgcaccgtcaacgtatatgactcaatggataaaaaagagtctacgtttgacaaggttttcgaacttatagacaggtaccgtcataagttcctttgttaattaagaaaatcttgttatgttaattgctactacgaatcatagctttaaactccatgtagggcttggtatcggttccgtcatttggttcgcggcaaatggagagaaagacttaggcggaagttcaaatttcctgtgagtacacatgctctacatttatatttctccgattcaaatacatacaagtgtatattaattagatctctcgttgtttgtcatttatttgtagtgcgcaaagcaaaagcagggaactaacttgtgcggctattacgtgtgcgagtattgccactgccttgcagaccaaatcatcaccacaagagagctcgatgtacgtacaaataaattcaaaatttcattacgtagcgatttcttgtttaattactaatcaatttcatacattcatatagtttattcgcatgagggataacctgaccacacacaaggaatttatcgcggcggttcaagaacaactcatgggattcatcaacgaagaaatccttgatcccaagggtgaattctactacgacggaaacacaattcaccggtccttagcttctgagctagcagcgagtactactatgtcgaaatcgtagctagctaggacatataatggattgtaattaatacatgactacatatgtttctatatgcatgtgtacacattttctataatgtaaatatattttggtcatatatatatctatatacatatgcatttgcataacatatatatgtataaatacatatatattatgcatgtatatacatataatataatataatatatatatatatacatatatatatgtatgcatatatatgtattgaaacatatatatgcatggtttatatatatatatatatatatatatatatatatatatatatatatatatatatatatatatatatatataaaccatgcagcaacagggccatgcaaaaaaaaaaaggtcagcttgatctttactcccggttatttcacccgggactaaagatagcgatctttagtcccggattggtactcccggtttggaaaccgggactaaagggggttacgaaccgggactacaaagggtttctccaccagtggtatatgcaattgactaatggacatataagataaatacatgacgggtcatatagtaggggcgctgattttctataatattccctgcaatgatatgtcttcctacaatgacacgttgtaaacaagaaaaaaaggaaaaatgaacgtaagaatttttacaattctttcggaaatgagttgtttatgaatgaaatcgagatatttcaacgaaatcgaatggggccctggtttggtgaagcagctatactagattgctttcctgtgtttcaggactgcactcttattcattcctgtcttgtgctgtatctagctagggccaattaatagagtatttttcttgaggtaattagtggattatatggattcatttactgttcaactaggggtagtacatgcccattgtttcattgagacatgcacagaggcaccattcgagaggcgttttccctccaatgcattacatgaaagtcatcaacaatccataaacaatcatatgcttctcttcttatcatggggagaatcctattctaaaccaacatggcacttttgtgcatcaaacattaacaaagcaaaggaaggctataaagtaatccaatatacatacactggtaagaaacaccagggaccgtttctctgagcggctaaacgcgcatgttacctctactttgcatgctactccagcatgcagtagaaaaagggggaaaaggatagtgaaagaagaaaaggagtgaagcttccatgcctaggtgagctgataagtgacatgcacatggaaggagttgttaagtccaggcctaagcatgctttaacaaaccctaatcccccactaataagatagattaacgctgctaccattgacaagccaatgagttatccttaattaagcgatcactgtctgcacaaaaggtgcatcatggattacttattgttagctccatgcatgcagctagcgagctacgcaagttagttatgctgctgagaggagttcacgtttaccatcctgttagggtattagggtgagtgatccacccactcaccataaacaaatttacacataaaaatttacagaagtaaatcagaagcaacagtcacacttgcaatttaagtcaaaaaagcaaaaagggcatgttcttataaacgttatcatcacttttgacctacaaacctgccaactttacaaatactctgaatgtaagtcgattgaacgagttacatatgtcaaatttggttagctctatttctagtgaagaacaactgaacaagttcagaagacaatgcataagtagtttgatgacaccgaagcacctgtatctgttcctgctactgctagtactccatattttagtcgaattctttgaccagtttgataatcatagtgtcttttctgcgtgccataatttgctttcctcattcatcaatcattctgatcgtgcacctccctcctctcatggacaggaaagtatattttccttcatcacaagaaaagcaaagcagagaggagagaggaggaggcagctcgacagtgcagtcaaacagaaagcccattcgatccctttctccactgtcctcctctccaatgtaaggtccatttctccctgctccaaaatacaaatgtacacatgcttgctgctgcatggtccagaaggtttgcacacatttataaacattattggtccagtttaatttactgctaattcacttgtttatcagccccaacatgcctcggaagccgtgcaagtgcgttttgcagtcccccacaaacatgcctcccattctctgtccccataaggccacaaccattgttaaaaccatcaactttctccacctcttcagtcttcatcctttatatataagcaaacaactctttcttcttctactcctcatcactgtccctctcctgcttgcttctttctgctccagctaagctcttcctctctggaagaacagctttgcaatcttgctatctctcataagctcaaatggagctcagtggtagctgtagaagtattgtctggccaatgtgtggaggagatacaggtgaggagcctgaagggaagcctcacagataggcttgggagagtgtccgtttgctcccactgctagctaagctctctgcttgctccatgagctgagcatgaggaggaggaagatgcagatggtgtgagcttgtggggaattgaggcttcatggtccgagatatatatatctctctctaggtatctcaaattagtagctacttactaattagtcttcctagttagattatttcttttccttttctttagtttcttcttcttcttcttccttgtttttccttttttggtttcttgagaagctctaagatgaggggcttcttggctagaggcttggggttctacctggtttcagatcttgatgccttcatggtcttctaagtaatgcaataaacactagtgttggaggtagcctcaagcttggaatgaatcgagttacaattcattgtaatgcatctataatctctgtgtttttgcatatgttatctgctgctgcaacttaacactccagtgtgcttttatgctgctcttgatgacgtggtacgagtaatatacaatcatgtggtaatttgattgatttatttattttttgcaagaagaccataccaaatttctttcagaaaaacaaaattcgtctgcagaaatgcagaagcatgtggataacgctctacacttgcggacaaaagtgatagtattagttttaatccttcaaacaattctaatgaaaatctatgctaacaggtgtacagcattaggctgaaaaatgcagttgtacagcatcaaatgcagcgaaatgcaggttttgtagtcgggacaaaagctgtgaagtctttctggtcgccaccagttttaggttgctaatcccagagggagtaaagtattcaacgtgacagagcaattgagagcgagagaaagtacaccagagagagcttaaaaatttgttactcctacagtttggtcacagtacagcaaggcgtcagaaccgttaaagttctctgaagtctgaagcgccccaacggtgaagtgagtggagtacatgcaatctctgcatcatcatcaaatgcgtgcaacgcaatccatctctgcacccaaaacgcaccgatgcttcggtagatcacgcacactgccgttacactgttacgcgagagccttgtgtaggagcagcaaactagactggcaacatagaggcagattcagagagtcagtactggtactacgagtaggagtagcttaggctaggcaggggcgctgggaggcaaaggcaaacgcagcgtgggagtagagtagagagggctgtggggtggcgtgccgttgtcctggcttgcctcaatgcctcccctccgagctctggctgttaaaatggtgcagggaatattcagcggctgctgcgcaggcagtggtcgtcgaatgcatgcactgcagcgccctgtgctgtgttgtgctctcgtatggccccctggctcctgcatccatcctctctcctctagctctagccctcctgccctgcgctgcctgcctgcctgcctgccgctttcgcttttgcctttagctgctgtgacaccactccgcctctctctcgcccgcccggttttgctggtggtggtggagcggtggatgcgagcgagcgagcgcaacaacagcgagccagccaagctagccactgatctcgttatcctcgtcctgttgctatcttgtgtggcgttttggacgattctggatacggggttttcaccccctccgaaaccaagggggccatggccgtggaattgtcatttgtgtcaatcacggcgcattccttggcagccattgttgtacggaatttctatttaaatccttcatagtaggtaggattagggatttttttacatagagatttcggtgtgtatcggcgattgtttccgttttgtgttgttcggaaacaaatcgaatcgatgctaccccgttttaaaatatactaccatttcatgttttaagactttctagcactgtttatatttatatagatgttaatgaatctagacgcacatatatatctagattcatcgatatatatgtaaatgtgggtaatgttaaaaagtcttataatatgaaacggaggaagtaacaattattctaatttgtttcagtatataataatttgtttacatctttattcgattctggttttgttttgttttaaaaaaacggtagcctcgatttgaccatttttccgacagtgtcttcgtcccgacagggctggcattccacagacaacccggcgcgacgacgaggcgatcgaatcgatggatcgtgcggtgacaagcgttcgtccgtggggttggattttagcgtttccctttgtcgagtttccatggatgcgtgcgtgatcttgacatgttgatcgacgccgcgggctgccaaagccaaagctggtgtgtagatgtgccgatcgatgaggaaacccatagcatatggcatggacggcggatcgacggatggattgacgtttgacaccactaactcacggagcgacgggtagtacagtacagtaggggcctcctcctcctccccgattcttcttcgtgatccgtgcacagtgcacgatgccctgcacgacgctacgcgacgatcccctcaagacacgcatcgctctgaacacgtctcatgtagctgcgtggcactgtgcatacatacgactacgtcttaccatatggaaacgaatcaacgatcgacttcgctgtgcgtgaggtggcatcaatagtacttgtagtagtgctgcatgcgatgcatgacagaggcgcatcagggagagacgtgcagggtgtagcgtagtgtatgcactgtacatgcgacaaggagtagcagtacatcgccaaaaacctgcgatcagaaaggacgctagtatcacaattttgatgtcgttcgtaccggctctcaaatttgaacgtacactgatgccctgacggagaatatcagaaattgtatgcagcaatagtagaaaatttgcattcacttcctgtagaaaaaaagtatttcctttcatgttacttatcatctcatggatcgtcctttcagtaatacactactccttgaaaaaaacatctcggcgtaccaaaaatttaaacttaaaattttgatatctcgagttattaagtaacaagaggtattaagttttactgcataataaaatatgtggtatctctcttggtattttttcaaagaaggtggaattaacactgatagtacagtacaaagacatgaagtatgatgcactccatgcatgcccgcccggagttgctggcagtgtactccaattaatcccatctcttttccccgatggtccaagatcaacaaagacacgctctgtgcaatgggccagcctctcgtggggacaaagtgcaaagtagctgaagacagtttgatatagattcttcagttcagtcccgggtgtgcacggcagtagtactagatatcctagtagtagtagaaagatcatgcgtgcttgcatgcatgggtgcagatcagatcagagcaaggccaaattaacacccaacgcacgcagggggagtcaatggttttcctgagcaccagggcaaagccattaagaggaacaggagcgaaaccgcagctgagttgcaacaaatgcgtagcagcagcagcagatcgtgcatgggcatgcaacgcggcctccggcctcggcatctcgggtctcagttgagctagcagacgagcaacagctggccgctaaagctcacggaaacgaaggcttttacgttattacagaagtttgcaggaacatgaagtggatagtagctttgacttggcagaccgtggagtacccatgcagttgtgcacaaggctcttgtacatgccacgagcacgtgaattgttacgagaaggaaatgtgttttggggttccattataatgcgtgatgaggacaaggcattgatgggtggtggcgctgcgtaaagcgggtgccgtaccctgctgcgagcaacgagtaaaaaaaaaagaggcagaggcagaggcaggcagcaaggatgggacgccggagtcagtagtggcaggcggacaagacgtgagatccgggagatgctgctgccgctgcctccgcgctcacagtcacagtagtggtgtgccgcgcgacgggacgggacgtgacaccgcgcgcgctgcgccgttgcgcgcggcggcggcggcgtcgcctccgtagccatacgcgcgcgcgtgcgtgcgtgcggctgcgccgtgccacccgcgcagaattgatgggtgggtcggcggctgcggctcaccccgtcggggcgtagagtattgggcatgcgaccgcgaccggcacgcgcgctcgcgtttcggcggggtgcgtgatgcgtcggcgtgcagttacgagtttgcctaccgctgcggcgcacgtaccgcgcgcgtggctcgcttcatgggagtgggactcgccgtgagaccgcgagttcgtgtcgatgcatacggcctcttctcttcacaatgcgcgtgagagacgcacgcagaaatgcgggagtagtagtttgtttgatgcaactttgcagctcttcgtcagtgaacatacatgaagtttaattttgaaattagttccaaccaagtcgttgtagtatagtggtgagtattcccgcctgtcacgcgggtgacccgggttcgatccccggcaacggcgtaatccttttttccccagttgatttgcttcaattgccattgtctgcccttcttttttcccacttgatttacttcaattgccattatctgccaatatcggattttcccccctttttttggtttacttcaattgctaatatgagctgatttgcttcaattgccattatctgccaatatcgattttttttttctttttttggtttacttcaattgctaatatgagttgatttgcttcaattgccattatctgccaatattggattttttttctctttttttggttcgcttcaattgccaatatggaacgatgaatgcttgttttctgatttgcttcaatgaccaaattatggaatgctgaatgtccgttcagtttagcaaagaactcatcaggcatatacagtctactagctacgatcatccacctgaatgcctgcacacacagcagtggtcaatgcaacaaagacgacattttcttgtcttttcattacaacattttatactcctgctgctgctctagattcaattctgacatttattttgccaggcaaaagggacgcataacaccaacacgcacgtaaaagaacaacagcccacgcgcggttcgcattctcgtccatctgagacaatcaaacgatctttttaaataatacattttctcagtctcagacaccaacggcgacgcagaaacaatttcttctatacctggtattccaaaaaaaagaaaaaaaaagttctatgcgactatgcctaagcaatctagatatgacactattaccaaaataaataaaagaagaaaaaaatgcattatctacatggaccaggcaacagtcagcaaaagctgagcgaattgtaagtctacctcctgagagaacaaagcatggaactttggcacaaaaccaatgcaccatctcctgctcacgccattgcatactccttccaagtggatctccatgttgccatgcaactccgttgctaccacaaactgtagggaagtgtcgtcgtcgccaccgtatttgccatcgaaaagctcaatgtcatcagctatgcggcctgaccgagctgtgcagcgcaaatcaatgcctccgggaggcagcctgagcggctggagctcaacagtggcctcgacgcctttcagaatcctggcgagcttcaggcgcatcattggagtagagcggttgccacaaggtagaatggacagctcattgactctggaccaatcgtgccgatatatactaggatgctctactactccttggatcagctcacggtaactgtcaatgccattacctgttctctttatcttcaggttgaactcgagcaagatttcaggattggtatgaatggctctccgagggctcaatgttggcagccgcaaaacaccctgcagagtaaagcaatatggccacatagagatttcattatttccgcttagagaagaagtcctgaaaagaaatgtggaagagatggagtgcatacatgtcgtgatacgacggtgaaagggtggcctatttctctgttgaaaatgtaattgcgccgtccatcacgtaagtccctaatcgcgacgaatccggatatgtcgagtttgcaggaatgaagagaatcagctacaatgatctcgagggtgtaaacttgcaagatgctgctgggtgcacaagtacaccactccaaacaaacaagtctaggatgcagattcctcttaggttgcaactttgctggattcaaagaattacttaattagcctggattatgatatgcaacatatgaaaaatacaaatcaggccaaagcaaacaataaccagtactcagacctttgtcttacagaaaagaatgtatgatttggagaaaaagtctgacacaagtgaatctgtctagttatttgaattgcaaagttggctccttagcgaagccccaagcggtaaccaaattcctcatgtgacataacacatggcctgatggttaaggaaaagtgcccttttcattttttgagtgttataatatatgttcttttccccctctataacactacatcaaggttggcacactgataactattgcttgcaatgaacacaaaagaaagccgcctattcatatggtaaactggctactactgctgattaacatgtgtagcctttctacctatattataaggattggtaggagttttctatgtgaccacaatccattttgctatatagagtatggtgattaagtccagtaccaatatatactgtattagtcctactgatcagtgatcaccacttttctacccaagataacaagaaatcagtatatatgtgtaaatattagtgctcatggagaagcagttcagattgatataagatgtgcacttacattccgatttgtcggacaaggtccagtagtataataacaccgcatatggctcatccgttgggagctctgcttttgtagtgctcctgctgcctgggttacacatgaaataattcgaacccctccttggttcctgcactggttgtatgattggctccatgaccagcttaagctgctccttgcgccactcttccctcttctgaatttcctcctcagttggaaacttgggtacatatggctctgaaaccttcgcccaatcagattcctcaggagattcaaacaacaagctgtactcgccttctccttcccctccccctgatagtgtcccaggtagagataacgcattaagcctcaactcctcgttttcttgctgcttctgctgatacagaagtccctgatcttcctctgcttctaatgcaaagatggcactgagtccaaaatcatgttcttgccagtctatccttgcggcatttagccggcaaagcttcctattgagctgaagaagcaaacatgaacatgatattgggttgttatcatcaaccttccattctagaacttggtgtgtccagttatctgctgaggtgaaggatgggaatgcacagctgttgtcatcatctccgcaatggatgctcaccgtgattccactccacccagtaagaacaacgccgtcgttgagccatattgctagattgtccactaggaacttgaaactaaaaatctgatccacctgcggtgacatcgacaccattgccacaggtctcaatgcgactgtcttgcctctttgttctgtgaagccatccatctttgggtccaaatagccttccacaaatcccactgcttgaagctccatcgtcgtcaatggcagaacgaacctgtcatagcaggcaagcctccagcgcatgtcgcgaggacattcttgttccacgaagctgcagcgaacttccccattggtgcccactgatagttcgaaccttcggtgcatcgcttcatcaggcgattcccactttatgtccccatggcctagaggaatgtaggcaagaggcttcatctccagctcctccctttccctgtccaactcttcttgcttcctcctctcctgctcttgcttctcgtgaagtatcatctcttcttgctcctcttgctcatacatctggtagagattcctggccagatcctccaatgcggccgtgatgttgatgaattcatggccgaccctagcatacagcttctcctccgtccatttggaggggatacggaaccatcgctcggagaaggcgatggtgactgttgagccgtcggggggcagaacgaacagcttgtcatggaggcgcaccgcgagtcttgcgatccacatgttggtagtgagggcaaggcggtcgcctccggcgccgggaagccgcctgatgacggcgaccaccctcaccggcggggagcccgccgccacgacggccgcgaccatctcggccttgcgggacagcccggactgcgatgtgctgaggcggaagcaggagagggcgcccacctggccgccgtcatcttccagctctaggcaacacccgtcggcggcgaggcgggcgaggcggagggggaacccgccctctcgctcggcgcagaagcgacgggtctccctgtgcgaccacaatgcctgccctctcttggaggagagcttgatcctgaaaagccgatggcaatggcgcggcggcgcggcgtccctctccttgccgtagattggtctagcgtactgccactcgtggagcaccgggtcgcccccctcgaacatgtcgaacggggcgaacagctgatccaatagacgcagatgaatctcctcctcttcctccttttgatgagccgctttctcttccagaaagatgggggatgaacaagcctccatggcttgtcgcccgcgtgtctgctactaccattgaatccgtctccgtcgccgcctccgccgccgacacgatcatatggaattgtttttcagaatctaaagcaaaattagccgccgccgccgcggctgcgatcttgacactgtcgtttgcgtcgccgccgcaaaaccctagaggcctagccgcgctttcggtcaataaattggtcgccacggatctctgtattgttggtcaggttcgctccgattcggaagaagtcttcaaagttttagacctcctcctcctcttgatcagccgcttcgtctttgaggccaatggaggtggcggagaagctctcatgggttggcacgcgcgggcggactatcatcttctccatcgcgccggccgccgcaatgccggcgctggggacgacgccgcgtcgaaccctagccgcttgccgcgcgcggcttctgttaatgcttaatgccagcgcggaatctccggcggatttcggagggagtttgtatcgattcacgtaatcgatcggagtctggactctggactagaagctgatcatcctgttcactggaacggttcgagtgtctcgttttctctcgggcctggtttagagcatgcccaacagattacttattctattccctatccttaaattaaagaaattttaaccaaaattctcatccaacagattccctaaccaacatcccaataatccaggttcccatattcgtatatgtcgttactcatttgcagggaaccattttttcttcccaatcgtggtcgtcgctgcctcgcgcgcgtagggggaaaattgttcccgcgctccttttctcgccctcctcgccagtcgccagcaacaaaattcctcttcctcccaggcgtcggcagcggctttccaggcggtgaagcaacggccaaccccttcctcgtaggcgtcgtcgactgagttccacgcggagatgcagcggtcgtccccttcctctcggtcgcaggggtcggcgtcggtgttgctccaggcagcgatgcagcggccatgcccttcctctcaggtgcaggcgccggcgttgctccaagcggcgatgcagccgccgtcctcttcctcgcaggcgtcggcgtcggcgttgttccagggggcgcccgcacgtcgaccaccgcctcctcgatttggggccgacggccctctgcgccccgcaccgccgcctcgccgtcgtctcggtctgcctcatcctcaacctccctactccggtgtgcaggcgacaaagtccatggagggacatgctccatgggagacactgaatcccctcttacacgaagctcctggcgtcgatttctccatagcttattctgtgagtgatgaagaattcctccataggagcaatttcggtaaagctatccctgattcgttcgatgtttagattaattttcagagtgttgcagcctgatctgatgtccattctgtgactgacttccccggcttgaaattcaggaattgctacggcttctctttggtgttccgttttttaacaaatcgcagcagtcaggacactggttgactggctggtgatgatggcgctaggtcacggcggcgcaggtccggggaggaagaagtcgatcagcgctggtgcgggagggagaagacgtgcacaagtaccgaactgggccccaccttgcttacgtggcaaactaacaaatgacagggaattgatttttaggcatctcttggaggagggggtcattgttgggcccaatttttattttggtattcctaattcagattttttgggaatcaaatattgggtgattgttgggcatgctcttagttcccaaatttttcttcaaacttttaactttttcatcacatcaaaatttttctacacacataaactttcaattttttttctttaaacttccaattttagttaaactttcaattttagcgtggaactaaacacagcctcggatgtactccaatattggaagaattctctagttactcctcctaaaatataagtattgttttaaatttgatatactcttcgagatgctactttgaacaataacatttatcttcgagatttgaacctcaaaccacgctcatttctcacggttgacctcgtcgagcagctagtcgccttgtgggaagcggtccggaatgtgcacttagacactggagaaccggatcagattgcctggaagttcacaagcaacgagcgctacacggcctcctcggcctaccatgcgcaatgttgtggggcgccgagcacaaacttcaactccttgatttggaaagcctgggcaccggggaaatgcaaatttcatgcttggcttatcatccagaatagagtctggacatcaggtcgcttgcgattagggggtggcaaaataacggttgttgctctttttactgccgcgaggctaagacggcactgcacctcgttgccacttgtagatataccaagatgatttggcaccttgtctctgcatgggtgggctatcaacagctggagccgactgaatgggaggaaacccagtctgtcaaacaatagtgggagagcctcgcaaacactcctagtgtcccaagaagggggcttcgatcgctcatcctattagtcgtctgggaaatctggaaagagagaaatcggcggatctttgatcataaagaggtggcaacgagttttctgctaacgagaatcaaagaggaggttagcctttggactttagcaggggccaaacggttgcgtgagttaatcccgcattctgtatagtgtacatctatagtgcttctctttttccctttgtcccttggggttatattttctcatgttcaattcaatgaaaaggcactcgtgttgttttccgttaaaaaaaataacatttataaaagtaaggtgtttatataaaaaaaagttgcatatattatgatagtttgtttaaatctagtaacaccaattttacatgattgatctttttaatttttttactatcaatagtcaaaattaaaaatgttaaacctgtcactattctaaaaatgcttatattttggagcggagaaagtattatgtgcggccagcagccaaggacaaagacaaagcatgttgcaattcttgagtaaagggaaaggagcaaataatgttagattcagagctctatccatgatctgcaaaaaaatatatcaaaatcgtccatataaatcaacaaattgatagccttgctaggtgggaaaagaagggatagccctgtaatatgaagctctgaacttgatcttgacttcttgctcctgtagatttagctgaaacaaaccaaaaatcatgcactggactactggagtaaaaaggtactactagtagccaccataattatcggcgaaagggatgtttagtttttcagcttagctcagaaaattatgaatatcccgaaacgaagatgtaactgaaatcaggagctaaaactgatttgttttccctagctgatgaaagatttggtttcatccattgagatccggagctattttttttttcaggctagcatgtcttcctttctcaagccatcatggaaaccacctcactggtcactgcaaagccagcagggagccaactcttctagcttaaggtattgtacaactctatattgtactcccgatattgaacagtgcaaaatgttgagctcagtgaatacccaattttattcacatatatacatatactgatattgaacagtgcaaaatgttgagctcagtgcttcacttgtttttttttttggcaatattgctgtgtatgaaatctgtgttcaattttgctgtggtccattttggcaataatacacatactcaaggcactataacctcaaggaattcatggagcaactgccatctgaactgcacatgtatcagttttaatcaacaagaatgaatttctcaggcaaaaagaaaacattcagttcactgttgtgtgagttctggcatgcaaagcatgtttggacagcatgtcctgatagaaaaaagaacactgaattctgcacgattcttcactggctcttgttccatatatgccgatttgcaatttgcaaccaacaatacagacagactacagacaaaatatatgatttcttccaattattccaattgacattacagacacaattccaatttgtcatacttacacaacacaaatttgtcaagctcacaagattctactatacaccatccagaatttctaccaaaaaatttggcactacacaaacacttaaatttgcatgctcacatggcaaatttctaccaaaaaatggatttttttttccgaactgtacagtgcggaagccctattgaccagaactccagaagttaacgcctcgaaccattgcatttgcatgttggatgttagaagttcaggttcagattctgaagttcagtttcactgtagctttgctgggacatctgaagagtctacatattcaggaaaaagaaagttcattactccaaggtgaatcaagattcagtacttgagtaactcaattgagtaactccgaggtgaatcaagattcagaacttgagtagtaatccttgtatgcaaagattacaccatgaactattagctgcaactctgatgatttactgctcaaactgcaaaaaatcagcttgctctcagaaacgcggcagcatgagttacaaggacctttgcacattccctgcaatatccaaacaatcacattcctttttttcctgaaaacatgcagtcattgagaagttcagaattcaaattcatgaaaacagaagttcagaacttcgagatcagggaaggttcagaacgcacataagcagcatggtgctcagggtgcattcacacagcagagtgcaattccatggcacacctgctgcatggacaaaactgcggagagcgatcaatctagttctcttgtcaacaacacatcgaataaaatatgtcaaaccaaaaataacagggaagaatgaagctagaattttatattgctttttatatccaccaaatggttatttacaaaagaaaggaacaaatgtgacttcccttcgacaatgaaatgaccaaataagccaaaaggtaacttgaacaaatgtgacttcacatggcaagtgattgatatccgaaatggatagtaggatttggatttgaacccgacaagttcacaacaatgctccaaatgaagttttaccattctttccatagctaaaagaaatttaatgtaaaccagttaactgcaaaaacctcaaatagcagagttttagtttagaggaaggaatgatccatatattatttggaacggcaccattagaaaactaccattgatcttttcatttgtcaggaatggtcctgttgctaggaacttgcaaaatagctgataaaagaatatggcagagcaaattttgtgcattcagaattcagaaatatgcttggcaactaatagccagatgtagcactaaaatcacaacatgccaccaataactcatattagtaaaaacccaaaagatggccatattgtaaaataatgaggcatgagaaaggttgaatctggatagcaacagaaaacctaccttttattttaaagaaacctagcattgtcttctccttcaacatatttccaaaacagattatagccaaaaaaaggcacgccacaaaaaacacagggacatttggtacagggcttaatatgtagcatgcatgatttaatggaatgccatggctttagaataaatatctacatgaaagaaattgcagaagaacaaacatagatatatcatatatgaaaggaagagtagtcatattagtacaccaaaaagatgaccatcttgtaaaataatgagccatgagaaaggttgaatctggataagaatagaaagcctaccttttatttaaagaaacctacaattttcttctcctccaacatatttccacaccagattgtagcaaaaaaaaaaacgccacaaaaaacacagggacatttagtacagggtaagtaatatatacatgatttaacggaatgccatggctttagaataaatatctacacgaaagaagccgcagaagaacaaagatagatatatcatatatgaaaggaagagtagagaaagaaacggaatgacctgaatttttttttttgtaatatctgagtatccccaaccattttcagtgaataagtgtaaaaggtactacattctgtccataggacacactgaagtctgaaatttcataaaaaatgttcacctgcaatataagtatttgcccaatagatgcctcttatcactggtttctaatgtttaggtgtaaatggttgcctacttatactaattcaagtgagattaccttcacaccaccgagctgacaatgttaaaaaggtgaattttggcaagtccttggccactataaagactgcactcttctccttcgccgatgcctgcacacagcaacaaaaaactaatgcgaaatagcatatatgtccccttaaactggccctcagatgtttgttacacctacaaaagcagaaacttgatattgtcacatgctcacaggcatagcaacagtgtgagagacaattattacagtaaaataatcagtgagagagagagagagagagagatgtaattttaccatctatatttcatcttgctccagattcttatccaatcctcagaagaacttgtgaacttcaggagtttttttttttggtctaaatgtaaagctaatctggatgtgattgtagaagatgttatctaaatgactacatccagtcagaaccatatcgcaactggtttgcagcattaggggtgtcctaaaaaaagatgttctgattttcctatcatctgaatgttcagccacatcatcggtagccactaaattttataaaacaatttgttttataaaatgttctatgcttgaacaatatagatacgaaacagtatatagcatctagtatcatagattacatagctagaagaaaacacactgcataacgttgtgcagtttcacgcaggcattatctacatggaccaggcaatagtcagcaagagctgagcaaattggaagtctacctcctgagagaacaaagcatggaactttggcacaaaatcaatgcaccatctctggctcacaccattacatactgcttccaagtggatctccatgttgccatgcagctccgttgccaccacaaactgtagggaggtgtcgtcaccaccgtatttgccatcaaaaagctcaatgtcatcagctatacggcctgaccgagctgtgcatcgcaaatcaatgcctccaggaggcagcctgagcagctggagctcaacagtggcctcgacgcctttcgaaatcacggcgagcttcaggcgcatcattggagtagagttgttgccacaaggtacaatggacagctcattgactctggaccaatcgcgccgatatatactaggatgttctactactccttggatcagatcatggtaactgtgaatgccattacctgttctcttcatcttcaggttgaactcgagcaagattttaggattggtatgaatggctctccgagggctcaatgttggcagctgcaaaacaccctgcagagtaaagcaatatgcccatatagagctttcatcatttccgcttagagaataagttgtgaaaagatatgtggaagagatggagtgcatacatgttgtgatacgacagtgaaagggtggtccatttctctgttgaaaatgtaattgcgccgtccatcacgtaagtccctaatcgcaacgaaaccggatatgtcgagtttgcaggaatgaagagaatcagctacaatgatctcgagggcgtaaacttgcaacatgctgctgggtgaacaagtacaccactccaaacaaacaagtctaggatacaccttcctcttaggtttcaactttgctggattcaaagagttacttaattagcctggattacaaatcgggccaaagcaaacaataactagtatccagaactttgtcttagagaaaagaatgcatgatttggagaagaagtcttacacacgtgcatctgtttagttatttgaactgcaaagttaaggctccttagcgaagccccaagcagtaactgaattcctcaagttataaaatacacggagagatggttaaggaaaagtgcccgtttcattttttgagtgctaaaatatatgtctttctcccctatctacatcaatgttcgcacagtggcaattattacttgcaatgaagacaaaagaaagttgcctgtccacttagtaaaccagcgactactgctgattaagatatgttgtatttttatctatgttacatgaattggtaggaattttctatgtaagcactctatcatgctagttaatttcagtaccaatatgtattggtcctactaatgaccatttttttacccagtataacaacaaatcagcaaatatgtgtaaatattagtgctcatggaaatgcaattcagatgaatatagatgtgtacttacattctgatttgtcggacaaggtccagtagtatagtaacactgagtatggttcatgcattgggagctctgcttccctggtgctcctgctgcgtggctcagacatgaaataatttataccccttctcggttcctgcactggccgtatgatcggcgccatgaccagcttaagctgctccttgcgccactcctccctcttcctaatttcttcttcagttggaaactttggtacatatggttctgaaaccttcacccaatcagattcgccaggagattcaaacaataagctgtactcagcttctccttcccctcccactgatggttccccagatagggataactcattaagcctaaagtcctggttttctagctgttcttggtgatacagaagaccctgcacttcctctgcttctaatgcaaagattgcactgagtcccaaatcatgtcttctctttctgtcattgcggcatttagccggcaaagcttcctattgagctgaacaagcaaacttgaacacgatattgggttgttatcatcgaccctccattctagaatttggtgtgtccagctctctgctgaggtgcagggcaggaatgtgcagttgtcgtcatcatctccgctatggatgcccaccgtgattccactccacccagtaagaatgatgccatcgttgagccgtattggtacattgtctactaggaacttgaaactcaaaatctgatccacctgtgtgtgttcttgcggcaacaccgatagcattgccacaggtctcaacgtctctatatagcttctttgttctgtgaagccaatggtctctgggtccgaatagccttccacaaatcctactacttgaagcttcatcgtcgtcaatggcagaataaacctgccatcgcaggcaagcctccggcgcatgacgcgaggacattcctgctccacaaagttgcagcgaacctccccatcagtgcccattgatagtttgaaccttcggtgcatcgcttcacaaggcgattcccactgcatctccccatggcctagagggatgcaggcaagaggcatcatctccagctcctccctttccctgttcagctcttcttgcttcctcttctcctgctcttgtttctcctgaagcaccatctttttttgctcctcttgttcatacatctggtagagagtcctggccagatcctccaatgcggccgtaatgttgatgaaatcatggccgaccctagcatacaacttctcctccgtccaattggaggggacacggaaccatcgctcggagaaggcaatggtgacagttgagccgtcggggggcaggacgaagagcttgtcatggaggcgcaccacaaggcttgccatcctcatgttggacacgatggcgaggcggtcgcctccggcgaccggaaaccgcctaatgacggccacaaccctcaccggcacagaatcagcggcggcgagggctacgacctcctccctcctgctccaaggccatggcctggactcgaaacaggagagcgcgcccacccggccaccgtcctcttccagctccaggcgaggggacccgtcggcggcgaggcgggcgaagcggagggggaatccgccggcgcgctcggcggagaagcgaggggtctccttgcgcgaccacatggcctgccctctcttgacggagagcttcatcgtgaacagcaggtggcaacgacgcggcggcggcggcggcggcgtggggtgtctcgtcttgggtcgagcacattgccactcctccagctccggatcgcccgcttcccacggattgaacggcgcgagcagctgctccaattgacgaagatgaatctcctcctcatcctgcttttcgtgagatgatttctcgttcagatcgatggggatgtacaagctttcacgggcacgcacgtcggctgcctccattgcgtatgccggctgccgccgacacgatcgtatatggaacaatttttcagaggcgaatacgtcgaccggaaaatacctcgccgccgccgccgcggcgatcctgacactgtcgtcgcgtgcgccgccggcagccagaaaatctgggggttaataaatcagatgcatatacgcgcgttttctgttaataaaacagatgcctgcacggggattaggcaggttcgtgccggttcgggagaggagagagaaagcggcgagattggttcgacttctccgaggagttcttcggaaggggagtatgagaaaaaaaaaaaggtttactatgtgtcatatgccattataaattccgtttggaaatactacctccatcccaaaatatttgatgccgttgacttttttaaaaatgtttgaccgttcatcttatttaaaaaatttaagtaattgttaattctttttctatcatttgatttattgttaaatatacttttatgtatacatatagttttacacatatcacaaaagtttttgaataaaacaaatggtcaaacatgtttaaaaaagtcaacggtgtcaaacatttagtgaaggagggagtatgtcactgcagtttacgtgattgaaatcatactacattttaatagatgtttgagattacatcattgatgcaatttctaaatattttagaccaaaatagccttgtcttcttcctccatcaattatttatgtcctctctctaacctttcacctctagctacggtcggtcgtcgtccctatgcgacgcgtcgcacgcctccgctccacaataggctcatgcagcaagcggccacgacgctggaagagctgttatagggcacaaccgttggcggagatagaggggaccggtgatgccttcaaatccgatggcccgaccttgttgctgcagggacctcatgcctagagcttcgtcaccacacgacttggcgtcgttggagcaacaagcctgcggtgcacaggaagatcagcaccggttgcgatcctcgccatcgacattggctctagcactgtgaccagttatagcccgtggacgctgcaaccgctgctctcttccagctacacgagctcgctggaagagaggagagagggagaggaagaaggggatggatggagaaaaatggataatttggtcctaaaaatttgaaaaatgtaatgaatgagtaagtagtggtatatttcgaatatgtgtgaaatttcaatggcattgttctaatttcacaaacaataatagtatattttaaaacgggtaaatttataatgtcatagatccaattaagagagagagaaagtaggaaataacgcaattttccttcaatccaaagaaaatagtggaatcccatgaatgaacaaatatcagggcccctttaatttggaggaaaaacatagaaattttagaggatttcaatcatataggaaaatttcctatgaagctctttgaaacaaatgattgaatcatatccaatcctttgaaattcctatggaatgaacaatcctatagagatttttggaggaaatttagcaagagctccaacctcttgctaactttcctttgagtctatctctctcatccaattcctgtgtttttcctgtggttcaatcaaacggtcattcctgtgtttttcctgtgttttgcaatcctctgttttaaacttatattcctatcaaaattctacgtttttcctattcctacgttgtctccatcctgcgattcaaaggggccctcagaatgtgcactacctgcctctccggtcctttcaccccaatatctctttcctcctgaataaacgcctgatatgtttcgatcaagtgtttctgttggtatagccgctgattggccttgaatggactcgtgagctgtgcttattgtgactgaactctggagacttggagttgacccccaatttgttcatcggatgtgcatggaacatggggctactctactcattgcacgtccatccccaattccccatggatcaagcaaggaactactgctattatttcattgcagatcatgcagccagaccaccaccatattggcgctgatcgtttctgctggttgttgcagccagcaagctgggcatcctgttgcagcggtagaaaatgaacttgcattaggctggctgcagccagcaataccgatcagcgccattgattgcgggcgatatgactacaagaaaatatcgctgatcctctctctcacacacacatgtatccgaagatgttaccgtgaatcagaagtcatagggccgtttaaattagtgtcattttaaatcataccaatatttagtaaaattaaaaaaaatatagttgcatttagtttatgtactccttccgtttcacaatgtaagtcattctaatatttttcacattcatattgatgctaatgaatctaaacatatatatctatctagattcattaacatcattatgaatatgggaaatgctagaatgacttacattgtgaaacggaggaagtaccaaatagtgatagtgcataagaaattttggcacaacatatttttattctatactatcaaagtttgaaaattataccaagtaactaaaagttaaaatttgaaagattgatcttgacaattatctgaattgaacaggcacatacccactcaggaaacatctaggctctcacgccgtctcacggtccccacctgtcggcgaccgagcgatggaaggagcagcgagacggacggcacgggggcccgtcagggtggtccgtgcccaccgccacccgtgacgtttgctcgccatcgattgtgccggcggccgcaccgcccggctcggccggacacgtgtacgaccctccccgcgccgtgcggcctctgccactccccatcggacggtcggcctcgctccgcccgtgaccgtgtctttcgaattaaaggggggggcttccgccgaccgggcccgtccccccctgcccgtgctgatgggccggggctccgattaaaggaccatatttgcacataccaccctacactttctcgaaaattgtagtgctcgtactagtactggtttcttttgttgttctcattgagcattagcatgtgattattggctaatctctccttgtaaaccaaggatctgatgaagctttgaaaaagatccagatttgcagctggttttctaatcaacatggacatcgtaaggcgtgcacagctcttctataatgatcatgtccgtactactaccacatgtttaaaaattgtgttccacaagagacaccaaaggaaccattccttgcggtccagacccgatggcgattaaagtattaaaccaagaaaattaaaccggtcagtgaacctagcatgtcttttggcttcattgtttggcttattcgtggaaatatttgtaaactagaagtaatttattaataaaacttttatatacgtgttctcaggggcataaaagtaaagactgaaaactaaactttgataagaaaacctcaaaaccaggtttaaatttaaggttaaaaatttaaattttggctgataagtataaacataaacgaaaaaagataggtcagtttgtttgatttgaagagaattaaacaaaattaagggagagtaattccatatcacaataaacgtataataacttccctccaatatacttttcttatgctctatttccaatcttgcaaggaccctaatgtaaaagtttgcgagacacaaaaaaaaaatattttctttaactttcccatctctttcacaaatcacacacacccctcttaggctcctcctcatcttcttctcccttctctcgtcccctcctcccttctctcctaccgagtccagtgtcgaatagctagaggcgccggccgccattgctggcccctgcacgcgccgccccccctgcgccacggccgtcgccgccggcgggaagtgtagctcgccgccgccactctgcgcgcacccccttcgccttgctccgcccgccgccgccgccgccgccgccgccgccgacgccgaggtcgctgccggtgcccccgcgcgtgccctagccactccccctgccgcctccgcctccacattgccccgcccgcagctgacggagtcgccgccgtcgccccccgcgcatctggcatcgaaggcctcccaccctccaccgacgtcgctcggcttcgcggggaccctccggagctgtggccacaggttcggcgagggcgctgctgttggttggacgagctcgttggtggcctgatctgctcagtggcggtgcggggaggcacgacaagatccccgccggccggatcaggtggagattggttagatcttttggttggcatccgcggttgttggtccactcggtgctagccttggtacgctgcctcaaagccttgctgcggctatggttttggcgtgagaagctcggtggaagatgtggaaagggttcctcagcaagctgccccggaagacctcggcctctgggaggggcgccgacctcgactccggccagtgcagcaatggcgctgggaatgggaacccgatacagcgcaccagcagctgcggcagcatcccatctggccgctccacttccaccatcaagcgcatgtcatccgccatcttcccgtccagcgtcgtggctggtattgagccacttgtctcgttcaaggatgtccccaactcggagaagcagaatctgttcgtcagcaagctgaatctgtgctgtgctgtctttgacttctcggatccgaacaagagctcggcggagaaggatatcaagaggcagacgttgttggatctcatagattacgtggattccagcagttcccgtttctccgaggcggtgattgctgctagctctaggatgtttgctgtcaacttgttccgggtgtttcctccaaattacaggtccagttcatctggcggcggcgagggtgaagaggaggagccaatgtttgagcctgcatggtgccatctgcagcttgtttatgagctgctactgaaatttattggatcctcgtccctcgatgcaaaggtagggaaaaagtactttgatcactccttcattgtgaaactgctgaatcttcttgattcagaggatccaagggaaagggattgtttgaaaactattctgcacaggatttatgggaagttcatggttcaccgtccttttatccggaaagcagtaagcaatatattctaccactttgtgtttgagactgaccggcataacggaattgctgagctgctggaggtatttggcagtgttattagtggctttgcgttgcctctgaaggaagaacacaaaatctttctttggagagttttggttcctttacacaaaccaaaatcagttggtgtgtatctccagcagttgacatattgtgtgacacagttcatagaaaaggatcccaagcttgctagctcagtaattattggtttgctaagatattggccaataacaaatagtcagaaggaggtgatgtttctgagtgagattgaagagatcttggagacaatcagcacggcggaattccagaaatgtatggtacctttgtttaggcggattgctcaatgcatcaagagctctcacttccaggtaacttgcccaaataaatataacctatcgatgtttattttctgtttttgccactatgcatttccctcacctaagaaaaataatatataggtggtaaaaataatatatcggagtactacatatgaaagtagttgtggccctgtttgattgatcaattgccacgctgatgaattactatactagtcgctaactctaccgcttcacctagacattttattatataggtggtaaaattttatgtaaacatcactcagttgaaatggatcatgatcgtaaagctcacatggtatatagggtttttttggttgcatcatttatgtaaggtatgaaagcattacctgttgacttgccaaatggatgagataatagatgtctgatggtccgaaataaatgtggacaacaatagtgggccattatgttatcaactaatcatgctttgggcatggggttgctctgtactgttaatatcacaaatgtgagatatttggaccagcattaagaattgaagacatttgtctgccatgacagactaatgctttttatccaagtaattgcctcaacgagatgggttttttcaggttgctgaacgggcgcttttcatatggaacaacgataacgttattagcttgattgcacaaaaccgccaaatgatcatgcctatcattgttccagcattggaacataatagccagaatcattggaaccaagctgtcctgaatctcacagataatgtaaagaagatgttttctgagatggatgacgtgctcttttcggcgtgcctggtcaagtacaaggaggacgaagaaaggcaagcttcactggaatcaaagaggaggttaacatgggagaagctagaatcagctgcttctttccagccagtgacgggccatacagccgtcctggtaggccgccaaccctcagcaaatttgattgccacccttatttagcatgtgttcagtggaggtgaaaaattagcatgtgttcagtgaaggtgaaaatggggttcttcactttctggtgatgctcaccaactgaacgacttcagacttcactattttccccttatttcttttttatgtctgtattagtaagcagtgctgtaagttgtaactattttcgtatgtttatgctctgaaggcaaagcatgtatcgagtgcttaaactccttacctgtatctttgcctgtttatttatgagcaatttcctacgcctaaactcactcttcttctggtcatggttgctcaagcaacttctaatacgttgattcagtttggtagtatctcctaatgtggtattcttacaacctaaaagggcatctggtgtgcttgcaaataaaaattgtaagatgatctacgtaatgacccttgttgatttacatgccataaagcttccagtgtagcatttagctatttagctttgaagatttgttagtttacttggctacctgtgttttcttactgcctaaatgtgatcattcaatgtcttgtgtatttgaaaataaatacttcacttgaaatactgagatgcaaaagaagaatttgcaagataagaacatgaaaaagcctaaatgtgatcattcaatgtcttctgtatttggatataaattcttcacttgaatttcctgagatgcaaaaaatgaaaaaaagattccgttgccgggactcgaacccgggtctctcgggtgagagccgagtatcctaaccagctagactacaacggattattgagtattttttcatgtatagttatattcactaaggcacttcacaaacaactccgtaaaagttatttttctaccgaagtaaatgtaaatttcaatgatatggtataatttttacatattgccaataaattccaggagaaaaatcattgcatgcttccgtgttcaacagtgcatagcaggtagtacaacttgatcgctgatcacatgcagttagtgcatcacgtgtgcactacaatcattttttccactggggcagacgttggacgacaacctgcgaaaataaataataataataaaaccgtttaaatctcactgaaatcatggtgaataaatgcattttcgtgggccaaattttgggtgataagcatgagcgaaaagacccttcgttcttgtggtatacttgtagtcttgtactgatttattcacaaaaaaaaaagagacattttcataaggactcttttggagtagcataataatgagaatagttcaacgtgttaaggaacatgccttgccggaattttctttgtttccaacaatagtctgacaagcaagcctccatgactccggtttctggcatatagacaagaaatacaaatagcagtcaattggcagctgttttggtgtaatcagaaaagcatatagcaacagaaagttcagaaaacagggaagcccagaaacagcattgcccaactgaaaaaaacctgaaatggaatgcttggtaccttcttcagataccggttctcagtgtttgttctttcattcaggagctccttgccatcaactatctgtgtcacattgacaattccaagctgtggttaactaatccagctacagtttaaagttgcatagctaatatcctagtaaggtgaaatgtttcagagtcgttttcagaattcagaccatgaacacaccatttgcaggttcggccaagcatcgaattgaggcaagaactagagatgccattggttaggcaagagagagtagggtacctcgacgatgcaagtgccgcagctgccgccgccgccgcagttcatcaccttcccctgcaaaaacaacaaaacagcaatgcaactctctctgttacactgcagcttggctagaagcaacctgacaaagtgacaaccgtagcaaaaatcttcagagaaatcgaggcagggcgagagggaaactcacatatgccgcgtagagctcgatcttgttctcgaccatgacgtcccggaggagcttctcgccgctgcccgccgccgcccggtccaccgggaacgacccatcggcatccgccttcggctgcacatcacccaggccatcacacatcataagaaggcaaccccaaccttccccatggcggggacaaccagccagtgacttactccgacgaactcgaggtcgatttggggcttgggcggcggcgctgcctcctccgcggaggcggctccggcggacgcgttcggcgaggcggcgttggagcacctgatgcgggccgcccggaaggggccactgccagagctagccttgcggtggcctcgggtggagacgacgcgggaggaagggatggccagcgagaagagcgccgtggaggtggagctcgtggccgccatggctttccttccccttctcttttggcgagcacgtggcctcgaacgagacggtttttttttatcggcaggaggcgcgtccacggtggaagcctcgcgcgccacacggttggctgcgttgcgtcgcttctcgcgggcttctttccgttttctctagggcccaaaccaagacgaggcgggccgcatcgttgccgtgggccagcgcacgcgcgtcttcccgttgttgggccgcgtgcatgcgcgaattgagattggaaaaagtacaccgaaggtccctcaacttgtcaccaggatacaaaagcgtcctgaaccgcaaaatcagatatgcgaggtccctaaactacacaaaaccggtcacctgaggtctttggtggttttgactccggtagtcagcgtgggacccacatgtcagcgtgccacgtctatgtggcgttctcttctttttagttatctttgctgcgggggagtagcatcgggcggcgccgcgcggggctgagcggcggccggcggaggcggcgtgcgatgggcggctggcagagagcagatgggcgcggcgggcgtgggcagcggccggcgagggaggagctaccaccggcggcggcggcgtcaccgcgatcccacaccttacccctccacctccacctccgccgctgatgtagcaaacatgcgcacgccgcactccccccatacacaccccgaacgcggcgcccgacgccgccgaagacgacgcatgctgacgccgctgctgctgaagacgacgacgactatggcgacgggttcgaggaggaggaggacacgcacctccgttatggggatcgctggtatcaagcagcaagcatccatcgtcggcgagccaccgtccgtcggtcttgtcatcccatcagctctcccgtcagcaacaagcgcatcttcatcagcaagcagcgagcatatccagatccacaggcaagccgcaagatccaacgccaagctgttaaatccacagacaagaagcaagctagcagcaacaagtagcaagtgttagcttcagctataatcctgtgccatattatcggttactgtaacgcgtctagcgttgtcgtttcttcagtttcgtcagagtctgtttctctgttttttttctcatgtaagccgagtcttccgggtcgtgcgtcgtgtgcgagtcatccgggtttcagcgtcgtggtcgcgtcatcgtgaatgatggcgtagtggtgttaatttgagtctgtacaaattggctatatatatgagcatcagaaaagtcacagcgagtaagcggcaccaaaaactctgttcgtgttcatcgttcttccgagaccagtgaattcgcgtgagagagagatagtgagtttacacaaatcttgggcttggctttcatttggtatcaaagccatgtccgctcccaccggcggcacgtctcgtactccccggcgaacaggccatcggctctcgccgtctcctccacggccacgcaggcgacagctcgtcgtgcagcggatcgttaaggaaggcggctcggtctcctatccaacgctcacacgctcaaattactctgattgggcggtgttgatgcgagtcaatctccaggctcaaggtctatgggatgctgtcgacaccggcgatgtcccgtatcaggaggatcgccaggcactttcggccatcttgcgagcggtgccggctgagattgtccggccgctcgccgagaaggacagtgccaaagacgcctgggacgcgctcaaatccatgcgagtgggcgcagatcgtgttaaggagtcccgagcatagaagctgcgccaaacttttgagtccatgcgattcaagaatggcgaacacctggaggatttcagccttcgtctccagggtgttgtcagcgatcttcgtctccttggagatgatctgtctgaagagaaggttgttcgaaaaattgcttcgcgtcgttccccggaggtatcgccaaatggctctatcgattgaaaccttgattgatctgacctcgctttctattgaggatctgactggccggcttctcaccgtcgacgatcaccccgactctgacggcgaggacgcgggtcaggcgctcttcagcgaaaaggaggcctcttctcactcaaacaaggaagctgggcataactcagccggggggagcgcgtccagctcgcggcaaccacaccgcagtgggcgcaggcgcgacggcaacggctccgacggcaagtcgggttcgtcccaagcggcgagccgcaatgtgtccaaggacaaatgccgttactgtggcaaacttggtcactgggccaaggactgtcgcaaggcgaagcgagaccgcgagaagctggctcaagcaaatcttctcatcgctgagccagctcaccccgcggacgaaggggagccgacactcctgatggcgcaagtgtgcgagcttgcccctgctaccgattctgtcattactgatggggaggtgacactgaacgaggaacgtgctcacgtttctcttcgtgatgaaggagagcccattgatccagactgaatccttgacacgggcgcttcaaatcacatgacgggctcccgtgatgccttctccgagcttgacaccaccgtgcgcggcactgtcaagtttggtgatgcgtcgagagtccggattaaaggacgaggcacggtgctgttcgcctgcaagaacggcgatcactgcgcactcacaggtgtctattacatccccaatcttcggagcaacatggtcagccttggccagcttgatgaggcacgttgcaagacggtgatcgaggatggcgttctcactctgcgtgattcacagcgacggctgctgtgtagggtgcgccgaggaactgggtgcctctatgttctccacgtcgagctggcgcaaccggtttcccttctcgcaaaggggaacgatcaagcctgggtctggcacgccagatacgggcacctcaacttcgacgcactccgctcactggcgagccgcggcatggcgcgcgacattcccactctggagcgggtcacccaggtctgcgatggctgtctaataggcaaacagcgacgagcgccgttcccaacagcggcgttgcatcgcgccactggtcgtcttgatctggtgcacggggacatctgtggacccatcacgccgtcgacacatggcggtaaaaaatatttccttcttctgattgatgatctaactcgctacatgtggctgtttctgctaacatcaaaaagcgaggctcccgctacaatcaagcggttctaggcaggagtggaggtggagaccggctgcaagctgcgcgttctccgcactgatcgaggaggcgaattcacctctgtcgagttcgggctatactgcgcgaacgaaggcgtcgctaggcagttgatggcgccgtactctccacagcaaaacggcgtcgtcgagcgccgcaaccagacggttgtggcaatggccagatgcatgatgaaggccaagaacatgccgggggagttctggggcgaggcggtcacaactgccgtctacatcctcaaccaggcgccgacaaagagcgtccgcgacaaaacaccattcgaggcgtggcacggtcgtacacctgctgtgcactactttcgcacatttggctgcatagtctacgtcaaggaggtgaaaccacacatcaacaaacttgatgatcggagcaaggcgatggtctttctcggctacgagccgggttccaaggcgtatcgtatctacgacccggtggccaagcgcatcgtcgtgagccacgatgccgtgtttgacaaggcagcgtcgtggccatgggcgtcacccggggaggaggatggggtggcgtcttctcaggaaaccttcaccgttcgctacgaggtagcggcggtggaagtgccgtcccgccactccgactccatgtcgtcgccggctcactcgggaccaccggcgccatcaatctctgcatcaccgggcgtcccagcggtcgagttcgtgtcgccgcctgcggaaacgcctgatgtcgacgacgacaacgtagggccacgtcgtttccggacggtggctaacatcctcgacactacctcgccaattgagctcgattccgacgagcttcatctggctgctgccgaggaaccaagtaaccacactgaggcggcacaggacacactctggcagcgagcgatgcaggaggaactaaagtccatcgtggagaacaacacgtggactctcgctgacctccctgctggcaagcgtcccattggcttgaagtgggtgttcaagctcaagaaggacgagacgggcgtaattgtcaagcacaaggcccgactggtcgctaagggttacgttcagcagcaggggattgatttcgacgaagtattcgcccctgtcgccagaatggaatccgtgcggttgctactcgccattgcagctcaccttgggtggtttgtgcatcacatggacgtgaagtcagccttcctgaacggagagctggaggaggaggtgtatgtcgcccagccaccaggtttcgtcgacgacaagcacccacatcaagtcctgcgcctgaacagagcactttatggcctgcgtcaagctcctcgtgcctggaacgcgaagctggatgttagtcttcatgaactcgggttcacgcggggcatcacagaacatgctgtgtacacgcgcgggaccgggaacgcgcggctaatcgtcggcgtctacgtcgacgatctcatcatcaccggcgctcactctgaaacaattcaaagtttcaagggggagatgcactccctattccggatgagtgatcttggattactcagctactacctcggcattgaggttcatcaaggcaacgatgggatcacaataaatcaatccacttacgcgcagaagctcttgaagatgggtggcctggcgggatgcaattcagcttgcgttccaatggaacccagattgaaactgacgaagaatagcgatcgaccaagtgttgattcaaccttttatcgcagcttagtggggagtctgcggtacttggtgcattcacggccggacattgctttcgctgtgggctacttcagccgtttcatggagtcgccgcgcgatgatcatctcacggcggtgaagcacattctgcgctatgttgcaggtactgtgaactacggttgcaagtttgcacattcaggagaagaggggatccatttgctgggattttccgacagtgatttggggggagatgtggacgatcggaagagtacctctggtgctctcttcttcctcggctcaagcccggttgcatggcagtcccagaagtagaaagtggtcgctcttgcctcctgtgaggctgaatacatcgccgccactggagcggcgtgcctcggcatatggctagctcgattgctggctgaagtgctgggaagtgatccggggaaggctctcctcaaggtcgacaacaagtcggctatctccctgtgcaagaatctggttttccatgaccggagtaaacacatcgatacaaggtatcattttatcaggcaatgcattgaggaaaaaaaggttgaggtggagttcgttccttcggacgagcaggttgccgacattctcacgaagccactcggacgaatcaagtttcaagagtttcgcagtaaggcgggcgtcgtgcagattgtcacccggcgacaagattagggggagtttgttagcttcagctataatcctgtgccatattatcggttactgtaacgcgtctagcgttgtcgtttcttcagtttcgtgagagtctgtttctctgttttttttttcatgtaagccgagtcttccgggtcgtgcgtcgtgtgcgagtcatccgggtttcagcgtcatggtcgcgtcgtcgtgaatgatggcgtagtggtgtcagtttgagtctgtacaaattggctatatatatgagcatcagaaaagtcgcagcgagtaagcggcaccaaaaactctgttcgtgttcatcgttcttccgagatcagtgaattcgtgtgagagagagatagtgagtttacacaaatcttaggcttggctttcagcaagctcccgctgtcgtcgtccatcaccacaagcagcagcaagttgtatacgccctcctgttcgtcttcaacagcatcagcaagtcggggcccccaggccgccgtcgatcgctgtacgccccgcgccgatctccgcccgcatgcgccgtcgccccgccagtttcggagttcggacgcgtcggcactccgcccgccgtcgcccctcttcgcccgcatgcgccattgccccactccgcccgttgccgccccgccggcttcgcgcgcgtcgctgctccgcccgccgtcgccccgcttcgccctccgtccaagatggactgtttcttgtcctccgtttgcacgccacttaatctctaggtacacatcgatgatatagatagatgctgctctgtgtggttgaggtgattttgatctttggttggatgcttgatgtgctcagttcatcgacgtggcgtcaaggtggagcgggcgaccacgacggcggcggcggcaaaggggggcgccgctggggaggatatcgcacgccggggcaggaggcggtggtggtggcgcgcaggaggagaggacgatactgaaggggataaccgacaaggtgaggccgtgggaggtgctggctgtactgggaccatcggggagaggcaagtcgacgctggtctccatcctcggcgggcggctcgccggccggcacgccgggatggtgctggcaggcgggcgcgcgccgtgccgtgccgtgcagcggcgcgcggggttcgtggcgcaggacgacgtgctccacccccacctcaccgtctgcgagacgctcctcttctgcgccatgctccgcctcccgacctccgcgcccgccaccgccgaggccgccaccgccgaggccgtcatctccgagctcggcctcgcgtcgtgcgccgacaccatcgtcggcaacgcgttcgtccgcggcgtcgcctcttctgcgccatgctccgcctcccggccgccgcgcgctcgcacgccgcctccgccggccgccgctcagcacgctgggcgccgcccgttgctactccccgcagcaaagagaactaaaaaaaagagagaaaaaagaaaggggaaatttgacgtggcacgctgacatgtgggtcccacgctgactcagccgccacatagaccaagatcggtgttaaaaccaccgaaggaccttaggtgaccggttttgtatagttaagggacctcgcatatctggttttgcggttcgagcctccacatagaccaaaatcggtgttaaaaccaccgaaggaccttgggtgaccggttttgtatagttaagggacctcgcatatctggttttgcggttcgaggacgtattttatcccgatgacaagttgagggaccttcggtgtactttttccaattgagatgggatggtttgggccggttcttccagcccattcagatcgagttgcattgaccaaacccccgatgggactagctaatcgtttcaaattcagcggcatttgtgcctacctgagtgctaagtatatggtgattctctgaagatactccaagatattcttctcggcaatcgctgcctgagaaatatcttcatgtcagctagtggcagcgaagagcacattgcatggcgtcatggcgatgttgatatgaggcaagcttaccacttgctgcatggcactatgctatattgctatgccatctactggcactgtaacacggtgtctttttgtcacaaacgacattgatcccaacctgaacaatgctagctgcgagcctgcggcgttggccagcatcaggccggagatgatgcacatatatggaacaatccattgatgatgtgcacgtgtttgtctgcaaccttgcgccagtgttctgggtgacggttgtacatgcatatggtcgatcgagccggccagaggtggtgaatcttgaagatatttggtgatccgatccgatccaatgcagacacttttcatcttatcatcatgttctaatacattgacgtgtaatccttttaacgtgttcgcgaaatcttcatcatcatggggtgcctaattcgatcatgccgcgtaatttatcaaaacttctacaatattgttcaggacaattctcaactgatcgatttcaatggaacatatacatgcatgcatgctaaactagctaaagtaaccaacatctcatcatctagctagattcttcttcctcttcttctgaaggatcatcatcatcatctggattctggatggggaagaagatcacttcctgctcctgcatgcatggatcaaaatatcctgcagggttatggataaactcgaggcaatgactggctgttgcgtagccaattgtcgcagcagccaccactgtccactgctgacacgaccggccggtgttgggtaccaacgacagcagatgattgtaccaccacattggttgccatcagttcagtgcattctctcgtcaacctggcctctctttcacaggcagcacaccgaatcgcccagcaactagcacaccggaaagaaactaacttaaccttcagtaggagtcatgcattgacgtcgcccttgatcgctagagctagctgcaactcaaggagaaatggaacacctcaagcagcttttgtagaaccaatcaatatataattgtgatcagtttggatgtaattgcgagccagggcataaacgtcgccgcacactaatacactatcatattctaatgcaggagttgcagaatattaacccattgatgccaacttggattattctgtaagtaatatgcacgcatgaacgtgtgttagttttgtaaccatgtcatgtcatgtcatttaaagtccaaattaacaatgtgtgacgcatcaaaaaaaaaaaaacaatgtgtgattccttcgctatatttgtgggcggacgcaggctagtcgaaaccgtgaagggatcaactgatggcgaagttttagatcagtggatatttgcatgattaattagttactcgatctgacgacctgactttgtcgttgcaaaggttgcagtagaacggactaatttttttctctctttttttaaggaagaaaatctgggctggatgatacgtacactatatccactttactttttgttatggccggaccttgaatctatgggaagattttgtagctgcagccaactgtttaagcaatgagatacttgtctggtggttgcccactcagacgtgtccaaagatgaaaatgatatgggatttcatggcatcttctcgatcctaatatattgacaggccaagctttaatgtgatcgtgaaaattaaaagatatagaatattgtagctcgatcaactataaatgagttgtcaaggctcaacaataggctgacatggaaagggatcatctaacttaattattatgctgttaagtcactgccatgtgagccgtaaaaaagtgaaacccacatgttaattattgggggagtatctccggatcaaaggaagctagcctccgaagggctgcagcgctccggagaaccatcctccccgggagatgaccgtgagtcatggccatgtcggtctgcagatggcccctcactccggaagcctcggggatccgattcggatcccacagtgcgagaggagcaggacctaagcaggctccggatgatggccgcccggctccgggaaagctccgggaggtcatagcaccatgggctccggtaccaccaaaggtgactgggctccgaagcccagaggggttcccaaagtctggaaggagagctccggaggctaccttagggcgtgggagctccgaggggcccctaaagcccgatatgccggccggagcggatcatatctcatgtgctctcacaagacaagccaagaaccaggcgctagtggacgtgaataaatgcgtactacgcgccccaactaactctgacactgttgatggctgccaagcggagcacgctattacccaggggatgcctttacccgggtaatagcgaggtcgctcggaaacagcggtgcccccatgctgggggcagcactcctgtcctctgtcaaattaccgctaggaccaaggtgggcccaccggtaagtcgcataggcatatcataaggatagggacactgaggccttttcctcttatgtatccatgtaaataaatacttcctccgtcccataatacttgtctttctagcatttaaaaattgtcccaaaatagttgtcattttgaagtactacatgtcacatcaaccatttccaattcaaatttctccccattctacccctaaccaccattccacatccaactatccattattaattaaggggtattatagtatttttcttcaaaatattagtatatgctaaacaacctataacgacaagtattttgggacggaggtaggatgtaaatatcacccatagagggcagattgaatacatgagagaaattgagacacttgttgaattcttgcaacaacattaatgactcaactatatatatgtgtctcagactcgttcggtctaacgtatatatctagtggtatttttcaaactctgaaacttctatggtggtgtttatgcccgaatgtctttatttccttgtttttctcatttatgatcatgtatattttagcagttttaaattacttcccattttagattttccataagttaaacatgtctatctttgactaccaacatctacaaatctaaaaaaaaatagtttgacaacatgtgaagtatatattatgaaatttttttcaaggtgaatctaaaagcatactcctaaatcttatgatgttaaattatataattttttagaaaccggtagtcaaaataaatatttgacttaagatatataggtaaaactataacaagaagtaatttgaaacaatttttttggattgatcctatatatctatgtgcagtaaatgtatactctgtatatgatcgattgactatttgacttgtaagaggatgtatatacccctatatatctacttgtgaattatactctatctattgactacagtgtctcgaaaaaatgtcatgcatgcatagacatgaccactagataatggtggaaaactggaaataaatcagttaatactgccatttatgaggcttatgtgattagaggacgcgtctgagaagatagcgcgattatgacatgctgatgaagagagatgcggcatttagcaggcgatttgtacttccttccaatccacgtacccaatagataagacgttgctgaatgctgatcagcaccgggcggattgtccaattaattgtcctcttttggctttcatgttcaggttgggtaacactaggaaacttaaagaaataatctggaccggtgatcccgaagatcacagtacgtacatcctccgataattttctgaatcgtagttaaacatgcgaaaataattgtaaatcaaaaacagaactcgaacttcagaaccagcaatgttataactcaactgttcaatcaaagaataggttgaaaatgacaaactgatcgagcatcataaggattttgacatatgcatgtgtttattggtatttccagtgatcagatacaagagaagtcattgcctcattggcatctagagttgaaaattttaatgttgaatacgtctagagaggaaattgcattcttacttctattatctaaaaaacatctgctaagttgacaatgacgatagctacattttccgtttgggatgtgattatatatatgtgcatatgcagagaaaaacctctatgttcttaccacacttattgtcatttttcctgtggacaaatctacccattggttctggagccattagtcgggttcgatgatctgtatcgtgatataaacaaacgagagaaaaattataaatagaatggtacatgagtcatctgaattactccctccgttttaaaatgtttgacaccgttgactttttagcatatgtttgaccgttcgtcttattaaaaaaaattatgaaatatgtaaaactatatgtgtacatgaaagtatatttaacaatgaatcaaatgataggaaaagaattaataattacttaaaatttttaaataagacgaatggtcaaacatgtactaaaaagtcaactatgtcaaatattttgaaacggagggagtatttaactttcatctttgtaggttgacgacatctatatctagtttctgaaatgttcagaactaggagcacccctgcacttggtttctcaggctaaatcctttgttctgtagcgtttcagagtatgatctcacgagtagcatcgtgcacatatataaagtagtaacatgtttatgatttttaatttttgcagagatcagattcctggtcccattcttgccgtgcttgacacatactcttctggaggcagcggattcctgtgtagctaggtaggctgacctgaatataccagtggatacgtgcagacaacgagcaatatattaatcgtgatagtggcaaattcaacgctttcacctctcactaatcgcagttgcaacccttcaaatccctttcgttcacgtcaactctttgggtgctactagtggtcgagaataaggggatttaagccaaccttgcttggtcaattttgtggatcacggtaatgcgattggttgactacttaagcagttgtggatacgtcttggtaactatcatgtgtaaataaagttaattacttcattaccgacgaactaataatcaaggtgtagcttgcaattgttaaggcttaaattatgtgcaactgattaattgacatactaattctttgtgctcggtagcatgattaatcacattgattcgagcccagaaattattgaagacctctctctatcttcccttttattttatttttaaaaagaagcaaattcttgaacttctcatcttaggctttggtttagcattcaattttgcagagaagcgttgttttgtccatagaaatttgtcatgaatcattgtctttccgttgtcacaagccgttgttgtaatctgcaaggagatatccttgataggacagtaacaaggggtatatagggcatgtttagattgatgcccaaccaaaattttggtagtgtcaaattttgggcaagttttggtactatcaaaattttagtagggtagagttgaaaatgtttatttggattgaagccaaaatttgcccataagagacaagttcataggcaaagccaaatttatggcactggtagagttttagtagagatgtttggtttgctaccctaccaaaattttggtagggcaaattttggtagggtagcaatttaaattggcccataattttaacttcgagatcttgtatttaatccctaactcgctacaatttatacttaaaaagtatttagaagtacgactctcctccaaaatctcctcctgtttttgttgtcgcctgcacgagtgcacgtgtcagcttgctggtgcaagcgatcaatcggtgaccgcctgaccagccggatcgagatcgatcagatcaggcgccgcttgcgcctcagctcgagccgagcggatagcggcgttgtcctacgtgcaaatggcgctacgcgctaatgaacaaagaacccaacaaatccaacgcgacagccggatcgatcgccgttaaacttgtggatcgataagatgatgatgatgagaaaaggtgaaaaacaactgggtttcgccgcctaattgagcgcgcggctttggctccccgcgcccgctcgcctcatcggcatcgccgcatcgccggctgtgcctcgctgtcgccgtggcccccgccagccgctccccgtttccgcacgtcgctctcggctcgctgcagctgagctaaaagattctgctttagctgcgtcggattacgggctttgcggtttgcgatcaacaccctctgaagatgtaaattatcgcgcattttgcccatagttttttttcctcttgtgagggttgatggaagattgtgagcttttgaagtctacattgtgtaatcttcatataactgtcatgcagttctttgtaactttggatgacagtatagaaatatggttcaataattatgtgctttttatcttgtgttgatgttcattcctttgtgtttgctttaattatgggagtgttttttaagtttactttgagatacactcgcttcaagtaatttgatgtaataattggctgtaactcgctaggtaaaggccgggatgattttatattccataattagaaaaaaaaacttttttcaccacctgcagactgcagttacatttcctaccaaaatgcatgccatttgataaaattcttagttataataaatttaggacggaggagtataatttatagcatactgtagaaattttttcaaattatgatatgtccctggaagtatttgctgtaaaacattggagtcccccctcccggccatgttgctttagaaaaaaaaacattgatgccacctacaaggctacaacaagaatcaacgaagaatcagagggagaaaaaaaaagaagtccaagaaaataccacacgaaaatctacgggaagatagggggtggtagcggctattgcgggtcccacacaaaataaccctataaaaatgagggcgcgtgctgctctgtagaacttcagagcagagagagaagaagcgatacacactacactaccacgaggtggagaggcgaagaagccgagcgatcggagaggggagaaagcggccggcgagccgcagttcgccggcgatctccatccatccgaggtgaagaggaaacgacagttcaaatcttccacagaatcgtgaggtataggaatctcagctttgtttgtttttacggcgtgatctgcttctactacgtgtgttcgtctccttttctgttcctcttttcccggtagatttctcggtttatccgaggagttgttggtcacttttagttatccgtaatacggagtagtacttatcttggttttatctaagatgggtagaactagacaattctgaactttctgcaagctaatgtgcagttctatattttaaaaaaaattctaatatttttttataatttaattaactacctttgttattatctctaacgttttctgttgcatttgcaaattttgtgtgcagatttaaaatagcagttctactctactagtagcggaggcattcgttcccgcgcgggcaatgtcggcggcgcagggccttgcgctgaagctgcgcgccgcgccggcggcgggtggcgtccgcggggagaagcggcgccgcgcggcatcggcgaccgcggcggcggcggcgcggcctcgccacggcgccatgtcgctggagggcgggttcctcggcggcgcgctccccgccgaggaccgggtggcgccgcgggcatcggcgtcgcgccaggcagaggcgggggctggggcgggggcggcgcgtcctcctcccaggtcgatgtcgaagatccccgagagcagcattgggctgtacgacccctccatggagcgcgactcctgcggcgtcggcttcatcgccgagctctccggcgagtacagccgcaaaacggtgaggtttccgcggctaagcacggcgctggagttgattgttcccgtgcaaacaatcgaaacccccaacgcggcgtgaatttctgatattctgaaattgttctcggttttgcaggtcgacgacgccatagagatgctcgatagaatggctcaccgtggcgcctgcggctgcgagaagaacaccggagatggcgcaggcatcctcgtcgctctgccgcacaacttcttcagagaggcaaacctacttgaagttttaagccgagaaatatgggaattttctaccgctgggggaatcatttttttttctgcctgtttttgtttttttgtgttctgacaggtcacgaaggacgcaggttttgagcttccgccgcctggtgagtacgccgtcgggatgtttttcatgcccacagatgacaaacgccgtgaaaagagcaagcttttgtttcgtgaggttggtgaccaagcagaacactagaacagttcagttcaatcctattgtaactgatatcatgataccattctcaatttcgtgttgtatctttggatttgtttgggttcatgcagaaagcagagttgctggggcataccgtcctcggctggcgccgggttcccacagacaactcgggcttgggtcaatcagcggtagatacagaaccagtgattgagcaagtgtttgtcaccaaaagtgcaagttcaaaggctgattttgagcggcaggttatttgatgagccagcacatttgaactttatggatttcatccgtagctgttaatttttccttgacttgttcttttgttgactgcaactccagatgtacgtcctacggaggttctcagttatgtccatacgagaagttctaggcgtcaagaatggcggaacaaaagatttctacatgtgctctctatcttcaaggttctgtgttaccatcccattaaagaatgtggtttaagtttccaaccttgggtaatttgaagcgctagccactaaggatttcagttatctgtattaagcaacagtaagctgtgatatggaataaaaaaaaacatgtttcagaaatgcttcattttgataacaaggaatagaagaaaacttttggatgtttttttttcctttgtgatttgatctcatctgaagtgaagtttgatttggtcacatgtgcatgcattccattttctgccaagtaattatttcctgaaattcggttttttacaggaccattgtttataagggtcagcttaagccaagccaactcaaggggtacttctttgcagacttaggcgatgaaagcttcacaagttacatggcactggtaagtgaataaccatttcaatattgtctgaacaacaaaatccatgatcatagtcagaagataggattactagcagcaagatttttgtgaggatatataatgcttctaagcaggcatcaaatatcctcttttcttttattaatattaatatgctatttccctcctgtttcgtgatgcctttggctgaagctgtagaaactgaaactgtgtcagctgatgcccaacaaaaaagacacttcagaatccttgtgtagttctgctattaggtactgctttttcagaatgtgtatcctaattaggtggtttgaacaaactttatttggcttgaggtagcttaggttctgaaactgttttacatggatgatagcatatggagcaggattcaaggatagatagtactggcctactgggtattcatatgaaaccatattgcatatcatttatatgtagttgtgcaaaagatgaacaaggtatagtttaaaagttatgcatgcaaacagatccactcaagattttccacgaacaccttccctagttgggatcgagcgcaaccaatgcgtgttttggggcataatggcgagatcaatacccttagagggaacaagaactggtaatttcactaaacacatctctcatcattttcttgtgagcaagaatcttcacatgcctatggaccatggagcttatatttatatgcttacttgcacttttgtcctatttccatgtttggtaggatgaaggcacgtgagggtctcttgaagtgcgagggactaggtctaacaagggatgaaatgttgaaacttctgccgatagtggatgctacatcttcggattcaggttccattcctttatcataatttacacatgataaaaataaaagcagtagtttgctgctagctctgtctctgaaacaatgtgtgtgtgtgtgtgtatgtatacatatatatattgggaatacgtgagacgcacatttttgtattaagagaaataaatgtgtatatttgggattccatatcccttttcacctgtcaaatggaagtatggccatctttgcaaagttatttattgaattatcttgtgaattcaggtgcaatcgacaatgttcttgagcttctcatacaatctggaagaagtgcgccagaggctgtcatgatgatgatccctgaggcgtggcaaaacgatgttaacatggaccctgagagaaaagctttgtatgagttcttttcagcacttatggagccttgggatggaccagctctaatctcatgtaacaagataaaactaaactctcttcttaatattgatgcatgcattatgatagataagtatcaattctgacctggtcttcacgcacagttactgatggccgctaccttggtgcaacccttgatcgtaatggtttgaggccaggccggttttatgtgacctacagtggccgtgtaattatggctagtgaagttggtgtggtcgatgttcctcctcaagatgtttcaagaaagggtaggctaaaccctggaatgatgcttttagttgattttgagaaccattgtgttgtgaatgatgatgaattgaagaaagagtactccaaagttcgtccatatggagagtggctgaaaagacaaaggatacaactcacagatatcatagaatctgtaaatgaagcagagagaattgcaccgagcatttcgggtgcacttccagtaagttaattatcttgctaacttttggagtgtcctgttggttagtaatttaccatgtaatggtgaggtattttatggatttttcacactttgctgcagattacaaaggagaacaaagcagatatgggtatctgcggaattctgactccgctgaaggcttttgggtaagcaacagcccaatcttagtatgtttcttctcatcctccttgttgaaaaattacctatttggttggattcaggtatacaagagaagcccttgaaatgctgatgctaccgatggccaaagatggacaagaagctcttggatcaatgggaaatgatactcctctagctgtgatgtcaaacagagagaagctgacttttgaatacttcaagcagatgtttgcacaagttacaaacccaccgattgacccgatccgggagaaaattgtcacatctatggagtgcatgattggtcctgaaggtgacttgtctgaaacaacagagcggcagtgccatcgcctcacgcttaagagtcctttactgaatacaaatgaaatggaggctattaaaaagatgaactaccggggttggcgcagcaaggtgcttgacataacttatcctaaaaagaatggcaggatgggcttaaaacagactttagataaaatttgtgctcaagcacgtgaagctattcatgagggctacactattctagttctctctgatagaggtcagtaagattcagttacaccagactcactaagcatgaattttatgatccatgaatttatcatcatctagatatagattcatgagcaatagtgttagtatgaaatcaatattctccccaaaatctttacttttgagctgaattcaatattgtgttattgtggtatgaaagatatcaagatttttttctatacagatcatgaataagtatattttcgtaacaacatgttaacagtcaacatcttagtttcatcttaggttaggtcgtacttagtttttcttgctcctcttggatcatgtgtcaacatagctcagcttttcttcttttttttttttttgcatccaagctcagctttcccaagcttgtcaccatgatatgtgctctgcatttcaatgtttaattctcaaaattaacttgatccgtcatctgtagcatttggattaaaacatttgctttaactagaagtttccatacaggtttttcttcagagcgtgtagctgtcagttccctattggcagttggagctgtccatcagcaccttgtctcacatcttgagaggacacgcataggattgttagttgaatctgctgaacctcgcgaagtgcaccatttttccacccttattggatttggtgctgatgctatatgcccttatttagctatagaagcaatatggcggttgcaaattgatgggaggattcctcctaatgatgggaaaccttatacacaagaacaacttatcgagaaatatttttatgcttcaaactatggaatgatgaaagttcttgcgaagatgggaatatccactctggcatcttacaaaggtgctcagatttttgaggcccttggtcttgcttcggaagtggtcagcaagtgttttgaaggtactcctagtagagttgaaggtgcaacctttgaaatgcttgcacaagatgctcttcgtctccatgagattgcattcccatcaagaactttacctcctggaagtgcagatgcaaatgctcttcccaaccctggggattaccattggaggaaaaatggagaagtacaccttaatgatcctttttccattgcaaaattacaagaagcagcacggattaacagcagggaagcatacaaagaatattctaggcgcatttacgagctgaataaggcatgtactctgcgtggcatgctgaaatttagagaaattccaaaccaaatttccttggacgaggtagaacctgcaaaggagatagtgaagcggttctgtactggagcaatgagttatggatccatttccttggaagctcatacttccctggctgaggctatgaacacccttggaggaaaatctaacacaggtatctcgcatcatatacggacctgaacttttgctgagtcagttactttaaatgtcatgtgtgctttgtgttgcatgtttgcttgatatagttctaagcttcttgatttcccatgataacttgcaaaaactttgagctaaaaagtaacatctaaaaactagttggctcttttagatccttttaacattgttattcccaaatcacttgaattatgcttaaagttcttaattatatgtgcctggaacgtgaaggttatataactattaagaatgggagcaaaggccagttaacaactcaaacactgaccttcttccgtggcacaggttaagctttatagtagccaaattacccttgatattggaaatagaagtataatatccccccattagttgccagaccaatttttgacggtgtcgattgaactgcgtatcattacatagtgggagggtaaccacataagcgtagagttgtaacaccatatgacccaaaattcgcccaatggctgggcctccatttggtggtgggggatgggccactcttgcatagcaccttacttgggctttcatccttgctttcccagaaaggttaacaagatcaggaaatgttatattttgggccaacagggcttatacgctactatagctaaaggtaaacaggcaattggtttttttacctttccagtcgaaccatttgctttgggtagatggtgttgtgagaactttgttcctttcaatcttaatacaaatgatgcacaaagcttatgcgcattccctaagaaaaacgtaagtgaataaatcaggggatcctttgacaggcgtataaggctttcttttttgttaattgatagtaggcatatatcacttggattcaatccagtagcttagatcatagtctttgtttgttctccgatttcagggctagtcgcaatttgatatgaacctttattttaaattccttctgaactattttcatatgctacacagaaacaaatgggaagatgcctgttgtttgcttatttgagcacagcagctaggctgatgcaagttatttatcaacttttgttcattcttctctaatattgcacttcctatctgcagagcatcttatgtaaacctttttatgacttatttgtgcacagctatttatttagaatatcaacttactactgtagtgaatttgctaactgactccattttatatgttaattgggacatctaaaaaggtgagggaggggaacaaccttgccgtatggtgcctcttcctgatggatcaaagaatccaagaataagtgcaatcaagcaagttgccagcggaagatttggagtttccatctattatttgactaatgcagttgaggtgcagataaaaatggctcaggtatttgaccagattggttttttgtaaaactaaacgagttacttcctgcaatatgtccatgaccactggtctggctatttcatcaggcagtagaaatttatgtcttgttcctctaactgtatagggtgctaaacctggtgaaggtggtgagctaccaggccacaaggtcattggtgatattgcagtcactagaaattctacagctggtgtagggctcattagcccacctcctcaccacgatatatattctattgaggatctcgcacaacttatccatgaccttaaggtatagtctcatttgtaaaaagtctcatgatggtggcttataactatttagtgcaagactccagtttgccacttacacatttacttccttattaattggcatttttttgttgtaatgtttcatattagagaacctttttaattgaaatcatgcatgttgcactttacagttttgcttgcttatgctatatcgcttctttctactgtagaatgcaaacccaggtgccagaatcagcgtcaaactagtctctgaagctggtgtaggaattgtcgctagtggtgtggtgaaaggacatgcagaccatgttctgatctctggacatgatggaggcactggagcctccagatggacagggattaaaaatgctggacttccttgggagcttggattagctgaaacacaccagactcttgtggccaatggtctccgtggccgagctgttcttcagacagatggacagatgaaaactggtagagatgttgctgttgcttgtttacttggagcagaagaatttggattcagcacagcgccattaatcacacttggctgcattatgatgaggaagtgccataccaacacttgccctgctggtattgctacacaagatccagtgctccgcgcaaagtttgctgggaagccagaacatgtcataaactacttcttcatgcttgctgaagaggtacgagaaatcatggcacagcttggcttccgcactgttaatgaaatggttgggcgatcggacatgcttgagatcgatcccaaagtactggagggcaacgagaaacttgaaaacattgatctctcacggctgctgaaaccagctgctgaaattagccctggggctgttcaatattgtgttgagaagcaagatcatggcctcgacatggcattagataacaaactcatagcctcctcaacagctgcccttcgaaaaggtgttcgtgttttcattgagacaccagtacggaacattaaccgagctgttggtactatgctcagccatgaagtcacaaaacggtatcacattcatggattgccatcagataccatccatattaagctgaatggaagtgctggccaaagttttggtgcttttctctgtcctgggatcactcttgagcttgagggagacagcaacgattatgttggtaagggactatctggtggaaagattgttgtgtatccaccaagaaatagtcgatttaatccacaagacaatattgtgattggtaatgtggctttatatggtgctacaaagggagaggcatatttcaatggtatggcggcagaaaggttttgtgtccgcaattcaggagctcaagcagtagttgaagggattggcgatcatggatgtgagtacatgacaggaggtacagctgttattcttggaaaaactggtaggaactttgcagctggcatgagtggaggtattgcttatgtttatgatgtggatgggaagttcagtagccgttgcaactatgagctagttgacttgtatgctgtagttgaagaggatgacatcacaacattgagaatgatgatacaacagcacagacttcatacacaaagtgatttggccagagatatactcttgaattttgatactctcctcccaaaatttataaaagtatatccaagggattacaagcgggttttggataaactaaaagaagagaaggctgctaaagaagcagagcaaaaggcaagagaagtggtggataagaagccagttgaagtaattcaagctccaaatggcatttcagtaaagacagaggtaaataaggtttaagcaggattatttctcattctctatatcggtgatatttaacttgactgttggaaatttatgatgtccttcttaaaatagttattattgtaattctgtaagctaagctttctagtctgacttaaagtctttgatatgcagaaagtaatgaacgaagagccatcaagccgaccatcacgagtttcaaatgctgtaaagtaccgaggtttcataaaatatgagcgagagggtacttcttacagagatccaaatgagcgtgtaaaagattggaatgaagttgcaattgaattggttcctgggccactgctaaagacgcaatctgctcggtgcatggattgtggcactcctttctgtcatcaggtgatactcagtttttttcccttttgtattaagcagttttttttcataaaatacaatgatgcttttcagtacagtagttttatatgaatgtcacccggcaaaaaagttttatatgaatgtccttgatgctcttgatttcttgtccatatatattagtgcatatagtcgtgcattcgcacgaatttaaccatcctctatactgaatatctttacatattatttgtagtaacaaaatatacttccctttttaatagatgacactgttaacttttaacataatatttaatcattcatcttattaaaaaatattatgtaaatgttaatttttttggtctgacttgttttatcattactgcgttatgatattttggtaagttggcaatggtagggtatgcttagttagttaccctataaaatttggtatttttttctattttatttaatttttaggtaaactaaattcataatattttactttactttagaaagtgtgttcgttgaaaaaaaaactgagatggttaatttgtgtgctaaacaaaaccgacaatcgagtgtactttatgcaatgtttaaaaaagtgtgtaaagaatataatctatctattatattattaaaggaatagaaaaagaagcctccacgttcgctctcatggcctagaaattctcacattaatcggagaaaaagaaaagacagagtccatatagaaatacaatttagaaatagctgaaatttggaattaaaaaataaggaatattagaagaggagactagagtccatatagaaatacaatttagaaatagttgaaattcggaattaaaaaataaggaatattagaagaggagactagagtccatatagaaatacaattaggaaataactgaaattcggaattaaaaagaaggaatattcgaagtagagtatagagtccatatagaaatacaattaggaaataactcaaattcggaattaaaaaataaggaatattagaaaaggagactagagtccatatagaaatataatttaaaattagttgaaattcggaattaaaaaataaggaatattagaagaggagactagagtccatatagaaatacaattaggaaataactgatattcggaattaaaaataaggaatattagaagtagagtatagagtccatatagaaatacaattagaaaataatagaaaatcggaattaaaaataatgaatattagaagtagagtatatagtccatatagaaatacaattaagaaaaaaaataaattcggaattaaaaaataaggaatattagaagtagagtatagagtccatataggaatttaaaactaactaaaattcagaataaacataataaaattaaaagtagagtttagagtctgtataaaaatacaatttacaaataactaaaattcgagattaagaaaaacatggaaagaagagtttaaagtcaatataggaatacaatttagaagtaactgaaattcgaaattaaaaattaaagaatattgaaagataagtttagagtccacatagaaatacaattagaaataataaaaattcagaaataaaaataaataatattggaagaagagcctagagtctatatagaaatacaatttacagaaaatttggaattaaaaaaatatattaaaagatgagtctagagtccatataggaatatatatattttacaaataactaaaatttgatattaaaaataattaataactaacacgtatataaaatacaatatgaatattacacattagtagtttcgtaaagttattgcaaaatctaaaattatgttgtcattttaatatatttggataatatattgagaaaacatatatgctattatatgagagaaaatataatgatgctagccgcgcaatctgcgcgggacaccatgctagtttcaatagtaaaactcaaaactttcaaggttcttcacgtatacgaggttttaattgtacacaaggtataaaaataatttaccaatattcaaaactcaaaacctccaaaattatacgcctaagaaaaaaatattttttaggcttaaaaataaaaaggtgccatggttgtgacatattggcaggttcagaggtggacttggaatatctagtaacttccttgccactcttccatcggacagctgagatttattcttcagtttttgtccttttatcgattctatggccattatttactacatgatgtggctttttctctttgcatcatcagattgtcttttcacttgttaagatttgtgaaattttcttggtatggttcctgtatttttcttatatcaaacttttgcaggagggttctggtgctggttgtcctcttggaaataagattcctgaattcaatgaattggttcatcagaatagatggcatgaagccttggatcggctacttgagacaaacaatttccctgagtttactggacgagtttgtcctgctccttgtgagggttcgtgcgtacttggcattatagacaatccagtatccataaaaagcatagagtgcgccatcatagacaaaggatttgaagagggatggatggtaccacggcctccacttcggagaacagggtgtgtgttcggcacaactttgtacttgctttcttatatgagttgaagcatgtaacaatagctgcacctaaagctacttcatttttttgcagaaagagagttgctattgttggcagtggcccagctggtctagctgctgcagaccaactgaacaaaatgggccatttcgtgactgtctttgaacgtgctgaccgtattggaggactgatgatgtatggggttccaaatatgaaggctgacaaagagggcattgttcagcgacgtgtcgagttgatggctaaggagggggttcaattcattgtgaatgcccatgttggaagtgaccctttatactccgttgaaaagctccgctctgagaatgatgccattattttggcctgtggagctacaaagccaaagtgagttaatacaaaaacgaaaaaaagaagagtttgtaactctagtttacatctttcttggcaccagtttttaaagtctaagcaacacagtctatatcattcatgcctttgaaacttggctaatgtttagagcattatccttgagcagagatctccctattcctggacgggagttggcaggcatccatttcgctatggaatttcttcatgccaataccaaaagtttacttgacagcaacttggaggatggtaactacatatcagcccaagggagaaaggtggttgtcattggtggtggagacacaggcacagattgcattgggacatccattaggcatggttgcaccaaccttgtaaatcttgaacttttgccagagccaccaagaaagagggcacctgacaacccctggccccaggttagttccctcatcatataaaacaacagcatctttatattctttttttagtgaaaatctttgtatgtttagaatgtaagcattgcgccactacggttgcctgaaattccactaacattactctgttgtgtttctactattgccttcagtggcccaggatcttccgtgttgattatgggcaccaggaagcaactagcaagtttggaaaagatccaagaagttacaaagtcctgacgaagcgatttatcggagatgagaatggaaatgtgaaggcccttgaggtaatacgtgttgaatggggaaaggtgaacggaaggttccaattcaaggaagttgaaggatcagaagaaattattgaggccgatcttgtcctcttagctatgggattcctgggtcccgaagcggttagttttcctccctttctcttatgagttatgacaagaatagcattacacaattgtgcacatagctatctgtttagagaccaaccaacacatagtgcctaactgcatatccttctacagactgttgctaacaagctgggtctagaacaagacatgaggtcaaacttcaaagctcaatttggaaactttgcgaccaatgtggaaggtgtatttgctgctggagactgcagacgtgggcaatcactggttgtttgggccatcacagaggggcgccaagctgcagcagccgtagacaattacctgtcgaaggatgatgaaggtgaaaccaatggcacagaggacattgctgtctcaagtgaaggtctggtccaacccgtagttgcataggccgagagaacatttctgcaattttgatacagcattgatgatgcgaagatagtagggccatgcattttttagctataaaaaggtaaaataaagggcctgtaaataatttacaagaaaagggggcccttttgtttatataagtatgataaaagggaaattttgcggacgcgtatattttttccctgtttcttcttgtgaagagatgcaaatcctgtgattataagagcaatgtctggtttttgttaaataaatgtgaggggattctgttaaaaacatctatttattatgtgtaagtacataatggatcttcgtgtttctcttccatccatgaacctaccacaatgctgctgcatgaattgtaaatgtttttaaagtttttgaagtgttgtcattgagtagttcaagaatcgatctgcagccataattaatcagttaaactttttttcttaaacaaaagcagaagctctgtttcatttcattgattcgcttcctttattgaaaagaaactcaatcctcgtgtgacatgtttggttgttattaactgttttataattggagcgaagtcacgcattattagtctgactagaagatattactgacgacacctgaggcaaaagaaattcatatttgatatgccttgttctaaattggcaatgccgttatgaaaaaaaaaagtacagtccattagtgactgcgtgcatgacgaccaataattattctggattgagcaacgaaacacaaaagaatatatagaacgggtaacaagattgaccttgtaaaatggtgctgcttcaattatgagatgtatatacctgttagatgtaaacaattttattgagaatttctctgtaagaactttttttaacgaggactttttttttttgaacaaactggcaagccgccaatttcattaaatagagatggagtaaattgtacaaaacccaaaaaaaaatgaaaaaagttacaagctcagagcctttggaccgagctaaccacataatgagccagttgccaaggttcttctcacccaccaaaacacatgttttggcttcctctttaatcttggctaggaggctggttgccaggagctccttttgttggaaggtcccgcgaggccactagcaacaggagagtttaatttcaaagtaatgatatgcacttgctagtgtaatggtattgtagtaggatgtattagtttaaccatatgatccctttattttggttctcaacatgataatattttatttttaattatttgacaaaaagattcccccggttgctcagtccttttaaaaatcaaagctatactgttgcataccatatttgtggatacactttgtacataggccgtgtttagatccaaagtttttcttcaaactttcaactttttaattacatcaaaactttcctacacacgtaaacttccaacttttctgttacattgttccaatttcaaccaaacttctattttcaacgtgaactaaacacaggcatactcgcatttagtttcaaagttaaatgtcattgcacaaaatgtatttgcggatacattcattatacgtactacctccgtcctaaaatatagcaatttttagttatgaatctggatacacagttgtccagatttataactaaaaatgattacattttgggacgaaggaagtacatactcgctgcagtatgcttggaaaaatatttttactattgcaacttatacgagccaaagaccgttgacaagctagtcaacagtcattagcgtacctgaccggctgactagtccatcgatcgaggttacacgcatgacgtacataataggctactatcagaattcttttttagtgcaaaaatttgcctaattttagtctataatttgataccccatcacttacgctcgcttctcctactgaacaagtcaagctctcctcttcaccgctatataacgcacactttctccaattctccatccaggtgccactcaaagctcacacatcgccattgattctccactcgaagcttagctacacagagagaagcatctagtagtagtcgcatgggcaacagcttgcagctgccatgtccgtgccaggaggccacggcggtggccacctcgggagtcaagaagaggaggaagaagtcgccggccaccgccgctgtcaggagcagcaaggcggcggcggcggcgtcgtcgaggcacgtggttccggtgatagacacgccgggggaggaggaggagatgaggatggcgtggccggggtgccacgtggagccggccgtcgacggcggcgacggcatgcgggtgaaggtggtgatgaagaggaaggacgcggcggagctgatggcgaggctggaggagcggtgcgctgtcgagaggaaggccaagatggtggagctcaacgccgggctccgcggcggccacggccacggtcacggcggcggtggcgccagggacgcgtgggcgccgcggctcgtggccataccggagaactagcaaattaagcaagaactgcaactgcgaaaaaattctgcatgcacagtacagtagctgtaacatttttggagccctgataaaattacatatagctcgagtacattagctagcaagtttttaattagtgacatggtgaattgaattggtgatttctactctctttgtttttttttccttctcttgattcctcttggcttcttgagaagacgaactctgtcggctccgccatggcgcagcagtgtatgcagagagttatcaattgtgcaacttatgatgagcatgatatgttcatatccatgtgtaaataatccccttgttttataagatgcatccttgcttgataaagaacaggtttttatttcttgtcacgctattttagcaagcaagaggagattgattcatatgttgcagacttgcagttgtagcacatcaactctttgtgaattctctaaaaacaaccttttgaattgaaatcgaaattcgatcggctgatctggatgttgctgcctaccagcttccttctaccaaacttgtcctcgacattgacatatttgttgtgatcggaatattcagacggagtgttgtcgatcgaggtgagacgttacacagcttagctgtcactcatcagcaaaacagtgttgattaccttcgtcacactgccatgaatcatgatgggtgaagctattgatgccaacggataatactctaaaactcatgttggcatattgtggttaggcaacattgacctcttcataattcaaagcaagcaaaagctagctctatcatgggcaagctgggcagtatcttctgaatccatgacatttcagacttcagagttcagaggatcgaggtagctagtcagcatgaccagttcaagcatcagctatctttgttctatctgagaagcctgtgattaccattaggtattgttatctgcacacacgtaagcgttgaaaaaaaaaattcacagtagttagtctggtcgtaacactgacgctagctgtatgagaaacttaatcgagtgataatttactagtgtatatttttattctgttcacacagtaactttgtctgaacaagaacgttaatctgttttcttttatccccctgtggtcgttgtcatgactgcaataaaaatacgtacagaagtagagaaatttgcgagcaaatgatttgcctctgaaagtctgaatcgaagctaatctttgtccaagtcagcaataggtattataggtattagtccacatcattttatttttttatctgttattttttacacccagagtctgattatttatgtcacagctacgccatcaaagcataagaaaaccaaacatctcaatctgccgagacctacacttgcaaagtctcgtcaacacacatgcgagctcgacatcaacacaccaccatccagacaatgaacagaagcgtcaacacgtacgcagtgcgtaattccatactacaatatcacgtatatactctctcagtcttcaaatactactttaaaattattttttcatgcataataattcaatattattcaatagtgtaaagcatatattgattttttttgttttcagaaaaattatgtcatgtttttttaatattctgcagatgaaattttatatcacataattgaagccgtcgaaaaaaactgagatggttataaagagattattcagcccaatcatgaacgacatatttgcaaacaaaaaataatctgtgaaacttttatatatgtgttcttagtgatttaaaagcaaaggatggaaaataaaccttaatgacaaaaccctaaaattaactctaaatttaaaatttggctgataaacataagaaaaagatgaggctctatgttaacaggcccattttccctcgcaaaaaaaggactataggtccactttgtttgtaggcccatatattagatgggcctttcatcttgggccttctccgacggggatctcgatgcacatccgccgtccatctagacgcaatctcggccgtccaatctaccacaagaaacttttaaaaccccacatgccctagggctcatctcatctcattcccctgcgccgtcacttcccctcctcctcggttcccgccgccgccgccatcgccatctccaccctcctcggcggccgccggcgacgatgaagggacggcaaggccagcgcgtgaggctgtacgtccgcggcaccatcctcggctacaagaggtgaccgctcgctctcacccccccccccctgcgtggcggggtatctgccttctccgtcatcgccgcggtggagtggtgttgatcttggtttggcgttgattttcacgcgtaggtcgaagtcgaaccagtacgagaacacgtcgctgctgcagatcgagggggtgaacaccaaggaggaggttgggtggtacgccgggaagcgcatcgcctacgtctacaaggccaagacgaagagcaacgactccaccatccgctgcatctggggcaaggtcacccgcccgcacggcaactccggcgtcgtccgcgccaagttccggtccaacctcccgcccacctccatggtaaatctcgctctctccgtcgtccgcgctatccattgatcccttcctgttttggtccagtcgtatgtagtttcgttgtccatttctgatgttttatgctggattgttttggtggtgcagggcaagaaggtccgcgtcttcatgtaccctagcagcatctaaggtagagtgctgtacttagttccaattgtttcaagcttttacaatgtggtgatgtattattgactattgcttctggttatgtttattgttcattgaatcatcgagctcgtggggttggtcagaatcttgtgcaattgttccctggattctgtatttgtgacagttgttgcctgattagatggaatggtgcattgttaggttttggtgtgagtgatcattatgtttgtgtctaagggctccatgccaatgggggaagctcttttgctagcttcgaaatacctgcaggttctctgcggggtgctcggaagttggggccctagataaaattcagcggtctcatagtacgaggctatgctttggttgatgggtctctcatcaacctgttcctcacagccttgcctccaatgacctcaatatctgttaatctaatatgtcagtttcctactgttaactagtattcatgcgagcccgagtgacatagtgatctcgagggttgtaaactaatgtgttacactatatgctttgccgtttaattgatctaggtgtccttcatactttgtccttgtttaggggtcccaatccagtttaggatgatagccccatcctgactaaaaaggaattggggtggcaggaggaattgcctgagatccctgagatcggtttgctctggattttttacctgatgatggatcaaatcccttattatgcataaatgtagaaattggtgagtcttagcattggaagttgaaaacgttaatgactatttattggcggctatctgcattatctgatccagtggtgtcctggttgactagtggaacacaacttggaacacaaccatctctcggtattgtggtatgatagaaacctaccgtgtgggatttcttcataattttgtgactttgtgttgatagttgataatgtcttcagagcataatgcagtccgtttggtataatatattttgctatcattgtgtttttttttttgtgcttatctcccttttgcataacaagtcaaaagtttgaaaactaacagtaatttcacttttaactgaaacaggtttcttgcctattctgcaaaactggtagttggcatcgtggaggttttatatcagctagtcacttggtttaccggccagagaaatttaagcgattttgaggagtttagcttttgttttactgcacagactatctggttgcatcttgtacaacgcatgccaatcactcatttgcgttgaaatgatatttccatgcggtgttaactctttatctgtaatttctgtctgattgtcatggtgactgtcaaatgcaaccttctatagctttccatgaaccagatgccctttgatctatacaaacataacatcgctattgtgaaccaaatcatcgtatcaaaagttcaaaactgttggcttgcagtattttaggatagtgatcttgcgactgctaaagtgttgttttttactacgtagcaacattttgtggtggaggtagtagttggcttccattatctgattcgtgataccttgcgtgtaaaatgggaactacagggatctcattcgattggatgactttgtactggacttctgtgtcgtgcgtcaagtgaactgcgtgtggtgtagtgtgccaatattctttgcgacctcccagtcaatcctactagttagtatacttaaaataagaagcaagtatatttgaatttaaatgtagtatacttcaaacaagaagagtcgtgttcacagtactagtatattagaatttaaatttgctaattgaaaacactatcccacatcaaatttttcggcaccgctgcatcgcgacgagatcaaatctacaggaaaccgcgcgagatcaaccggcttttcaactcttccgaaatgccggagcagccgtgcctagcgccgcgccaccgcggaatcgccggcgcggatgcgtgaatcctctcacctgcgaggctgcgactgcgacgctacacacactgacgtctcggtctcaaaaaaaagtagttgttacactcctcccggcattcgagtcccagacgaatccgacgccgagataagtgacgggggagatggagattggtcgtctcgtgcggaagcagacgcagccaggctgggcaccaaccacccgaggaggaggaagacgacgaccactcgctctcgcgctcgggcggctctcgtcccgtcgtccggtgcggtgccgctgcctcgccgccatgcagacttcgccgccgccgccgtccgtgcgcacggtctccatccccttctccgacctcaaggtaagagaggaacccgctgcatagcgtcgtatggttcttgattccatcagagttgcgacgccgttttctctgctgctgatgcaggagagggatagggacctgagcgggaagatcgaggaagggctcgggcccaacgggctcgggatcatctccattgctgacgtgagtgtgacgcgttgaaaactgatgcgcgctgcgttcctggcctgcagagaaaatttcgagttcctgaactgaattttgtagccgtctttttgcaggtgcctggttttcccgtgctaaggaaaacgttgctgcgcctggcaccaaagtatgttcttctcttagtctcatctttgtgttgttcataggaggcacatttcagtttcaacatttgcttgatatttgtagtgaaatctcttgttgcttgcttccatttttttttagatttgcaaaccttcctgaagatgtgaagaaagaacttgaagacccagacagcaggtgaaaacagaactgcatggtggtgccatttggttctgtacttatgttcttaatcacgaatttgatgtagcctattatgtcctccaattgggagctcctagttaggatcaacacctgaattgtacttcaacttctatccattttgacagtctagagtgagtacacagcaatgatgagtttgctcctttgcctcttaggtttaactttggatggagtcatgggaaagagaaacttgagtcagggaaactcggtaagcacttttgcacttttatctaattatacatcttaccatatgtgagatattgcactttattgaaaagatctgtatcacagacacattcaaaggctccttttatgccaacccaattttggatgctccaaccactgatgatgtacttgtgagaaggttcgttttttcatacataaataatttaactcagtttactgttacaatttagcactggagaaaactgaacaatttggcaacctttattattctaactccaacgaatttagtatgatttgagttaattaaagtttaattatcttactatggtcgatcatttgtatcactcaaaatgacctattgtattgctagtgcaaaagagttgtatcatatactcataaagaccaaatatgacccttattataggtgtttttaatgtaatattgaaccagcaggtacccatcttattgccgaacaaatatatggccagccagtcatcttcctgagctcgaaataggtatgactgactgaccatatgtatgtatattgactgacttgagggctatttctcagtataacagtacatatttgttaccttttatcactattttaataacccattcctacttattttagccattaaaatggaggacttgccataggcccatagcacatgtttatatgttataagtcaggatatctgtattgaataaatgtaccaaaggttgtactccatttaccttactggctgtcttgtatctcaaggtgctaaatgtaagatactgaatggttaatgttcattttcagtgcctcatgatcattacatgctgaaatatatttttaagtggttttgatttttgtagaacttattatgtatttccatgctagaatccaaccatttttacaacatttctttcatttgtagcatttaaagctcttggaaagctgatgttggaagttggcttgatgttggctcatcattgtgatcgctatggtatgtactatataattctataggcttacctgatatttcctttaaaaatgtccagggacaaaccacatctgtttggctaagtaaaaaatctccacaatttaacctttggattgattataattgtcaactctgtactttggtctttaagtttggtattccattggtgaattggaccaacttctgtttgtttgtcagtaatgcagcaaggagtgggaccatatgatggtgaaagccttgagcagacaattgccagctcaaggtgtcacaagggccgccttctgtattactacccccggcaatttaggtaaatatgatgtatacacagtatttctgacaagaaaaaacatgcatgaattgcatctctaggcagtgattcctttatgaccttcttgtattttggagttaataagacttaggaatggataaacaagatcaatgtcacgcgattccactaaacagcaagatggtgcctatcaagtattacacaccattgacacgcgatatcatcgcgcatattataaggcattttacatgtgttgtccatgtagatcaaagctttctaacttttcttacctttgtaacaatcaatatattttttttggattcaagatttttcaatgttctagccttttagttgtaaggattgatgcttgcatgtctcttatttcagtaaacaagaggaaggtggttctgtttcatcgtggtgtggatggcatactgaccatggatctttaacaggtaatacatgttatccctatggttgaatattatcagttgcacgataactcctgaacatgaaagtttgttgtggtcaaatgagcatgtggtgaaattctgaacccataaccttactgtattatacatatattgataaccataaatctgatctccgttttgtttcctactactatcatctatgaggctttagcgtttaaaaaacgtttgttttaatttatatatttttttcaattctgattatgcatcctacatgcaggacttacatgtgccttgtttacgaaaaattcaatggagatcccctgtcctgatagtgctgctggattgtatataaggactcgtgatgataaagttgttaaggtaatttcctgttaatcactatagacttatcatcaagatgatgctttgtaatttaggttgtacgcagtcatctctacattgaaattgatcggtgcttgcagatttggaaatgtagccaggcatttgaaacaatgtttaatcattgttagttgaataattgcctgtgaattgcattagcatattatacaggagagggttatgtggtctgcactaattgaaattttactgcataaggttacatttgaggagaatgaattggcttaccaagttggagaaaccactgaaatactatcaagaggtcgtctatgtgcaactccacactgtgtgaaggtattgtactataaatttgtagtcatgggtaatcagtgttcctagttcctgcagttgtaaagtaatttatacttttactgttgtctctaggcccccagcagtgaaaacgcctcgaatgttgatcgttcgaccttcgcgatgttcatgcaaccagattggtatgtgcagttttcttgaccaaattgtagtgttcacatattctctcacatggagaacttttgagtttcctgcccctcatcctactagtgacttgccacttgccaaagctcccaaccaatttcaacacataatgttagcccacatgaagagtactggttttccctcatcattatgtgttatgtgggtttgttcatttatacggtcaatactcaataatcaatagtaatatgcttgccgttacgaattcggcacgtagattttcaaagcctaggtctgattaatgtgggtttgctgacattttctttttattgtgaaatattttgtagggatgaaaagctcaagtttccaagtgaaattccgtatcatcaagaggtttgttcctaatcagaaacttgcattcagtgctcctgcgtgcctttttctgatatagtaatctatgttttaacttctggcagttgatcccaccgaatggaactcttacattcggggagtattcagaaagattggtgaacaagtattaccagggaaagacatgaaacactacaatacgcatgcaattttcaattgttgtttgtccgtttcgtactagcagtgaaatcgtcagtgcaacctggacaaacttaactgttaggttctctgcgtgtgttttgaactggagattcgagcaaccaatcatagaaaaaatgtgtctactgtaattgttttttccttacgataaaagcaacaacaccggtggcagcgtcaccttttcttggttcagtttccactacactcatcttcaccatacttgattgagtttcctctgtagtatgggggtgcttagatctatgagtgtaaagttttggtgtcacatcggataagtttgggtgtgtcacatcggatatacggacacacatttaatgtattaaacatagactaataacaaaacaaattacatatttcatttgcacactgcgagacaaatttacacacaatgtcattagcaccacgttatcaaatcatggagcaattaggcttaaaagattcgtctcgcaatttacacaatgtatacaattagttatttttttcatttatatttaatcctccatgctatgttagaactctgaaaactcggataaacatctacatggactaaagacacatacaaataatacaaattaaacaagctgaaaataaagggagcgaaagaatggactagtaacaaattgaagacgatatatgtaaacggaacgaaagaatgggctgtgacaaaaattaaacacgatatatgaacttggtcgtaatacaaaaagtacagcagcctggtgtctcctagatcctcaagcacaaggaacaaaagcacaaaccaaatgacacctcacagctgcgttgatctatgaatgacctagaacggggtaaaatcagctatatatgccccaagataggggaggatcaccaactgggagtaaaggagaaacatgagtatgataagtagatgatcaggactatttggaccatgcaaccgcatcaatttctgcttgagcactccgatatagctccagcctcttcgcaagattagtcctccgttccatgacggcggggtcttcatcaagaagcttagaaagttgtttaatctgcataacatttaaaaggcagtattactagttagatcaattctgttggactttaaaaggcacaccaaaaaaaatgtaaaacagggcccaaaaacttatgttatgctttattaagctttaagaaagaagaactcacctctcttgctcccaattcagtaaagaagtgatcgagcagtgagcgctttgcctcccgcacttgacagtagacaatagatttcggaatagagttcctcaaggttgaacataccatgttaatatatgccagaaccgttgttcctgttgagtatgaattgtagcaaggttcagcagaaaatacaggtaaaataagttaaaaggcagccaagcaaagccttgatggcatgtatattcatcattaaactaaattagtgggcaatattacacaaggttgcaacaatatgataaaccacttctcaacttcaacaaatggccatcattgcaaagcagtaacagtatacattgaatatatacaaggaagaatggttgatgacttaccaattcgtctaagataagaatcattatatctatcaaaaatagagtggcttggatttccacccttctcaacatcctggggaagtttcctgaagaaatctacggttaagtagctgcattccatatcaacaagctttaatgtgtttttcttgctttcatccctcattctgtccaatgactcaaaagccgcattgcctacttccacacgaagagtggggaactgcttcagctcctgcagagaactcactcacatcttttaggacgcttacacaattacaagtggagtaatgacaatttgacaagcatgcaaattaattatcatgctgcttctcatcttaagtcgagcaaaaaagttccaggttcagattttattagaaagacaaaatattgaaacaacagaaggcaaaaatttcaacagtattaattgattacctcctaaactcctagtacaatcagtatacctcatgtaccatcagaatgcacatattccccagtataagttacagaaaacattgtgcaacagtgcgaagacttacatgtgtttcattgatggccttgtgcactaattccttgagtatcgcatggacctgtcagtacaacaaacatacgataatgttgtagtgcacattcttcaacaatatatgacacgaaaagttagaaacgctcaagctattttgttaagactaaaaaatagatcaaattaatagatagcataccgcatccacagctgcctcagcaggacctctgatactaacaagacaagactctatgagccgtcgatatccttgctctggagctattaaatgaggttggtatccatcagcctccgttatgagctttttcacattttccattgccagttgtttgtcaaactgcaaccgtttaatggctacaggaaactgattgtcaaagacatgatagattttctcaccaccaggacgcctggacattagaatttttgtgggtaagcatcagggaaagcaacattcaattcacaaaagaacaagcacacaagggagaatgatgctaattgcatataacaatctacaagttaaattgtgttaaattgcatacttcagcagcaagaaaatatgcaaatctttattagcaataactttgtaagtgctatcatgtaattaggttttagggttaaattcgacgatccctttcttctgaaagaaaaacaactggagattctaggtgcatgtacgcccaagcaagcttattgaaatctttattacatttgatagaaatttattgtttaaaaatacaagacaaattaacaggttactttgccaagaacctaaaataggctgtatgcttacgttggagtaaacacacaagactaacaccaaaggagagcttatcaaattagggccacacaaattttagaaggcttatacagatcagagaggggaaaatgttattttaggataaaatgttattttatctcggaattcaggaagcacacacgtagctacaataaaacttctaagagaacatttagcaacagaaacattaagtttgaaacatacactccatccagatgttctttgtagataccatcaaacatgcggcatatttccatgatcgtgtacagctttccctgcatggccaaatatgtacaaaccaattatgtccattagcacaatgatcaagaacatacacaaaaaaaatgggcactacattagcaattagcataaaaaggggatgcagaattaggctcaataaaccagtatctaattaaagaataaaaaagccctaatcttactccagcatctgtagcaatgggcttcccaagtcgattaagttctgtctccagttcggcaattgtctttgtaatgagagattggagccctgggattcttgacttaataacagtctccaaatgctacatatacaccaaaacatttaagagtcaatataccaaacagagttacaggtattctacattagaaacgaaatgaaaggcataccttcgagagactctttgctaaatgttctgatcccatcctatgagcaaggtgcttgtattctggcgtagttgaaaaatattcacgctctctgcgcctagcagcaatcatgtccacattcttgttgatatcctgctgagatcgattgacgacaccaatccattgttgttggagccggtatgatctgccttccaatatctgcagaaaagaaccgtaagaaaatacagctcaaagaacaaacataaccttcattttctacaactgtatatcttccaacagatagaacagaagaatattcaacataggagatttaaaaggtcccaaaagcaagggaacaataatccatgttgacatctccggggacaaaatgtatcgataataaagtttttagcaattaattttagctgggaaaaaacttacatcaacagcatcggtgcccttgtccattagatcaatttttgtaagcacaccaaacgtcctttcacctgaacattacaagacaaaccacatctcaaaaaacatgattgccatcctttatccaaatggcttacaacaaaggcatacctttggggtcaacttcccgtgaaatcttaattgcatcagaagttgcaagatcctgattggctggagaaacagccagaatgatacaattgggctgaaacaaaccaaaaagggtcgatatacatataagcttttgcaacattacagacatgatacatgacaagataagcatagctcacacactacaagcataatgcatgatacaaaaaacatattccaaatatgctaacacatggctgaaatcataagaatgtcgaaacaaatatgcatagaataaattactgtatatgtgcatacaaagctatggtaccgaaataaggcaagcatagtcagcaatggcagtggacaaatattaaaaggttacagcaaaaaatataccttttctatgaacgagcgaaccatgttttcaatgtcctgaacaatactgtcaggctgaccctctggaaagcatatagcaagtggtaaatcaggaaatggacctctttaaaaagaacaaacaaaagaaaatagctcacaaatgacaatgggtaatactgaccaacagcaactttagtaagcccaggaagatcgataagagtcaggttcacaactgcaaaagagtgggagttaagacgctaacaaaaatagatactagaaaccagataaatcataaacaggcatgcacatataaagacaaataaggtatggtcatcttatcaatgacagagatctcactaagtaagcaacagacaaaaggaacagcttttaagccacatatccatctcagcaaacaataatcaaaatgaaccaatttgactgtgataaagcaactacatcgaactgacattttatattattgttatcttaccatttggagaatatatgcttaaatgaatagggaccgatgatatttgctttgaacgaccagtttctctgtcagtttcatcagctatctccttcctcacaagagctgcaagaatacgactatcatcattaaccatcatgcagttgaatatatgtttagcacttgaaagactgtttccaccaacaattacaggtgtaatcatatatgtttgactatcatccaacattggcaatctagttcagtttgaatatatgatctccataaacatgcaatctcgcaattttaatcacagaatgatatgaccaaaaatgaaggaaaaggtagatggagtaccgaaatcagtgaatctcttcctgggaaggtgcatgaactctgcatattctctgtctccgtcgatcctatgaagctgcagcaccaagggacgacgggtgacaatgcctggaaaccaaatccaaaaattccaaatcagataaaacaggagcaataacactgaattatacaagcacttgctattggaaccgccatacctgagcctcttggtaggaaatccttcccaacaacgctctccagcaccgaggatttacccgaactctatcaaacgtatcaggaaagttcaaacgtcaggttaccgaagtacacccattctggtacagaaataagcttaaaccatttctaacaggcgcaactccgcacaaaattccatcgagctggatggttccatcaactagtttagtagcttcagttgctacaaaacctatcgatttcatgtaagcgtccaaatctagtcttcggcgagcacagcaatcgtagatccaatcgtagctagaccgcatcggctactaatcctttctgccctaccagcaactcgcgagatccagatcgacgcagctgaggcgcgaggggccagatccgagcgagataaaaacgggtaggggggaaacgacgggaacctggcctccgacgacggcgatggccggcagcgagtcccagagggtggggagggcgctctcctcgccgtggtcgccgagggcggtgcaggcccgctgcagcttgttgacgagcgagatcaggttctccatggccgctgctgctgcggcggcggcggcggctcagcgagatctgggcgagatcgcgcgcgtggggggaggggcgagatcgaggtcggtggagaggagggggggagatgagggttggcgatgccgactgccgagccgcgtcggggtcgagagctgcgcggcctcgggctgtgtatggtggtgcgccgcgacggtttggtgatttggactttggaaaaaggcttcgtggggaagaaacgggctggatttttcacattttgatccttttaaaaaacttatttcccaaatagaccccttaaaaaacttatcccagaaatggtccttttttgggcgcca

SEQ ID NO: 7833 - DNA, 12197 bp, Oryza sativa
ttttttttttggtaaattttatcagaaagactaacatatagcactgtgatgtatacttcatccgtctcaaaaaaaaaaaaaagaaaaaaaaaagaaagacaaaccctggtttccgtgtccaacgtttgaccgtccttcttatttgaaaaaattatgaaaaaattaaaaagataaatcacgcacaaagtattaatcatgttttatcatctaacaacaatggaaatactaattataaaaaaaatcatataagacggacagtcaaacgttgacacggaaacccaggatttgccttttttttggacggagggagtacttatttgaaagacaaatttggttttatagcataaaaggaaagttctcattttttgtattatagtattgcaagttcacgcttcactttaatagcacctaatttatctccgttcccgttaaaagcacttccgtcactccaccttgtcttcatgttttctttgaccgcaattggctgaatatgacacttgaattgatgctcttgctcttatgtggattaatagattgatcgctctcatggtctcatttgatcaagctgaacaacaagaaaatcaattatgtcgtcggacagtgtcgtactgtcacctcagcagttcctgctattcctactgaaggtggctggactcaccacgcccatctcctcccttgcatggcctaatcgttgggctgcaacctgcatctaggcgatgcctgcacgcctcgacactgacacctgcgaatcgtacgttggtgatcgaggcgccaaggctgctcggcttcatcaaactccatccattgtgatccttttcatgtctcccacatagaaaatacgatattaacttgcatcatttcagtagaaattcagctgtatcaatgtactgaaacataaattcattaattcacagagaacacaatcagttgcatcaatacactaagctgttggggagctgttgcatagccgagactgctgcgtagccaccgatgaaggatgaaccaactccaatagccgacctgatggacgaggagttgtcgctcttgacatattgcagccacggcaggagcgtcagttgaggggtgaacagggacatcgatctattaatccataaaaagacatgagcgtcaattcacgtgtccaattcaatcaactgcggtcaaagaaaacgggaagatgaagagaagcgacggaactgttttcaacaaaattcgaggtagagttgggtgcttttaaaatgaattgtgaactctgggtgctgtaaaactaaaaacgacaacttttgatgctataaaaccaattttgcccatttgaaatatttgacgtgaaaatataggcatgttcagtttggtatcactttcaaccttaccaaattttagcattaccaaaaatttggtaagtcaacaaactaaacatactttaaccattactacttttttactaaattttggcagttccagaagatttcggtagttctataagctttcatcttgtaccgtaatttggcgaaggcatcgaaactaaaaggaccttgatgtcgcctagaggggggggtgaataggtgttcctaaaaattatcacaactttatagtatattagagtgatgagaactttcaattcaaatcggaacttccgatatgggattggaagttccggtcttaactgaaaagttcggcggataacggaataaacactagctatgaacttgtaactcgaacaaacaaaatgtatatgaaacaaaagattacaaacaaggtatctaaacaagatataaggtcaccaacaatattaattaagcatgcaagtagatcgggtcaaaacaagctcaagcacaatatgagagatggtaagaacgagcaaaccaagagaggagacacgttgatttgtttcccaaagttcggatccacggatcctacgtctccattgaggggccacaagggccgggtctatttcaacccttacctcacgaggttgcacaaatgcactcctcggtttcactcttgatctcttcccttgcagaggcgaaatcgaagccttcacaaactttccgtggcacaccacaagcttgggtgctcaccggcgacgtctagccgtctaggagaccttagtccccaagagtaacaaacacaatagaagatttgctttctatgaactcgagtgctcaaagtatggagtgaagttcacaagctctcaacttctcaatctctcaatccaactctctccccttctcaaatccctctcacaaagatgcaccacaaaggatggagtgaagctcactagctctcaactcctcactctctcaatctaactctcttcccttctcaaatccccctcacaaagaggcaccacaaaggatgggaaatggggatggctatttggctttggatgtgtctaatgtcgcccaagaacagcagccactcaaaggaggggtggaggagtttatatacccgagccattcaaaaactagccgttggaggctgaagcatctaggcccccggtgttaattttggtaattaatgacaagcgctaattgtggactaaccgttgtctttgagctatacattttaagttaggtccacgtcatatgtgcgcatggatgattatcgatggattaaaattgacggcgcaaagcaaagggaaagaagaaggtaaaactagcgctttaatttagaattgatcgaggtgtagggcgatcaaatttgctagtttatttttagtttcgccgtactattaagatgggtaatgacctagcaaagagatgattttaattgccacattaggtcattatgcatttagacatgtgctcacatttcacacacacacacacacacacacacacacacacttcactgggttcggcctgaccaggagcggtcagaccggccacatagtggcggtctgaccggcgtgccctgaccgacggcacatgcgcggtcagaccggtcccctggaggccgggatggtgctgctcgggatggctgatacagagccgacggagctgtattcggtcagaccgagccgatggcggtctgaccgagccgagaccggtctgaccggccaccccatgtcggtctgaccggccaggccgatggggccctctgatagggctacaacggctagttttctagccgttgcagagtagcacggtctgaccggccacatacctccggtcagaccggcagagcacagagttgggggatttcgcccccaacagctagttttggtgggtgggagtataaatactcccccaccagcagcaagggggctctcttggcacccaattcaattgcatacaccccttgcacctctctcacactcacttgagctttgtgttcatccatctagtgtgttagagggttgtttagccaagagtcaagtgcatttgcttccattgtagagctagtgtggcacttgatcatctccacatcgggtcattgcttgttactctcggaggttgccgcctcctagacggcttgtggaggagttgcccggtgacctctctgagaagattgtggaggaggcccggcgccggtttgtgagtggtttggagttcaccaccttcggagtgaaggaagaactaccccgagtgatcgaggcttgggtagtcctctccgtgggccggctcccgccttgcccaccccttgacgaagggggcgtgcggtggcttcgtggttgagcggtggagttgggctcgcctcaacggggagtaggaaaccggcgagtttccgaacctcggtgaaaaatctcttgtctcattgtctcatttgattgtcgcatttacatttgtgcaatttacatttctagagacatacttgagatcatatcactctaggattgcaaaacattgacataggagtgtgatttactttcatagagatataattgagccactatcaccctaggtttgcaaaacataacttagttgattagttagagttcacccttaccaagcctagcaacttaggttagatttgattaggtgttatttagttttaaatcgcctattcaccccctctagtcgacatctcgatctacaagtggtatcagagcttggtctctcttgattgggcttcaccgcctagagagaagatgtcgaacgaggtgaaccaagtagggaaggctcccatgtttaatggcacaaactactccacttggaaaattaaaatgtctactcacctcaaagctatgagcttccatatttggagtattgtggatgtaggctttactatcaccggcacacccttgacggagattgatcaccgcaacctccaactcaatgcccaagccatgaatgccttgttcaactctttgagccaagaggagttcgatagagtgagcaaccttgagaccgcatatgagatttggaacaagttggcggagatccatgagggtacaagtaagtacaaggatgccaagcttcatttcctcaagatccaatatgagacattctccatgttgcctcatgagagtgtgaatgacatgtatgggaggctcaatgtcattgtgaatgatctcaaggggcttggggcaaactacaccgatcttgaggttgcccaaaagatgcttagagccctaccggagaagtatgagacccttgtcactatgcttatcaactccgacatgtcaagaatgacacccgcaagcctcttggggaagatcaacaccaatgacatgtacaagttgaagaagaaggagatggaggaagcctcaccttccaagaagtgtattgctctccaagccgaagttgaagacaagagcaagagcaaggtgaatgaagtcaataaggacttggaggaagagatggtccttcttgctagaaggttcaatgatctcttgggaaggagaaaggagagaggaaggggctccaactccaataggagaagaaatagaagacccaacaagactctctccaacttgaggtgttttgagtgtggtgagaagggacactttgcttccaagtgcccttccaaggatgatgatggagacaagtcatccaagaagaagagtggaggctacaagctcatgaagaagcttaagaaggaagggaagaagattgaggccttcattggggaatgagactcaaatgaggagagtgattgatgattgtgatgatgtttcctatgatgagcttgtgagtatgtttgaggagctccatgcttatagtgagaaggagattgtcaagttcaaggccctaaagaaggatcatgcttctttggaggtcttgtatgagaagctaaagacctctcatgagagactcaccattcctcatgagaagcttaagtaagctcatgacaacctcctttccactactcaacatggagctcacattgatgttggcatatcttgtgatttgcttgatgatagtgctacttgccatattgctcatgttgcatcatctaacatttctacctcttgtgatgatcttatggatatgcctagccctagctctagctctagctcttgtgtttctatttgtgatgcctcacttgttgttgagaacaatgagcttaaggagcaagtggctaagctcaacaagagtttggagagatgcttcaagggtaagaacactcttgacaagattttgagtgagcaacggtgcatccttaacaaggagggacttggattcattccaaagaagggtaagaaaccttctcacagtgccactcgttttgtcaagagtaatggtaagtattgctccaagtgtcgtgaagttgggcatttggtaagtgattgccccggtgataagcctcctaagacatgcatgttcgattctcattatatgcttaggaaggctcataatggtagtattgttgctagatatgtgggttcccctatactcggtggtaaaaagaatgccatttgggtgcccaaagctttggtctctaacctccaaggaccaaaacaagtttgggtacctaaaagagcttgatcttcttttgtaggtgaactaccgcaccggtgggagccattgggtgcttgatagtggatgcactcaacacatgaccggtgatagggctatgttcaccacatttgaagtaggagggaatgaacaagagaaagtgacatttggagacaatagcaaaggaaaggtaattgggttaggtaaaattgctatctccaatgatttgtcaattgataatgtctctcttgttaaatctctaaatttcaatttgctttcggttgctcaaatttgtgatcttggcttgtcatgtgccttcttcccacaagaagttattgtttctagccttcttgacaagtcttgtgtgttcaaaggttttagatatggaaatctttatttggttgattttaattctagtgaagcaaatttgaaaacttgtttagttgcaaaaacttctttgggttggctttggcatagaaggctagcccatgttggcatgaatcaattgagcaaactttcaaaacgtgatctagttgtgggcttgaaagatgtgaagtttgagaaagataagctttgtagtgcttatcaagccggcaagcaagttgcatgttctcatcctactaagagtatcatgtccacatctagaccattggagctcttgcatatggatttgtttggcccaacaacctataagagcattggtggtaatagtcattgtcttgtgattgttgatgattattctcgctatacttgggtgttctttttgcatgataagtctattgttgccgagcttttcaaaaagtttgcaaaaagggcccaaaatgaatttagttgcactcttgtgaaaattagaagtgacaatggttccgagtttaagaataccaatatcgaggactattgtgatgatcttggtattaaacacgaactttccgctacctactcacctcaacaaaatggtgtagtggagaggaaaaatcgtacattgattgagatggcaaggactatgctagatgaatatggtgtttctgattccttttgggcggaagccgtaaacaccgcttgctatgcaaccaataggctttatttgcatcgtctcttgaaaaagacttcctatgagctaattgttgggaggaagccaaatgttgcctattttcgagtttttggttgcaagtgttatatttaccgaaagggtgttagactaaccaaatttgaaagttggtgtgatgaagggtttcttctaggttatgcctcaaatagtaaggcataccgggtctacaacaagaacaaaggtattgtggaagaaaccgccaatgttcaatttgatgagactaacggctcccaagaggggcacgagaatttggatgatgtaggtgatgaaggcttgatgagagctatgaagcacatgtctattggagatgtcaagcttattgaagtggaagacaagccatccacctccactcaaaatgagccatctacttccgcttcaccaagtcaagctcaagttgaagtggaggaggagaaggcacaagatccacctatgcctccaaggatacacaccgctctttccaaggatcacccaattgaccaagtgttgggtgacattagtaagggtgttcaaactcgatctcgtgtcgcttcgatttgtgaacattactcatttgtttcttgtcttgagccaaaacatgtagatgaagctctttgtgatccggattggatgaatgctatgcatgaagagctcaacaactttgcaagaaacaaggtgtggactttggttgaaagacctagagaccacaatgtcatagggacaaagtgggtctttaggaacaaacaagatgagaacggattggtggtgagaaacaaggcaaggttggtggcgcaaggtttcacacaagttgaaggtttggactttggtgaaacttttgcccccgtgacaagacttgaggctattcgcatctttcttgcatttgcatcatgctttgatataaaactatttcaaatggatgtgaaaagtgcttttctaaatggtgaaattgccgaacttgtctttgttgaacaacctcccggttttgaagatcctaaatatcctaaccatgtttacaaactctcaaaagctttttatggtttaaaacaagctcctagggcttggtatgaaagattgaaagattttcttttgtcaaaggatttcaaaattggaaaagttgacaccacccttttcacaaaaatcattggtgatgatttctttgtgtgtcaaatttatgttgatgacatcatattcggttctactaatgaggtattttgcaaggaatttggtgatatgatgtctagggaatttgagatgtccatgattggagagttgagcttcttccttggacttcaaatcaagcaactcaaggatgggacgttcgtgagccaaaccaaatacatcaaggatctactcaagaggtttggcttggaggatgcgaagcccaccaagacacctatggcaaccaacaggcatctcgaccttgatgagggaggtaaaccggtagatttaaagctttattgttccatgattggtagcttgctttaccttaccgcatctaggccggatatcatgtttagtgtttacatgtgtgcacggtttcaagccactcctaaggagtgtcacttagtggccgtgaaaaggattccaagatatttaaagcattcctctactattggcttgtggtacccaaaatgtgctaaatttaagcttgttggctatttcgattcggattatgccggttgcaaagtggatagaaagagcacatccgatagttgccaaatgcttggtagatcccttgtgtcatggtcatccaagaaacaaaattccgtagccctctctaccgccgaggcggaatatgtttcagcgggtagttgttgtgcccaattgctttggatgaaacaaaccttgttggactatggcatatccttcaccaaaaccccactcctatgtgacaatgatagtgccataaaaatagccaataacccggtccaacattctagaaccaagcatattgacattcgccatcacttcctaagagaccatgttgacaagtgtgacatagtcattagccacataagaaccgagaaccaactagccgacatctttaccaagcctcttgatgaaacccgcttttgcaagttgaggaatgagttaaatgtcatagatttctctaatgtggcttgagatggtgcatcatggttgcttctttttgcatattgtatatttgctcttatttgctcttatgctttggattttttgccatttggttcttcattgtgaaaatggagcatgtcacattaagggggagttttgcactcttgcatgtgctctacctccctttatatgtgagcaaatcaactagtggtgctagtagtattttcgaatgtccaagtcaacataagtcaaaacttttgcaaaatcaatgaaatttgaaaactatctcttggaaaaagtttcaaaagggtccctatatgttttccaagcctcttattgcaagaaaaatgtattttagatgaaaatggctttttggccctcttttgaagaaactagaatcttatttttggccaaaatgagattcaacctcaaaatgagtttgagaaggaatttgagaaaagtttcaaaacaaagttggtagagaggaggatttgaaatgtttttggtattcaaatcatattcaaaaaccaaatatttcaaaagttgtttgaaaatcaaattcgtccaaaaactcctatagaccataaaaggtcacctcctagcactcaagtgagttttgttgcaaatcttcataaatttcaaatattatgaatggttggcaatatttcaactcacacatttcaaaattgctccaaaaatcaaatttttgttggattttattgtgtgggggttgccggcttatgcaagggctgtgcacagccggcagggcgctgcccggtctgaccgcccatatagggccggtctaaccggtgtggacgaggcggtttaaccggccgcatagggctggtctgaccggccgagctggtgggcccagggtttttatcctcttcttctctatcccgcacctacctcttctcttctcatccccattcatccccaattcgaaaaaactcctcctctctcctctcccaaaccctagccacctccctccaccaaatccatccggttcaaccgtcaaaatcactctagttacaccgtaagtgaatctcctcctcttcctctctctatcccatggatttgtttgagtttttattgagtttgtgatccatggcatggaaccctaggtgaaggaagaggtgttcttcgatttgcaccaatagagggtagtttcttggtgtgattcgactccttcaaccggtaaatcactctccctcttgtgcattctctcaaatcggtctatttcaatttctagggttaaggatactttccccattgcttcaatcttgatgaaatagacctacaccttgatgttcatgttccaatcttgtgcaactttgtcctagcaatttttgttagaatcatttgtgtggattgtggaaggattcggttgtgctactgtcaatggcggtctgaccggccgaggaccgtcggtctgaccggccgtgagccgccggtctgaccggcctatggccgtcggtctgaccgacttggggcttgcggtctgaccggccttggctctcggtctgaccgcccctgacagacagcactcccccttctcccacttcactatgtggcttctaaaattgttgcttatccatcctttgctccttgtttttcagctatgcctccccgcactcgccatggttgtcgtgagcccacgcccgatcccgtcagtgagaatgaggaatcaagcgaagatgagtatgttcatagtgatgatgaaaatatggaaaatgttcagggtgatgagatggaagtaagtgatgatggtgatgacaatgggagtggcaatggtgaagatgatgaggcaagtgatgatgggagtcctctcgattccaccatccaatttgtgcttaatttgaggaatgctcatcaatacactatcctccgtcaccatgatcaattccggaggcctaacgattgtaatgatccaagatttcatatacggttccaaaagtccgtgtatgaacaagtgtatgccaacaaagccttcgcctaacacaagtggatttcttggaggcacattggtgagacaccggagtttgaagatttgcaagagatgttccggaccgttgggattgatagaattgtcaccatgaagcaaccttttgatgaagatctcatccggcaattctatgccaccgtatgggtgtccagcgattgtgatgcaatgaagtggatgtcggggacccttcgatgctctatcaaccgccgtgaattcaagaagctcttgcacattcgcttcaacaacggggatgaccttcatgatgagcacacccacaaccccttctccattgatcacttttctcagttttatgaagaagggggaaggcacacatatggaaaggtggtggatttgagggctctcccaagtgtgatcaaccgcatagtaagggccaccatcctcccaagatgcggcaacaatgatgacatacgcggagttgcttggcatgtcattgatgccattttggatggtcgtcggtttgatgttatcaaccttatgatgaagaagattgccatctcaaaggggactattggacaaggaatctattatgctccctgcataatgaggttgattcaaagcaagttgggacaaattggtcacaatttaaaagaacataaggagtacaagcctcgtctccaactctccactcctagagctcctcgtgtgcgccaaccaacttttgattaaggtgcaagctcaagtgcagcccctcctcctcctcatgggtatgatccaagtgtttttttccatccacaatatgcttactttggaatgcaacccaacgagtacttcaacccggtacttggggctattaataccctaagtgaaagcattcaacgcttgtctaccgggcatgaagctttgcatgaggatgttcgtggcttgcgcaccgatgttggcaacttgaatacttcggtgggaagattgcatactagggtgggtgtcttggattctcgagtccaaactttgagagtatccaagcatttgtgtatcatcgtcgtcgtgatgctcattatccttccacttcggcgcgtcctccttctccaccacaagaatgaagacctttttggtacttgatgccaaaagggggagaaaagtgtgtttctatgtcttg

SEQ ID NO: 7834 - DNA, 11234 bp, Oryza sativa
  unsure (1)..(11234): unsure at all n locations
acgtccaactatacattatttattaaggggtattatagtcttcttctcttaaccatattacatgctaaacaatctagaatgacatgtattttgggatggaggtagtatgtaatatatcactttacgattgtgtaagtttaaatttaatttctataagttataataaaaataataaattaacgtatattcatattcaaaattattatttttaaaaaattgtagaagttaaatttgagcttatgtgtttgtggagagatatattatgtacattattagatttttttttcagattgttttaactattcattaataaacgagttcaaacgagtgaacgtctattttccagtgattaaaagagctttccaacaatttacatgtgtttttttatagatcgtgggggcatcgtggtacttgctgtcgatcgagagggtgagcgattgctggaagaaggcgtgcaacgagttcccgggatgcaacaagatctacatgtactgcggcaacgaccaccaaaaagggttcctcgagtggcgaaccatcacgcggcagtacatcaacgagacgtgcgagcctagggacggcgtcatgcccttcaactacggcatctacacgccggccgtcaggtccgacgtcatcaagtccaacgacttcacctccaagctcctctactgcctctggtggggccttgccaacctcaggttcgacaattttttatttttgccgcaaatactatcgaaattgaaattaaaagtgtaaattgcttcgcacagaatagattgtatcatatttcacttacaccgggttttagtacttatgttcactttgcattagggtatatccaaatgttttttattttgtatactagattgcgtcatatgaatgaaggaaaattttataaatcacgagtaaatgatttttttagtcgtcaaaaatgaatactccctccttccctaaatatttgacaccgttgacttttttaaacatgtttgaccattcgtcttattcaaaaacttttatgaaatgtgtaaaactatatgaatacatgaaagtatatttaacaataaatcaaatgatacgaaaagaattaataattacttaaattttttgaataagacgaacggtcaaacattcttaaaaaagtcaacggcgtcaaacattttgggatggagggagtatatcgcagtaggagtctctcctgctatttttaatcgtaagaaaaattaatttagaccacgtttcacaaagtcatccatattttataaattttaatgaaatttctaaaaatttgatgatgtatatcctggtgctaagtgaaatttgtttgaaggcaacaacctgatgtagactgaaaatatgtgctaaatctgatgtaaagtgaaagtagaagtgccgctttatcaagtgcaaagtgcaatttactcaaattagaaacgattcctatgagaatgttgagaaatttggtgtgagaataattaatttgaggatggatgcagcacgctggggcaagggctgcagacgagcatatacacgggggaggcgctgttctcgatattcctggcgacgttcgggctgatcctgatggcgatgctgatcggcaacatccagacgtacctgcagtcgatgacggtgaggctggaggagatgcgggtgaagcggcgcgactcggagcagtggatgcaccaccgcctcctcccccaggagctccgggagcgcgtccgccgctacgacgcctacaagtgggtcaacacccggggcgtcgacgaggaggtcctcgtcgccaacctccccaaggacctccgccgcgacatcaagcgccacctctgcctcggcctcgtccgccgcgtcccgctcttcgccaacatggacgagcgcctcctcgacgccatctgcgagcgcctccgccccgccctctacaccgagcgcaccttcatcatccgcgagggcgaccccgtcgaccagatgctcttcatcatccgcggctgcctcgagagcatcaccaccgacggcggccgctccggcttcttcaaccgcagcctcctcgaggagagcgacttctgcggcgaggagctcctcacctgggcgctcgaccccaaggccggcctctccctcccctcctccacccgcaccgtcagggccctctccgaggtcgaggccttcgccctccactccgacgagctcaagttcgtggcggggcagttccgccggatgcacagcaagcaggtgcagcacaccttccggttctactcccagcagtggcggacgtgggcggccacctacatccaggccgcctggaggcgccacctcaagcggagggcggcggagctgcggcggagggaggaggaggaggaggaggccgccgcgatccgctcgtcgacggggctcaagaccaccatgctggtgtcgcgcttcgccgccaacgccatgcgcggcgtccaccggcagcgatccaggcgggccgacgaggtcctcatgatgcccatgcccaagccctccgagcctgatttcggcgccgattactgatcagccggcaaatgcatgtgaattagcgcttatgaaatgggtgtaaattgtgagtaaatgttgtcggatttagctgtgcagtgcagtactccctccatttgatagtcatatttcatcttggcacacagactaaggataagtaattctacttatcatctatttaaatgtgctactagtcattcctcgtaaacaagtgattcattaatatttacatttctcaatgcccatgtagccaatcatgtgtggaagaatgaagagtcatgtattaaatccaagaaagtcattaagatgataagttgttggattgaaatatacctatcaaaaataaaattttcagatttggaaatatgactatcaaaaatagatggagggagtactacagtgtgacagtgttgatcggctttgcgtaaaccggtacttgatcaaagctagaaatattatacccaatcttgctttacataaacaggtgtttctatcttgttagttaggggatgttagacacacaattgagcaaagtttatcaagctcatagtaaagtttcttagtatttctctacatcagtacgactgtcaaggcaaagtttatcaagctcatatatagtacaggctgtgaatcaccaaactccaaatctgcttgaggcaaatgtaatactccctccgtccctaaatatttaacaccattgacttttttaaacatgtttgaccgttcgtcttattcaaaaacttttgttaaatatgtaaaactatatgtatacataaaagtatatttaacaatgaatcaaatgatatgaaaagaattaataattacttaaatttttttgaataagacgaacggtcaaacatgttttaaaaagtcaacggcataaaatatttagggacggaaggagcagtaactattaacagctcaggacttgagcaaagggttctctggactgaaggctgggaaccaccaagctccaaagctgcttgaggcaaatgtaatagtaaccctttaacattgtatcttaagttaagacggccatttgaaaaaacaaataaaatggtactaacttaaaacaagagattactttgtaagctgcttgaggcaaatgtagtaactctttaacattgaatcataatacatcgatttgaaaaaaaaacaaataaaatgacaacttaaaacgagagattactttgtttgccctcatgtatggtccaactatctttaaggtcaccaataggcaattgggtgccaacaccataactgatggctgccgctcccgtcggatggcctaaacaaccaaagaataagccaaaatttaaattttcaaacttaattttgagatattttcaatgtaggttctttttcagcattggattttaagttaccaagaatacatatataaaagttttacctacaaattcatttttattcgttttggcttattaggaaaaaagccaaatgatgggggcctaggtatggtgaccatggccgtggaaggagccaatccatctaaaggtaccagcacccatgttacaccaccagccttggcattgagcatgacagccatcttcatagcgaatccatgaagtcaccatgatagggacctcctttggtatttctctgtattcctaattcccgtaggaatcatggggaattccatccaattcctatgatactcaaatgtcctattacagtgttttctttccatttctacatcccaaagaataagaccaactataaatttgaacaaatgcattaaaaccaactccatttcattatctaaaaaaaactccatttcattatttatttgattgaaaggatcactgtaaactttggtatgaggcttttgccaaaccatggcttaaccaatctacatcctcgaggtctctttctaatgcaacagcgatgcccttgcatattccttccataaatcatattacctggttctattgattggatcggaatacatccgagtgaatcggaatatagtgaatggtactggtaaactgtacaagtgtgtgcatcaattctcttttgggtgtgcatcttgcatctagtgatacttacatctgatctcttttaggacatatgttgtaaacttacatctgatctagagccttttcttccgagcagttggggcatgagatgcaacagcagtagcctgtgctgagcatgagcagaaaccacgcagaactgcagttacagcagccagagcgaatggaacgtacagctgaatcagcttcggtgttgttcttcctgagcccagcatctctccgaagattgcagactgaagaaaatgcagccaatattagaaacaaatcaagaagactcatggtataataagacgctatcaattatatcacacaaagattggttgactaatgaaacaattctgaatgtagtagaatccaatagatctactccagcaagcaattagggaaacaagtagcatgaaagtggagtttccccccaataactagccaaatccatctctcctatgccgtgctcgatcagatcacaatcatcctgtccgatctaagaaggcgagaaacaatcgagagagttcgttaccatgtaggtgagcacgtagacgcccgccatgatgtaggtggcgccggaccagggccggcgcgcgaggatgccgtagaggttggcgacgcagaccggccagaggaaggcgaggtcgagccaaacgaggccgcgaaagaaggacggcgggtcggcgacgaggtagtggccgaactcggcggcgaaccaccggtggatgccgacgagcggcgccgggtagaggccgcgagggaggacgacctgggcgtcgaacagcggcgccgccaccgccatggtcaaggagagcagcgccaccaccgcgtcggccgccgccgtgacgaagcccatttttggtcgctcctgcccctctggagccaaatgagtactattaaggggctgtttggtttccagtgacttattccaagtacatgtcacatcgaatgtttggacactaatttagtgtattaaacatatactaattaaaaaactcatttcataatattagactaattcgtgagacgaatcttttgagtctaattacgccataattttgataatgtgatgctacagtaaacttttgataattatggattaattaggcttaaaaagatcatctcgtggattagctctcatttatataattagttttttgttagtctatgtttaatactctaaattagcgtctaaacatccgatgtgacatgggctaaaaaattttagccctatctataacaccccctaatttcgatgagaaattatttgttttaataatctacagagtcaaccctttttcactagtttatggtaaaaataattttaatatctgcagtactaatagtatatttgcgtgaatatgctttagtatacaaatatttttttatcaatgtatgccgtttactaattgtttttaatcaatatattctaaaagtatttgtttattaaatttgtactaacaatcgtctcaaccgcttgatttaggtagttagaagttatataaaatctagatgcactcatgacataacacagtgagtattaacaagaatttagtaagaaaaagttagtacgtatatatatatatatagccctttccattttaaaactatactccctccgctcaaaaacctaaacatatcatgattcgttgtactaaattaaatggcatctaattttatgtttgtttttttctaacggaaagactataggagtatgccttataaaaattggtgtaggcttacatgtattttttttccttgcgtaaaatataatattttttaccttcaaacactcaacgaagtctatttttcatcttgaactataaaaccaattattcttcactttgataatggtttcagaggtgttctttttgttaccttactaaccatcgtgctattatatgtcatcatggttgctaataagacattggctatggctccacatttgaagctgttttctttttcaccgtttcttctcgcagtaaagtgattagagggggagatgtgaggagacggaggaaagcaaatgtatgatatgtaggctccatgcaaatgttagtacttataatggcattaaatagtgttgtgactttcaacatggcaaagaccactgctaaaatatatcttgaggtgaacttgtctagttttaaagatttacggtgaaaataaacatttttatatttcagggtggaaaacattttttttctctgatacgatggagaacatctaccattctttaaaatgttcccccactaaattacaaccatatctttgtagtaaagcatcctttgaaatatagtaattctaaagaatcttagttcgaaattgtctttaatacctattatcggatactttgagagatctgagatctcccacattaaccagaagatctaagttactgattacgtgaatcttattatcgtgatagtagatggtactgatagtttcgagaatgttgtaaattgggttaccgatggatcaaaccccctgtcattgtcgcatgcatgcaatgtaggtagctagntatttcttctccttcattcttcctctnttaaaatattttttctaaaatatttatccgatctacgatccaatcacaccattgtatccgttgcaattaaaactttacaacaagataacatattattatattatattaaaagaaaagcatacgtttcaaactgttaaaactcaatgttttatatgtgatagtgatatattttaatgtgcgtcttcaacgtgtttcaaaaattcccgaagctacttgttactaccctctctcctctttcttcacctcattcatgcatgcattagtgagcttcaaaacgatttttatgctaaactacttatccaatttatgatctgatcacaccgttgtatttgttataattaatctttataacaagatatcacatgattatattttgatgaaagaaaaacacatgtttcaatccatcaacacttattgtttcatatgtgatagcgatatgtttcatcgtgtatcttcaccatgtttcacaaaatttttaaatgtttcagttactggtttttttgtttcaccatatatataacttggtgtttcaatcgttggtgaactggaacattttaccgaccgattttttggtgaactggaatattttactgaccggttttttggggcattggacacccaatgagaagattcttcctgatagttcgtgttagacaaacactatctggccctagtttctcaaaaataacttttgaaaaatggaaaacatgaagttctacattcatcttggactcgtaattcagtgttttaattagcaagctgtagttaatatggactcttattttaatgtaacactgtaatttaaaaaataaccaacatgtttagcatataattaaaattttaatactatcaatgcaataaaaggatcgatagctagttggtctaatctatcaatatgttatatcataacgatatctttaaaagaagctatcatattcactacaaagactagaaatcatgacattaatcagaggggaaagcaaaaaaatgtaaacgttagattatcatgggtctagaatgttattgtaaacaaaatgcatgccaataatgacaaaaattaagagttttatattaaatccaattatactttccatccaaataacagctatgtagatagtaagatacaaagagttgtatataaaaaataattaatttttccaattcatatagaaatcataattctatttatagaaatagaagatagagttatgtaccaaatctgattatacttctattcagcttttttgtaaaattgcgatggataatctgttagctcttgtgaaaatggtataaaaactctagagtttaaaaggagtattacacatatatatttttttacaaacacagtgtaaatatggacgctcacatgcacacacacttacttctataaacatacatgcacattctatctttatgagcgattgaacatcccgagagatttagcaaatatattaagattggttgagtcatttttttataccacaaaggatatatattctacttgtgctgttgtactgagtgtatatgggcgctagtatatcaattgcaaagtcaataatatagggcttgttcacttttgttgcccaaatcaactataccagattttggtaatgctaacttttgatacattttggcattatcaaatttcggtagtgttagatttgtttgtttctgaaagttcaagtgccattaatttggttttggtgattaatgacaaatccaattccatgagactaatattgttgtaagcatttctttgtctagtctcatatggatatgaaagtggagtgtgtgagaggtgattcctggacttcatatgagttgagatagaaatgttcattgatggtggacctaaatcacaaggatgaaatacatggagatcaagctatatgtatcactctttctctccatgtacatattgatattttcatatataatatttccacatgattgacatgtgcatgtgagactaatgttttgtttgagtcttatctcttatttagtctatttacattgagaacgtggagatgatgaatgtatgtttttattttaatgactatatttgagaaatgccttctattcttgtataggataagctctcaatgtgtcatatcttgttatgcatactcttgcttcacacaaatattccatatgcatacatttagggggagcaaatcctacaccttagttatgcatgtatttgatccaagttattcactttcatttaattgggatctttacatttgagcatatatttgagtatatgacacttgtggtgttgattaatactcatcatttattcatatccttttatacatgtgattggttagtcaacatgtggaggttgacaactggatcattgagactaataatttcactaagttaattgagaaaaataggttccaaggattgaaaaggtgttgacgctcaagtgatatgattacacctaaaataccaagaataacaaagcgaagatattgaatatgtgggatacgaagtggctactatggcaagacggtgaagggcaagcgatgctcggtcgcgatggaccatgcggaggtgaagggcaagcaaggggcttggcgccgaagaaccaaatccagtggtgaagggcgagtgacggctttgtcatgatggaccgtgtgagaccatttgaagctacaaataaccgcatcaatcatttgaaaaatatatggtgaaacggttttggcgttggcgtcccttaagataaaggaaggaaatggaaacaaggcattcctattggtataattctcttcctatttatatttgagtataggaatgatgtactatttagagggatgcaacgtcgatgcgtttgtgtatgtctcggtgctcaaagtgacctatcatactactaccttgagagaaacccaagctttaacctatcctttgagtggttttagaccttgttcttggttgagttgggtagtcctctaagtgagctttccatagagtccaagatcataaaaaacggactcccaagcaaaaagttatgattgttttactctgtgcttttcggaagttccgaaaaattatcggaagttccgaaaatcatcagaagttccgaaaatggctgcgaaactgagttttgcttttgtaaattttcggaagttccaaaaactcctatctttgcctctgtaggatcgagatgtcgactagaggggcgggtgaataggcgatttaaaactaaataacacctaatcaaatctaacctaagttgctaggcttggtaagggtgaactctaactaatcaactaagttatgttttgcaaacctagggtgatagtggctcaattatatctctaagaaagtaaatcacactcctatgtcaatgttttgcaatcctagggtgatatgatctcaagtatgtctctagaaatgtaaattgcacaaatgtaaatgcgacaatcaaatgagacaatgagacaagagattattcaccgaggttcggaaactcgccggtttcctactccccgttgaggcgagcccaactccaccgctcaaccacgaagccaccgcacgcccccttcgtcaaggggtgggcaaggcgggagccggcacacagagaggactacccaagcctcgatcactcggggtagttcttccttcactccgaaggtggtgaactccaaaccactcacaaaccggtgccgggcctcctccacaatcttctcggagagatcaccgggcaacttctccacaagccgtctaggaggcggcaacctccgagagtaacaagcaatgacccggtgtggagatgatcaagtgccacactagctctacaatggaagcaaatgcacttgactcttggctaaacaaccctctaacacactagatggatgaacacaaagctcaagtgagtgtgagagaggtgcaaggggtgttgtagcgcccgttccgtcgtggcgcctagcgggaaaattatctcttaaaaaccctaattgcgaaatttgtttctttgcttgttgtctagtgtccgtgccatctcaaggtctcaatccgcgatcgatcgtcgagatcaattccgaatccaattccttccaaatcgaatccctccgcaaaagtctagtttgcctcccccgggttcgatgggccgaattccgctcggcccatctcttccccgg

SEQ ID NO: 7835 - DNA, 1727 bp, Oryza sativa
tgaagcataaagattccatgggcaaccttctgcacaatgagctcttatcctcctcctatcatttctaggcatcttgatctcaaccctattccttacactgtactcagtaattgcttgtctcaacttctcaacagatgggaaaacaagaccaaccttgaaattaggattgttcaagtcctcttctgcaaatgacttgaacttgagcctgacaccctcatcatcagaatctgctgcattaagctcttcctcatcagtatcttcactttcatctcctctaggcacaattgcaagatttcccttcaacctgcttcctctggctttctttcccttcaatattttctttcctttggccaccccctcatctatcacattttcatcaacataatcaacaaacaagtcatcatcaccatcatctaattcatagtcactatcatagaattcctcatcactgtcatcactctctgtcccactgtcttcttcatcacaatcatcttcttgttgctccctgttgttatgctcttttagattgctctgtggctgccttgttccctgttgttggctgctacttctgctccttaagattaccctttttgctggttgttgctctcaccttattatcttctctacacatataactttattggggctgataacctttggtaaaggtgtacctggattgtctatgatatcatcccagtcaatccctgcaactttgtcatcatggtcaatatatacaactaaggtcctgaacttttcaaccattgatgccatcacatttgtatcagtatcactaaccaccactcttaacccatctgaaatgtccttaccaggtaacagccaataaatcttcaaggtgggagtcctaaggtatccaagatcctcaacgaactggtccagccatagtggagaccaagtgtctatctcgacattatcaaaccaactcactttgccattcaaataagaacggagattaccatgcccaacgaaaaaacccccacggtgaaccttcactgtgaactcatctgacccatcacctagtaaggaagaaacaaatccttcaatccacgatacagcatgtaaacttgtgcaaacaaaaaaccctagctttgccgtacggcaaaacatgcatcgaaccgagccagcaaattccaaattttctaccaacagcaaggtacattactgcctattatcgatctaaacctgctagcatacaaggattagggcttgattttactcaccgtacacaggcgcgtctccacctagtcgacgcaatcttgccaccattctctgccgtcgcgtccgtcgatgggtgcagacagaatcactcccccaccctctctaccaatcctatgatcgattggcgttggttgtcggcgatcaccggcgatcaccacctcctctcgcttgcgtcgcccacttcgcccttcccacaccgaggataacgaggagtcggggatttcgtccttcccgcgccgaggaaaaaaaagagtgggggatttatcgtctgagggctggcgaaaaaataaggggcttaatgcataatgcaccaccccggctgtctcctcccctccacgttggcaagccacgtcagcgagcagaccgagtcaaatggggtttggacaggcaatgtacggctaagcaagtttagggacctgtaaatgcgatttgagagtttggggacctagatgacacacccttacaagtttgaggaccgctggtgcacttta

SEQ ID NO: 7836 - DNA, 11821 bp, Oryza sativa
tattggcatcgttaaaaaactcaactagcatatgcttagccaagaggatgcaccaaatactaaattgtcaagttcttgtactggaacacccacttgtcaagttgttgcattcgaacgtttaatttttaattttttgcactatatcgcacccacctgccaagttgttgtaccgtaggtgcaatttactcttatgttaaatacaacgggaatactcctaaataatttacatcaaggctgcactcaacaaggtttttgcctgggcaaggccattaattatttagtactcacttcgtccattttaagcacaactataaattttaaactataaattttaagtttatgcatccaactttaatcgtacgtcttatttaatttattttaaaaagtaaaaaaatataagtcaagtataaagtagtactattcatgttttatcatctaataacaataaaaataataatcataaaaatattttaaataagacaaatgatcaaaattagatacggaaagttatggttacggttaaaatgggacggagagagtagctacgtatctgtcgaagtcatacatgtgttgtacgccgtagaatacaccacatgtgtatacggtgtttggtaagtactccctccttccctaaatgtttgacaccgttgacttttttaaacatgtttgactgttcgttttatttaaaaacttttgtgatatgtgtaaaactatatgtatacataaaaatatatttaacaataaatcaaatgttagaaaaagaattaacaattacttaaatttttttgaataagacgaacggtcaaacattttaaaaaaagtcaatggcgtcaaatattttgggatggaagtagtactagtagtggctagctgccactaccgctagctcacatggctgtctttttctctaatttggcgacgattataaataaccaagtcattccctcgtattttctttccttttgctcttgttagtcaacaaatgttgtcactatcataaataaatggtattgctatcatgaatagatggtatcatgctttttccaatctgtcataaataaaggataacaatatcatctgtttttttcgtactccctatctgtaaatttgcgagagaagatttaattaaagtttcacctttgttgtaaaacggaaaattttttaaatccctttccatatggatcagtacagctatgacaaatattcagggaaaaaaaagttcacgttagacaggtgtcctcggtaaaattaagttgacatactcgcaaacctcttagaccttaatttgaaatggagcagttttacaatatttaaactaaaatataaaaagctcggcgaaatttctgcgtttcaaaaagcgtcccatttctttaaatttcaagaattgaaccctaaaaacaactatttaagatatattcagggctggtttggtttgaggcataaattaggcttaccaatatttaacaattttaatagcgtttagtgtctatttggtttgaagccaaattttagcatgcctaagaaaataggccatttcaatagtgaacttaggctattttggcttcaatccaaacacaactttaccttaccaaaattagtcatgacaaaacttgccaaaatttgacactgataaaatttggtaaggcctatttaggccacaaaccaaaccacccctcaaccatttttgacctttagctgcgaggtttaacaatttaccatctgaatatacatatcccagacatattaaaaatctcaaattgaacatttcatccatggaaacggaaggagccttctagaaccaagggcgcatcgagattcgtgctcaaacggaaaggacgcgatccaacctccatggcccaaaaatagacgggcgagatgaacagcaaccaattcacaccccccttaattgcccgccacgtcaccgattaattgcgcccttaattgggtttaattaagatccagcgagcaaacgccagccatatataatactatatattaaaaaaaaaagacacaaacacacacacacacacacgcagaccacgcacgcgtcctaacctcctctcctcactcccctcctcctcctcgtccgcgacccaccacccaaagatctcgccctcctctcgaaaatctcccactctcctggccctccggggattcgcgcgcgcgctgcttcgctcgatttggtttctggctggattggatccggggaggaggaggtggggttcggtttcgtgccgccattttccccaatttgggtgctgcgcgcgtccgttttcttggctgttcttgggtgggtgaggtggggcggtcggatcttgccgggatgggcgagctttgggcgggatttgatcggctcggagcgtagggcgcggcgggcattggccatttttcctcttttgcccgatttttgatttttgttttttttgggttcttgggagaggctcgcgcggctgcgtccctggaagaaatcttgtgcccatttcgtcgtgctttgtggtgtccctccaagatcgctagatccaattctctgggagcattttcgtttcttcccctcgattcgagagactgtcactatcaatcgctgtcatctcatctcccaaccttttttttcttaccctcgcggaaatctaatccttttttttttcaatttcgatttagttgctgttcgtcctcctccaccaagaatcacccacccgcgagatccaatccaatcctctcgcttgcattttctgctgctgcgtgcgcgtgctgagatttcattcggatttgttgggggttcgctgagatcggagatgacgtcgccggcgacgacgtacgcctcgccgttcgtgctgtcggtgctcctcctcgtctccatcccggtcatcttcctcctcgcgccgcgcctcctcccgcccaagacgcttccggccatcccggacgccgacgagtccgacgacctcgcgctcttccgccgcgccatactctcctcctcctccccctcctccgccacgcccacgccctcctccgccgcgtcctacttcttccgccgccgccccgcccccaaggtcgccttcctcttcctcaccaactccgacctcgtcttctccccgctctgggagaagttcttccgcggccaccaccacctcttcaacctctacgtccacgccgaccctttctccgccctcacgatgccgccgacgccctcgttccgcggccgattcgtcccggccaaggccacgcagcgcgcctcccccaccctcatctccgccgcccgccgcctcatcgccaccgccctgctcgacgacccatccaaccagttcttcgctctcctctcgcaatcctgcatcccgctccacccgttccccacgctgtacaacacgctcctctccgacaatgccgggcctcatggccgccaccgcagcttcatcgagataatggacgatgcctacatgattcatgataggtactatgcccgaggcgacgatgtgatgctcccggaggtgccgtacgaccagttccggttcgggtcgcagttctttgtgttgacgaggaagcatgccatcatggtcgtcagggacatgaagctatggaggaagtttaagcttccttgcctgatcaagcgcagagactcgtgctatccagaggagcactacttcccgacattgctggatatgcaagaccccgaaggctgcaccgggtatactctgacaagggtgaactggacggatcaagtcgagggccaccctcacacataccggcctggggaggtgtctgcaagcctgatcaaggagctgaggaaatcaaatgggacatactcgtacatgttcgcccgcaagtttgctcccgagtgccttgagccactgatggagattgcagactctgtcatcctacgtgactaatccagcaacaacaccacatttcagggtgtcggaatttgtacactgaggtgaatgaggtatggatatgtactgttgctaaggtggtgtcaaaaagatctaatcttcttttaggtgttgtgttggagacaatgtcactgaatggagtgtacatagtatgaaatgcgggaattttaggttgttctgtaatttgtatgcttaacacttacgcaataaagtggcatgctacatcaagagtgttgttgtgtcatcaaatggaatgcttactacattggattgttcgtgtatctgcaactgtaagtttctgtttgttagattgtttagaagtatttgctaattggtagaggccggtgggtcttttgctgttgctgaacatatgttcttgtgccattttctcaaccaggtcagatgtacattacacaaattactatacaagtcattactgtcattttcttggttctggtgacattcataccactcatgtaatttggtttgaaacattttgaaaatattttaatattaagaaaacctgtttctatccaaaacatgcttttcttctgctacaaaaacaaacaaattttaattttgatgctcattctgatttttgttgcagggttgtgatgtgatgaacaagcacagagtgtccatctatgcccttgaactactacgtgaggaacaacatatcccctctgttttgttattcagagattttccagcaattgaatgcgctgctgggaggtgaggatggtatgactacaaattgtccctacgtgagtatcctgtatgaatgtgacaatctgttggaaagtaatagtagggtgttagttagcatgatcgtcctatgtattacatggtggcactgtaaatacatgcagtgatggtttattatttttgttccatacatgccacggctattgttattacacttcttatgttctgcttgccatgataatgacagtttgtttcttagtcggtcttgcactttgaagtgataataataataataataataatagtaataataaaagggcctattgatttctgtaggatgtttttttatgaattattttgtgaagaaaaaaaaagtagatctgcattaacagggttcaaagatcataatatgcccattttttgggttcaaagatgtaggcttaaaccctaatatacccactgttgggttgggacttgggagaatatggtttcctaaatctattggccgaacttccatataccctacccgctgccccctctgctaataggcattgtgatatttctgtcctgaatctatgctgctcctaaactgtacatagcgattggtatggcttttggggtagatcataaggttaaaatatgggcgttaattgtaactaggaaggtggcccgcgcgtatgcgcacgcgcgggcacttatattattgaaagataagattattgtatgttcagaaattttgtctcatagatttagggcaaactaaagtttggataatgttattttataataatttaaggggtctattttttttaaggtatcttagaaaaccattcacaaacttttgagtaggagatggattaagtacttacgatttttgaatcatgttttttttctcgagtaaattataaactattgatagttaattatcataagtccatgtatatacataccgtgtagtatggccgcaaattaaaaatgcgagtgcaagatactcaaaattcttttgattaaatcgtctcatgaaggcgtatgatatagtaataaagggagggaagcatatgcatgggaaaaaaaagaagaaagagaaaaatgaaaaaatggaggggaggcgtacgtagccgcgcacgtaggtgcgtacctttgtcgaggtctagtatttagtttgttttaagatcagtttaatctaacggtttataatagatactttgatatttttcatgagaatttctaatatttgccctaatttattatagcaccacgtggcagcttaagagtattttaaggaattttaaatgactaattagaatattaactacgcaatatatatgtatgggacatatggtaatatttgttctagcttcatccatgtttatatacatgtagagagaaattaattttgtggctagcaagccattagatgtctaattaatagcaattaattttgacacctatttacaattgttcagagtaactcttatatattcatcttacgactttgatgatccgttgatcaccaatttactgatcaccatggctcgcatgaaaaaaatatgtagtacttaaggtttaggacagttgaaattgatgaattatataatttatgtgatagctatttgagggtataaatgaatgaattgacttctaaaaagttagaatgttgtgtaaagaagacaccatttagaaacttggaaagagtgcaaacaaaaatccaaaatatggaatcggaaaaaaaagagagggccttaaactccctttatcacccttgtcgtagtaagagttctattgatattcgttaatattgcgctcacatttataacataatgattcctttcacatgtacgaacaaatagtacaaaatctaaatacgacataacacaaatacattataattgttatgtaatcaactctcggtttcaacttaaacagagctaattagtgttgagaaaaacacaacacatggtgcttaattattctctcgctgcatcacacctttaattttcttttcatgttattaacaaaattaatcatctccatatatgatttgatatgtggcaaagcggtagtgctatagcggttgtgatcaccttaaatgtctcagacactatgctttgtcacacgtgcgaaaggtaaaagtgcagacgtgcattatgcaacgggcaaaaagagaatttttgacgctttatttattagcaaataatagatccgatgattacatcgtgtactttttaaattgttaatttaatgggtacacaatataatggtgtaggctttattttgaaacagtgcattacatgagaataatagaccaatgtaataaaaagtagatctgatgatttatataatggagtgcccgtataaattagttaatatagatattgtttatttgataggtacacgatataattgtgtaaaacttattttaaaatagtgcattatttgaaaataatagtaaagtaatgagtacatcggcttaagttatatgatggtagattttttgtttgtaaaattatgattatttaaaaaatatatccattatatatataaatggaaaaaagaagaaaaaaggaaagaggggggggggggtggaagcgtacgtgtaagtacgtatatactccacctgccaatgtgtgggaggggaggataggtgggacccatggtatttagtttgttttaagatcaattttatctaacggtgtataatattggacccaccaatttaaatgaaaatcaagggatagatgttttgattttttttttagaatttctaggattttctctattttattagagcgccacgtggcggtttgagagcgtttgtaggaagtttcatggacgacttttagtatataatagaagatggtacattagaggggattgctgtcgtggtcttggaaagtataagcaagaagagtttgggatgaacattggtttgttttagcacctcagcaagtttttggttgcaaaaagaaaaggagacctatttcattctttggaacttctgcctgtatttagatatgcctaaaaccatagtagatggcttgtgtctgtctgtctgtctcctctctgtcgccaggttttctctgggtgtttgcaactgacatctggttaattgttcctcttttgtcatgattatttttcagaatggtggatcttaaaacagttatggctagcagtagcactaatgtacagcttggtagcagtcaaccgtgttacctgtttggcgtccatggacgagagtgactgaaagcatggaaatatcaaatatggcatgatgttgtatttatgctgtactccctccgtttataatttttatattataagtcgtttgagttttttcctagtcaaattttgttaagtttaattaagtttataaaagaatttagcaacatctaaaatatcaaattagtttcatttaatttaatattaaatatattttaataatatgctaaaaatagtactatatttttatataaagttactcattgactaagaaataagtcggacgacttaaaatatgaaacggagcgagtataaacaagttgctgccttgctagaaatctgtgatggcattttttttttgttgaatgttcttcgtcggattgaaaaggtgatcaactcttaatctgcgactgaaaaaactgaagtgatgaagcagcaattagcccactgaactaacaacgaatttaacagcgccgaaaagtccaaattgttgagaaatttaggtgccacgtagatgagggatgttacagacatgtgtgggacacacataggtgccatgtaggataaaccacttaaggattgatttttgagaaaaatataaaaaccacatctataagtcactttaagtttgacattctaccctataaatcattttattgtaaatacctatccacttactcagttttattgcaaaaaccaacgtttgtgcatacatgtttaaccgaattaatatattttcataaagtgtgagccgtaaggtgttctttactaaaattaaatattgcaaagtgtagttttgacaatttttttttaagatttcacaaatagaattatgttgagagtttaaatgttgccatattgagttttgctgtatgaaaaaaaaaagttcaatcaaatatgaaaaataagtctaatgcacgcatttggataagattggcttggctaacttagcatgtggtgactctagctcagtgataacgaattgattcggttaagcacgtgtgcaatgaggtggtttttttaagtaaaactgaataagtgggtgggtatctgtcgctttgcttcgcccgcctgcgcgtcatcaccctactccgtcgtcgctcgcctgctccgccgttctcctcgtcgcccaatgctgcggcgcctgcccgtgtggggctgcatcaccggcggcggcgacacagtgccgtccacgccattcgcgaccagccaccgtcctcgccttctcctgtgtcgcagccgacgtcgccgcctcttctcccgcctcaccccgacggcctcctccctagcagcgccggccagccaccgtcctcgccttctcccgtgttgcagccgtcattgctgcttcctctcccgcctcaccccggcggcctcctccccagcagcgccggtcggcttgcctagagaagagaagaatgagatagaggaggagggggaatagggagggtgctgacgtggcatcttgacatgtggggtccacgtgtgtcccacgctgactcagccatcatgtagtgcaaaatcggggtcaaaatcaccgaaggacctaaagtgaatggtttgtgtaagttgagggatatcatatatctggttttgtggttggggacgattttgtaactcgatgacaagttgagggaccttcggtatactttttcctacttccaatgttgtcgagaaatttagcccacagaacgagcggccccaaaggttcagtcagaccgacccaggttcatgtcacagaaaagtcaacccacttagtttaacgcccaacagcgtcaagaagctcagcccaacccactaacgaccacgacggcccatcttacccacagcccaacaggaccagccctcaataatttcagcccgctaaactaaccggcccaccaacccacctcctttccccttcacctctcgcctccacctccatcgctgtcacccacgagctcgcctccctcaactcaaccacttctcctactacagccaacctcctcttgcctcgcctcgccacggatcgcgccgccatggccgcctccgcctccgcgccgccgcattcgctgctgctggccgccgtcgcgctcgcggcgctcgcgtcggtggcggcggcgagggacgagaacggggtgtacgacccctgcagcgacacgcggatccagcgcggggacgggttcagcttcgggatcgccttcgccaccctcggcgccttctactccggcggatccgtgcagctctccccctgcgaccgccgcctcagcctcgcctcctccggccagctcgccgtcttccgccccaaggtcgacgagatctccctcctcaccatcaacaccaccaccggcttcaaccccgtaagcccatcccccccaccttccccttcttccctgcacgcgtctcatgggggttggtttactttggttgggtgggtggatccggtggagcttgcgccgtacctgctcgtggaaatgccgcactaggtggcggtcggttaggcgtgatctgctggtcagcttctgtgtttcttggtttgatctgagctgcaggaagcttggactggtaggattctggaggctaatgtagcacttcttgatctgggtagagcttggagtaaactcgttgctcgatcagtatgcttgtgacacgcaactatgatgaaggaatttcgctccgtacgagttcatggcaatgtagtagatgagctggagactagctgggattgctgatcctgttgccttagtgctgggttgttgctttaagtgatctcttgcaagaactctcattttagtgtgacctattgtcatgtgggtccttttcttcaccctgacattcctgtggagggcatcgggcctgggtttttacgtgcgaatagtctacatagtgacatagaagctcttttctgtgggtactggtaggattaacctcaaatgttatagtattccacccatctcttgcttgagtacactattttgcatttctacccaaaatgtagcgtgaaggatactgatgtactttgtgtttgtgattgtaggcaatagtgcagatagagacagtgaatgtgttaaattaaattgatgataatagcaagtgttagatgatgttattttcttcttccaaatgaattccattttcactgagttaattgacttctgtttagataggtgtaatcatggtttgtggttaaatgccttgatacatttggtctctttgatggaccttgaataatgctcacaggttatgcaagtatgcaacatatgaatactttggtgattttgtcatattatattgtggtgaaggaagccttctagttttcttatcacctgtaagttagtgactatagtctacaattccattaaatgcaacactaacaatatctgttctagacttgttgtgtcccaatcttgctaatttgtagtcacataaaggaatatttttctttggtttaatataaatgcatttatagtttatagcgtttcaaggactgctaaaccttgaaatttgactgctatgcatattgcatcaatttccaaggtatacctacttctaacttaatagtggccactacccaaagtcatcaaggacatactgacatagcatcatgtatgtgaagtactttgtactattgttttatcttcttttttttgaaagtttttttctgacatgctgctttgagaaaaaaatcctatgacaactaaaaactcttatttttctcatgaaatccattcagttttcatcctatggactactgttatcatgctatgatacgccaatggtgaatccagatctgtttagaaaaccatttgcattttgtacccaagcatgcaatgctagagcaagaacctaggcttgagaatttaatcccagcatgtcccgcattaagaaatgtcatttccacttttgatctgcttatgtctgtagtttatgtcaaataaaggcttctccaattgtgagaccagataagctttagggcctgtttggtacagctccaactcctatatataactccaggagttgagtctggagtggagttg

SEQ ID NO: 7837 - DNA, 7574 bp, Oryza sativa
  unsure (1)..(7574): unsure at all n locations
cggaattaacatctcgtaaagcattagttttagaaaacaaaacttcacgagatttgcaatcatcattaggaatcaaagattttaatctatcaattttagcttttagaatctcaatagtatgatcactctcatcaagcatatagaacatgtattaagtttctcagcaaacttgaaaggagcatgttctaattgatcagaattaagcttttcttcactatcactatcagattcatccacttcagaatttgcatgcgagcaacaaaagctaaatcaacaacatgcttactttgccattgctctatttttcttactctaattaattgtaatctcaagcttctatgagttctcgagttagcctctgcatgcaactctttttcttctccttcttgttgttcttcttatccacttcctcctttattgccttcttgcggttaggacaattgaacttgatgtgcttcaactctccacacccaaaagcattgaacgggtccacctcacttcctgctttttactttttcaaaagcccgagaaattatattagcaacaaaaactaagtcctcctcaccaagttcctcccgttgatcatcagacaaagcattaaaagcaaaaagagccgacataggagaagtatccaaagaagatccagatgaagacaccaaggcaacaaatttagaattattccttttcaaaagaatattcatctcataagttttcaatttttgtataaagaatattcaaagttaaagcgttcatgtcaaccgactcctggatagatgtaaattttaacattgcaaatcttcatatcaagatcattcataaagttgatgtggtttgggatcttagaatatttgcatgatgactctgggctaacttaaataaatacgagcttttctcatggttttcgaaattttctttgtgacatcttatattagttttggagaggaaactaaatgaagctatgcagaaggtgaaaacttagagggacaaatagaatataagaactgggacgccccaatccaaaagaatgaagaacaacgacttcaaagattttcgcaaaaattttaccctaaaaatctagtaagttaccgtatataatttatatatatacatataaactttgtgtatgtacgtatacaaagtttatacatatagatataaagtatgtatacacacacgtatataaacttatatatatatatatacacttttaatgtataaaaaatctctactacttaaaaaattgaaaacgtttcagttgtccgtcttaaaataataaaaaaagagcgaacaaaatcttcgcaaggtccgattccgccaccacaggaaacacgatttggattcaaaatcggaagaaattaaccccataaatgtagcgcccgttccgtcgtggcgcctagcgggaaaattatctcttaaaaaccctaattgcgaaatttgtttctttgcttgttgtctagtgtccgtgccatctcaagatctcaatccgcgatcgatcgtcgagatcaattccgaatccaattccttccaaatcgaatccctccgcaaaagtctagtttgcctcccccgggttcgatgggccgaattccgctcggcccatctcttccccggccctcccctctctctcccgggcgccccctctctctctctctctctctctcgctccctcctcccccccggcgcgttccccccctcgctgctcgcgcgtgcgagagccgcgccgagcgcctctctctccggtccgcccacgcgccgcgcgcgcgtgcgcgggagtcgcccgcgccgagcgccccctcctctcgcgcgagctccccgctcgcaaagccggccccgcgcgccgcgtggtttctcgcccgagccgcgtcgtctgcgccgtccgcgtcgcccggtcccgctgcccagccgcgccgcccgttgcttcccgcgcgcgcgtgccgagtggccgaccgcctggtcgccaccggcgtcaccctctgccgcgccagcccgcgcctgtcgcccgtgtcgtcgcgccgctccaaaccatcccaccgtcatcgccgtcgtcatcccccggcccccgccactccgcgcgcaagccgccaagaggcggaggccgagctctcccttccctctgccgcgtcgccccgctccctcctccttttcccgattcggcaaaggggcaagcccctttctctccctccttttcccctttccttcctttttcccctctcgccggcgtcacctcctgtcgccgctttggacgctagccggagcgccagctcgccggcttgaccgttcaatgtcggtttccctcgcccaaaccgacaataccgcccatttaagcccaagccctccccctccaaactctctcattttcgcctccgcgccattgccgccctctgtttcgccgtcgccgatcgtcgttgcgcgtgtcggaggagccggcacgagcaaggacacggaagaggacttcggccgcgccctcttcttcctcttccccggcccgaggccggagagattactcccgcgccgtcggcctctcgtcacatcgcctcgtcccgcacggtagtgtctccctccgttcttcctcctcgctccatctcctccccttagatttcggtagtagctcgagtagcctccccgtagttagctggcgccgccccgaccgttgccatcgctcgccgtgtgctcgccgccgtcgccgcccgagctccgtagcacccgctcgtcgccggcctcgctcggcgtagttccgcccaatccgacgctagcgtcgagttcccgaagccgcgtagatgctctcaccgccgggaatcggcccctcgtggcctcgtcgccgtttccctcttcccttgccgccggttgccgccgccgcaatccgccgccgtcgagcaacctccggcgaatccgagccgttggctcgtctcccctcgtcctgtgcagccacccggtgtgctcgctttcgccggtatcgccgtggctcgctccgccgctcgccgctgaagaggaacaatgaagaactttgaaccgcagatgcagtgcatggcatggcagtcaaactgcagaatcacaaaaggcacagaccagaaaaggatctggggagttggtggcaggtgatggggaagggatataagttctacaggatctgagcaatagaaggatggaaaaatctgaaccgttgaaagattgtaaacctgacttgaagtgaaagagcgcactacaagtataaatattcagcagggaaaattcttcttgtatgcaagaaacttggccaaagaaaaatacacgtaactccaaatacatgaagctagcaactgggaaaaaacaaagggatatgctacatgtccacataggaactgatttgtaaatgtttcaaatccagatgaatataggatagtgataaatgtttttgtttggatcatagtataaggataagagagcagtactaacatttcatagaaagctaacaaaggaaacaaaattagagaactataataggaattgggttatttttacttctccggagttcatatacagtgtaacaagagtgctcttcatacctacaatccccacataagaaacaaaaaacgatccccacagcaggcagccaggcagtatcatcaaagagcctgggatttcacacaggacgatatttttcaggataaactttatatgttgaacgtgtctcccacatgaaaccagcacaatcagcagctcagcctacgactcttcagggggaagttctcttgattaattttagagaatggagaggtaatccccagccttgcatacctgctctttgtgaagtaacttagtacagccactcttctccatatgaagaaataaatcatccaattcttctagcaacccttgttttacaacattttctatcattaaccagtaggtcacaacatttgtcactaaaccattggtcgagagagcagcaaacaaatcctcagcgtcatcatttctattctcaatctgtaaatccatcaaacacggttctgaaccattggagggaatctgaggtgcaactattttggcaaagtaccagactgattatgttgcaagtgctaaattcaaaccgtatcccacttaatcatcctgagatagagttcttttgcagctacagttcttccagcctggaataacccttgcagcagcatctcatatgtaacaatgccaggattcacacccttgccatccatctctctcaaaagagtaagtccatcctctatcctaccattttgagagtaaccattaataatggtattataggtaacgtcactaggttttaccccattgaacaccataactccaagtagtttcattgcttcatccatcttaccatctaagcaatatccatcaatgagtgtattgtatgtattagtattaggttcaatacctatgcgcaccatcaagtcaaacaagtttttggcttctataacccttccttttttgcataggttgcccattattgcattgaagaaaattgtgtcaagacagatgccgcgatcgatcatttcgaaagctagctcctcaaccttgtcccatttgtcacaggtacacaggccatgaattagggtggtaaaaacaacaatgttaggagcaagtccttcagatttgaggctgttgaattgagacaaagcatcatccactctgcctgctgtacaaagtatgtctaatactgttccatagttgactatatcagggttcaatccttgctgcctcatattgctaaatacaagcaaggcctcatctaccttgttatgtttagcatatgcgcccattatcatgttaaagatatgatgaccaagttgcatacctttcttcatcatcaaatccaaaagatcatgcatctcaacaagagctccttcagtagcatagccatgaagcagagtaccataggtagtgctatcaggcttgtgtcccctcttgaccaaagaatcaaaaatctttctagcttctgtgcttttcccattcttgcatagatagtccatcagcgcagtataagtaacgacatcgggttcaacaccatgtctgcacatctttttgaaaatcccaatggcctctttgggctttcctgaagagcaatatccatgcacaagactagtatacatgatgcaatcaggcataacaccgttcttaaccatcctagtaaagacttgtgtggccttgtccattgcttgagtcttggatagggcactgataatcgagctgtaagtcacaacatctggtgatggccctcgatccagcattgcatcaaacagggaataagctttgtccagctgaccctccctaagcaagccattgatgacagtggtatacgccaccacatcgagtgggcagcgccctttatgatcagccatgatatggagcaagtcgagagcttgttgacttgtcttgtcatcacagagacccttgagaagaatggtgtaggagaagagatctggcttgcaacctagctcgggcattcgtcgcagcacaatgtccatcgcatcgctcgtcctcctgcggtcacagaggcccttgagaagaggactgaagaggattgggctcatcctcaaccccgtcgtgatgacacggccgacggtggcgaaagcgaggtccaagcggccgaggcggcggcagcagccaatgacgatgccgtaggtggcgatattgggagccgcactggtggcgccggctctgggcatgcggttgaagagggagatggcgacggcggggctggcacgcgcgacgtcggagagggcgcggttgaggtcgaagatggaggcacggtcgcctcgcttgagcaatctgtcgaacacctggtgtgcgtccccgggctcggtcgctctctgcctccctccttgcttcgtgcgcttggccccaccccgtcctccttgcttcgtgcgcttggagctggaggccccagcccgtcccagcgcgcttccaccgccgcggactcccatggccagcctctccaactccggcgacgccgctcggccgccgccgccgcgtcgtccagagagagaggagagttctgagctggtgggctgagaaactggaatgtggggcccgcacgtcagttcccgaggagatgacccaaatgtgggcctagtgttgggccgcacagatcaccatttccggcccaattaaaggcggcccaagtaaggggagacacatctcagcacaagcaagagggaggctgcggcgccggcggaggcggaggtgagcattgcaatggcgacggtggccggcgacgatggcggcggcggcggtgagttctacctgcggtactacgtggggcacaaggggaagttcgggcacgagttcctggagttcgagttccggcccgacgggaagctccggtacgccaacaactccaactacaagaaggacaccatgatccgcaaggaggtgttcgtctccccctccgtcctccgcgaggccaccaggatcatccacgaatccgaggtcctcttctcttctcttctcttctcttctcttctccccacgtcaatcaatcattcaatctctagggtttagatggggttggtgtacatactacagattatgaaggaggatgacagcaactggccggagccagaccgcgtgggaaggcaggagctggagatcgtgatggggaacgagcacatctccttcaccacctccaagatcggctccctcgtcgacgtccagaccagcaaggaccccgagggcctccgcatcttctactacctcgtccaggtccctctacccaccctttgcctctcacaaatcactcaaggatccattgctagctagctctccatgttttacgctacttgaattggcggcgcatacataaagcgcgtatgagaggtgaaattgttaccatatgcctcatcaattgcatctcgtcttcatccattccataccagcagtgtgtaagataagattgtgtgtttaacttaatcagaattgttcacttgtagttgtgggaggtactaatggctccatgttacaatagtgctcagaagcatgaactttctgttactatacatctcgatgcataaattaacttggcattaggttcatgtcttggaactacatatagttaactatttgctgggttgatagaaaaacatccatatttgatcatgttcacctaggtagtgtttggttgctgggatgggatgggatgggatgggatgaacccatttttaggggtgtttggttcaggggtgagtgggatgggttggtccctacagaggaatattcctctcagatccgggaccaatcggtccggccaaaactggcggacgaactcgtcccacctgggacgagcgacggcgtgaaaccaccgctttgctcgcgcgctcttcctcgggagacggcggcgggctcggcgacggcggcggtgggctcggcaacggcggcggtggggggctcggcgacggcggcggtagatggctcgggcgacggtggcgccggtgggctcgacgacggcggcggcggcgggctcgacgacagcggcggcggggggctcggtggtggcggatccattggtgggagggcggcggcggtgatganctnctgcncggagggacagtcaatcaaannncaccagc

SEQ ID NO: 7838 - DNA, 6155 bp, Oryza sativa
gctccttaagtggtccgcaggtaaaaataatcattaaaaaattaattaaaaatgtgagaacttcgaatcaaattttatggtcttaaataaactcatatgaaaaagttgccaaaaataaagttgtagaagtcgttgagatctaccaattttcttttggtcatttctccatccgagtttgattgaactatataaaatttgaattttaaaatataagaaattcaaatagttttttaggtagtaaatgatttcaaatggaaaagttatcaaaatcaaagttgtataacttatcaagatctacaacttttgtattggtcatttttctatatgactttgtttgaacagtctgaatttgaatttcaaattataacaacttcaaacaacattttcagatactaaatgatttcaactgaaaaaatcgtcaataaaaaattggtgtaactcattaatatctataactttttattttggtcatttattcatccgacaaagtgatttgtaagattattcacagaatgtacatatctattatatagttttataaactataagagagagatgtaaattttgtgaaaatgttagtatcactttatcaaataaagaaatgaccaaaatagaaattatagatcttgatgagttatacaactttgttgttgttgactttttcagctgaaatcgtttattgcttcataatattattgaagatttgaaatttaaattttaaattgataaaacaaagtcacaagaaaaaatggcctaaataataacagtaagaacacaataacatgatagagcatgattttagaaacatttaggaaaaagaatcatccaatttggagttcgtatgagtgagatacactagtttcaattttattttcgcatgcgggcgcttaagtgagccgcatggaaaaatcgatttttccatgcgggcgcttaagtgagccgcatgcaaaaatgacatcatttttgcatgcggacctcttaagagacccgtatgggaaaatcgatttttccatacgggcttcttaaggagccgtttgcgaaaatgccacgtgatttttgcaggcgccactagttatggtccgtttgtaaaaattatggggtctcgtacagaaaaatcacttttgtagtagtggatagtccattcctttcttccaacgttgaactctccgtataaatggaatatcatgggcaacagcaggtagtacgtagacggttgccttttaagtgaccgctcgtaataacacttagtacatacgcggttgcctgagacatcacctagaaaatatatatattcacacgggtggcactgtgtagagatcattcatgtataatctattttttctagatggcgcactcgtaattatccacttgtattgttgttcttttcgtctttctcacggcattacttcaagtgtccaattacaaatccactattatcggttttcgcatggattccggtcatttcctcttccataatttctcaattgctccgtcaaagggagtttgccaatctgatcccatgatctctccatttcctgataaacttctccttttttggcccctatgattaagatggttagcaggttaattccctccaataagctcaaatggagtactagtcaaaccccattcttctgaagccatgcaagaaatgaatcttgtaccaccacactgaaactactggtcacttccagcagcaaatcatgcagccactaccaccacaaaaacaaatgaaacatcacatgcaagcaccttgttggaactccagctcagctgtggggcatgatgctgcactgaaaaatcctttctgatgttgcactgaaatcttactatgtctttttcttttttttttttacagtggtgctgcccaggtgagtggccactggccaccattctttccctccatccagccacctttgcaccgtgacgtcaccatcttatcttctccctgttcttaacacccacatgctcacctcatctcctttccaacatcttgtgtttgatactactactaaaatgcttgctcatgtagttagcctataacacttggatttttcagatgtagtaggattcagacagcattaaccagtggagtactactccctccggttcgttattagttggtgttagagactagactgtttggatggagaaaaaaaaagatgttttagctttggtgtgttacgtttggactaatttaccccttcgtgtatgcaaaacacattaagctagccacacggatataattattatgggtataataggaaatagtcactctaattaattactcattagtatccaaactcttgtctaaagcgttaaattaataaggaacctgagggaggagtaaacattccattcatttttaaataattgatgaccacaactatcttattttaaccataaattatatgtaaataattatattataatgaatgaaagttataggttacatttacgatgcttcgcattccaataagatgacatattttcaactatttataaatcttctgtaataaaggcaagcggtcaaagcttaaactaaatacgtagcatcaatgtcaattactccctccattccaaaacaaatttatttttcacacatcccacacataccaataaaaaaaatttaaaaaacagaataccctcacctttttcaaatctcaatgcaatcattacttattttatctattcccaatatatttatttcatacttttataaactccgatgcaatgattagccaaaaataaatttatttagaacaaacggaagaaataaaaagtgaacttttattgtcttattgttactagaacagaggggttaacttcaggtgttccccccctcctgcaaaagtttgagtgctctttctgcagcagtgttaggagtaccagttaaccagtaaacttaactcaggtgctcactcccttgcaaaaatgtgagtgcctttctatcatgctgctgcttctgtcccttcactccgatgtcctctcaaagtgctaatttccatgtgtcttttgctccttttggatgacagaaagtttggtgccccctttatattttaacttcagttttggtgagccgtgaatgcatccttgtcatgcaatgtttgtccatgatggagtaggatactcctagcttcattggcgaagagaccaagaaaccaggatactagcgaatacgattccttcaatgcaagccaagccaagaaaattctggcctttttttctctgaatttttgcctgcttgagtgacgcctctctggcattctgccatactccatgtatatgcagtggtagcagttctgcatctcctgcagagaacttctgtgcctgtctcgtttctgcaggggtttgctgctaaactaaactgtggttaacagcaaatgttgttacctctgtctcaaaataagtacagccatgggatattcgtgctcaacgtttgaccgttcgtcttatttataaaaattatgaaaaatttaaaaatatttagtcacacataaaatactattcatgttttatcatctaataacaataaaaatactaatcataaaaatttttcaaataagacgaacggtcaaacgtttaacgtgaatagtacaaaactgcacttattttaggacgagggagtattatcaaaaaaaaaaaaaaacaacagatgttgcctgtcggcctgttgctaggtcaggtatcaggtgaacccccaattgtcagaggtggaaaggacagaacacagcttctgattaaaaaaaaacatcctggcaaatgtgttccaagaaattgatacaggaaatcaaactggagaaaggaacactatactgcctccgtcccaaaataagtgcagccgtagatatccgtgttcaacgtttgaccgtccgtcttatttgaaaaatttgtgaaaaatttaaaaatatttagtcacacataaagtattattcatgttttatcatctaatagcaataaaaatactgatcataaaaaattttcaaataagacgaacggtcaaacgttaaacgtaaatagtgcaaaactgtaattacgtaataagtttaatcaacgggtaaatggacaagacgcattggattttacggcaacaatattcagaatatcagaccatcagcagctaagaatctctgtcgcaccaaggattgctgtctgctatatcttcggctagcatgtctgttgccacgttggagacaacagctctgttcctcattggaatattcaccggtcacggttcatttgaaacgcgaaaatctaaacaatttttataggaaacagtataattcctaaaatcctcctttgcattagacattagacctatttcagtgatgtcaaatccattaaaaagaattttccatgatgcaattgcaaacacaagactccaagatagtttaaccatccgatgatcatagacagcaatttctgaaacatgtggcgactggtacatagatgaaagctgttaatatcatgattcactccagaagtttttttacaaacgcgcaaaccggacaaggacctttcttgcgtacatgacattaacatatagcaacccatcagataattgaagttaagtgggaactggaatggaaagaatactagtggaaaatgacgcagaagagcatctccacacaagctaaaatcagatcgggcaaacctaacgagcaataggtacagcatcaggcagggagctccagagaaatagtggcagaagagtatgaacaacgggtgcaccaaaagcctagaagaacttgttgaactggccgctcagggtgtccttcaggttcgagtacagcccgtagagggagtattgccgcaggttagacacctcataccacgagttcagaactgattcgtgtttatcggtgcctgagaaagccagctggatgccgatactgcagtcaacaggtccctggctcttgcagctctgtgttctgaaggcacaggtttgcttgccgatgcaaacaaggcttgaagatttcgcgcaagcaccacagccatccttcttccaatgcaagttttgaagcctgcctttattgaactcaagaacctagacaagtatcatcagatggagacaacattaagaatattctttgtgtcacaagttgataggtgatgggcatagtggtacatctttggttccataccagggtgaagctggagactgtatatgaggaattggacacaaaggttggaacagaccgggctgcatacttcctaccggcaaatgctaccatgtacccaccagctgtggcctaggaaatatacacagaagaattttggttatatactgatccatcatttgatgcattatatataaaaggactgaacaaaaaagtattagatccatcaatgatcttattagatgcataatatgcagaaaacaaaaaaggctgaacactaaacctaatcagtgtccagtaagagccagtgagctgtgacatgataaaattgacgatgctgagtgatcacacaacttagctaatgaaaaacaaagctgaaggaactggttcctcacaatattactatcttatcaaatgttggaacaatttgtaaagaagaagcattttctgttctctctagagcattctaagcaatagtagcaaatatcaacatttgtatgatgaacacattataagctactaaattgacatatatgagggtgaagaccaagatcaacaaagtaaataagatcaagagctacaggtaacattttgaggttaacagtaggccatgttatcaacaatcagagtgtagagttcacctgtttttaaagaaaaaatataatgaaaaaatgacgcaatcaagaaaagctaatgctgaacattattggtggctacagtcaaactactaggcagcgtgcatcatggagcccaagtcagcaaaataaatccttgtgataaactcaagatagaaacgtgcataatcaattgagatacaatgatatttaaacaatttagccaatgcataacctttaacaatctactttatttgaccaaccttttgaaaaaataaataaataatagccggtacgaattgctttggagtttaagggcatgtttggcacagctccagctcctggagctagagcttaggcaaacagtttcagctccaccaaaactgggagtggagttgggtggagctctctcacaaaatgt

SEQ ID NO: 7839 - DNA, 19664 bp, Oryza sativa
gcgatggtaaaattgtagaagttaagcaaaagtcaatggcatattgtagaacatgataaagtcagtggcaaatcgtagacgtgtgacaaagtcagtggtatataatggattctctctttgcatttttatccgcctgcaaaattgaggctgagcgaccggcatacgaaatccgttcttttagcagtgcatgattccagtatttgtattccaatttaaaagtactcaatttgcccgttaattgcaaataccacaaatgcaatcctctcggctatagaatctgttctagaatttttcatttattggaaatactgcggctgagtatcattctaaatcctatcatactgcagggttgaaatcaacaaagcgaatcattttcttgtaactttgattgtttgagctacgaagaaataaacgagcaaaaatactaatttatggggaaaatatttatgttattagcagtttaaaagataagactgaacagtagagtatgatgaaaaaaaaatctaaaaaatcatctgtaaataaaattagatctcaaaatttaaattttggttaccgttgaataagatttatgattgactttgatccttatatgtatcacagacgacagtacgtgcacacatgaatattagtaacgggtgagatgtcatctaaatataataaaatttcgatctctcttgttatgcattactagtactcttactatttatatgtatagtactccctccgtttcaaaatgtttgacaccgttgactttttagtacgtgtttgaccattcgtcttattcaaaaaatttaagtaattatttattcttttcatatcatttaattcattgttaaatatactttcatgtacacatataattttatatatttcacaattttttttaataagacgaacgattaaacatgggttaaaaagtcaacggtgtcctaaaagtacagtccaaccgttttgtcccgttgaaactgcttatatagaaagaacaaatattatatagattccagtgatgacagcaattagatagtagacctaaccaagagttatataaccaaaagatgcactgaagctttgcattacattgtgcaaaaacaaacaccattaatggtgctcatctaatatgctggccatgcagttcttgctttaaaaagctcagaagagaacaggattctgctgcaattaaaggttgctggctggttggcgttccactatatcatccactccctaaaatatcaccatcatcttttctgttggcgagttcatctagttaatttgtgtattgggcttacatgcaagatggccccatgttttcaggtggcatgccttctttttatcctttttctactaggtagttgctcagtgcacaagttttttttccttttttttttatcatgggcattagagcagctataatagcaggctattagccagctataaatatattttcgtgagatgaaagatgagagaagagcagtgagctacagatttgtagtcagctgcagtacggactacaagacgcagtgtatgtatgacaggtgggaccatatattaatagtatagtaagcaactattgtataaattggagttagtagtgggctatactattaaacttgcttttatggatactaatggtttgataatatatagtattaggtgtttgaactgtgtagtttgtgctacttgatgtcacatgtcagtgatgattttagagcgtgccttttagcctttttctatcacagtgatcacgcaaatcaatgagatgtagaatacatgtggacaactcaattgaaattaagtagctagaaacccccttggcatttaaatttcctactatgtttgacatttcatttctcatttatatggctgaacatgttgtagttagtaagaatagatcgtaaggttgaccatcagcactatattttattattgccatgcttactcacaagagggatattttattcacgggcatgcttgaccagtagcgagccataaatctatactcctaataaatcccaaagcactagcaattattatatagagtattttacatcacatacaagaatacaacatcatcatccactagcaattattatctagactattttaaataataatagagtatttttttttcaataattgttttctccttatgtgttggctttattgtttaagttatttttgttgcttgagtatttgctctttttgagagagtattgtaataattggttgtagcttcattgaagcaaaggccggatttaattccattatctaaaaaatctagagtattttaaatatcatacaaacatcatttacaatgttattgtatttttagaactcaatatgcaagcaatgtcaaatcattgtctccacattattttcacattatttaaacatatgcatctatcatttttataatgtataatatgcattcatccatatatcccgcaataaagtgcagggtatctagctattgaaagactagttgatagagtgactatttgattggctatagatgatgtgtcaatttttagagctatcagttggctgtactattaaacttgctcgtacatagaggcttttgcatgggctcttgttctctgaaaataggcaaaattctttgcagaagttcactcgacttcttggcatgcatttctcacctaccaaacatgttagatatatgttattttcttttctggttttctctgaatctctgttaatcttatttaattaaatatatacaaatatctcatttctatttttttatgtggattcatgtgtgaacttgtcacgcccagaaatttagcccaactttccagactattttgtgtattaaatccctgtccaggactagctagggtacacaaaacgacaagtaatataatatacagttccaaacgtaaataaagcgtaaaatacttacagaagagtcacttagtcctcacaccgaaacaaaagcagcagcagcggaaaaaggcgatcctagcgaggcttcagctccactccacaggcaaaactcaactggggtctaagccttggtcttctaactttgtcttcagctcagaagcactacacttctaaaaagggggaataatagcaaggctgagtacaaccaccgtactcagcaagccataccaatgatgcagacgtgcaaggggatacaaggatggcttgtggctatttgcataaaggcgattgtaaaacattttattgagcaaaacggtaaaactgttgagtaattaaagtaatattaaatctccactgatcaacgctacaccacgttgaataggcccaaccaacccacctgaactatagtgcattgggtcgatttattaagtgtgagactaatcacggtgattctggtcaatcgcccataaccacgggcacggctattcgaatagttttactctggcaagaggtacacaactgtacccacaagacacaatccaccggcatgtcaccgtgcccggccggacacgtcaccatgtcgagtgattgtgacaagacccttcatataacccgctctgaccaagcacaccacacctcaggtttcaccaccgcccccagcaggcagcgagcagttccctctcgtgcctaggtgaatccggaagcgacagaggccgtcgcagggcccgccccgctccatcacgcccactcttgcctggatgcatcagccagagaaaagctatacttcaagtcaggcagttacccatttctgcttgtggcaagcgctgtatgtcttccagtgcatcccgcaaaccggtccttacttgccatgggtgcgaccagcaaaaccatgcacccacagcccaccattcagtcgtattttagttggataattacgaccatgaaacatggccggatgtctcgagcacgcagctcatcatgatactaacatgtctaatactgcaattatcccatctactgagctagtggtaattaagcatggctaagcatatagttctagctaggtcatcaaagtaacacaagctagtcaattttcacccaaggttgacaaaggacatatatcaaataacatggcacaagcaagcagataggtaaatcctattcccatgtaattagcaaaacgatgcatatttatttgcaaacaataaaacatttataaatttggatcaacatgcccaaggggaatgtgtgacttgccttgcttcttcaaacaatcttccgaactcttatccttgcgaccgcgatcttccgaaacgacggattctacacgctggcacgcaaaatgaggaaaaactctaataaaaaccaaggaaacagtacataaaaagtaaacaaacatgtagagctcaattttagatgaattttgcaagttgaatggctcaatttggagttcgaatgaattagatatggattttagaagttttgagccattttaatgaatttctagaattattatcgatttattgcacaattaaatcctttatggcatcagccgagaggaaggggtggcgccgacaagcgggccccacccgtcggtgattcacgggaggcgggtgcaccgtggaccaagtccacgcacgcgctggtccgcgggcgcaccacgtggcagacacgtggcaccacgagggcacccacgcggggcggcacagggaggccacgtggacggcctagatcggctagggcggccgatcgggcggccacgggcaggcgcggcgcggcaaaggggtcgggcggccgcgggcgagcagggcggcggcggccgaccggaaagcggcggcgctcgacccgatggtcgccggctgcgggcggcagcagcgctggatgcggtggcacacacgggaggcggcagggatgggagaggggctcactgagagggcggggacggcgaggcgaaggcgggaaggcggccgacgacgaggattggcggcggcgcttctcgggttggggtcggggacggcgctccgacgactcccgaccgcggcggaggtacggccgagggccagcaggacctggggaaggggatggcaggattaggagggcacgagaagactcccggcggcgtgaatcaccggccgaaagaaagaaaaacagcgggtgctcaccggtgtgcgatggaggtggagttccagcaggattagggcgacggggagcggtggccgaggaactccttgtccttgcagagccgagggaggcgacggcgtgggttggcgatgaccaaagcagcgggacgacgtggctgcagtcggcacacggaggtggtggctcgggtcgatggtggaggggtggttgcggtggcgatttagggaaacaaagcggatgccggtgtgcggctaggcacagcgaacctttcggcggtggtggcgcagcgcggcagcgacgggggtggcggtggcaagcgactggaggcgacgagaggcggctgtgactcgggtgcacggtgaaaccggcgcccgggtgatttattgcggaagcggagcagtggacggggttcggcaacgcgcggcgaggccggcggcgcaaacggcacggcgcggggacagcggcagcggcggcagcagccggttggagggtcgccggtgagtggcggcacttgggctcgcgtggggagagcgggagagagcgcggggagctcgggaaaaatggggaaatggaagaggggaggccggggatgctttttataaactcgagagtcgacggggaggccggttggcggcggatttgaagggggaaaggggcgccggcgacgtgggtgagtgggctcggggtggcggcggttttcacggggagtgggggaagaacggcgcggacgtgggcggagaccgcgcccacgcacgcactggaaaaggggccgtgcatgagaggcggcgacgtgggcggcgtgggcggcaatggcggttaccggcggagtggctgtaggaaggagatgacaggtggggccgcaggtcccacctgtcagccagaggaagagaggagaccggttggggggggggaaatgcagactttgagagagagggccgagcgggccgaggaggaaaaggaggccggcctggccggatgggggggggatggaggaaggggtggattgggccgaaaacggcccaaaaggagaggatggaattttaatttgttttttctttatttaaattgattggatgaactttgtattattataattatttcttgagctctgaaaattcacgggaaaatttcagagaatatttagggcacaaagaatattgcaaaatattctcggccaatgatttttaagggaaaattttaattctcctattatttcacttgattaaattgctttaatttttatttaatttctagaaaatgcactattaaatgatttttaatcctgaatgaaaatcggggtgttacagaactctagttgttaagtacatgcgtttagagttgttaacaaaaacaagtttgctgacataaaagagaggaggaggagaaagagagaaaactttgttgttatgtatgacaacagcttaatatgtaacaggaaactttattgtatgaggatggaacaaaggaaataaaataataaaaaactattttagtgcattaattgttaaagtccttttgccgtttcaattgttattagaggataggttgtgtttagttccacgcgaaaattgaaagtttgaagaaattggaatgatgtgacggaaaagttgtaagttcgtgtgtataggacagttcgatgtgatggaaaagttgaaagtttgaagaaaaaagttagaatctaaacagggccatagtctctatatgaaataaagagtctatatataccactgtaccaagcttttgaacatgtcgtataaggtccttctcgattggtacaagtaggcaatgtttctctcttaaaagaaagtattctgcaggtgatgaaacagcaatatgaatacacacggatcacttattttgtattgcaatttgcaatataacaaaacataacaaaatcattgttccccgcaaaaaaaaaacaaaatcattgttggcatttttttgacaaagtcaacaagcacaatcgcaccacctaacgctttacagtgatcttagagtcgccaaccacctcaatctagcaaaagctaaactaagatgggttttgataaattaaactggctagcggagccgatctagatagactgatagataactacccgtctcttgggcaaaacggaaggttttcaggacaaacctacaaagaggtgtcgcactctcgcagcggcggcggatgatttacagcgcaaatcaacaaagatggacaaactaaactagaactaaagcaaaagtaaaagaacgattcgattggttgatagttggttgtgtctttacaatgaaccggccttgccccttatataggggttggtcttaccctttacaggtcctcctccagtccaactcgggctagaaacagatgaaaatacgaaacatgcctttccgagcaaggaaacccgagaaacgacgaaaatggagtctgactcggactctgccggttagacgggccacataccgctggtctgaccggcccactggcggcggtctggccggccaacacacgacggtcagaccagccctcttagaggaaaaccggcagaatgtccaaaccttggcattttccctattttaattctagatgccaaatttaggtgtgaacaatcataatattgctatattgaaatttcgagactatttttcttctatcatttcaatatggcagttatagtagtactccattgaaattacggttagtaattgcctatatacacaatattctaggtggtcatcgtatttagaatactaaagatcatgtgataggtcaatattaatatatactagtatggatgatgggacatatataggggagcagggtggttggatcaatttgagaagggttagactttttagcggtgatatgggattatttaatgacttgagattcttgagaggtttattgttagaaaataaaaccctatcatatgcagtggctttaaagacggttcaaaaagccaggtatcaaactaaagaatattttgactttatttaggagtaacacagacaacatctagctgttacaaatacaagtcaaaggtaaaataaaacataaagaatttctggtatggtgctaaataagctttccattaattccctcagcaagtggctgacatggtagacctggacccaataaatcaaaaatattcatggcatttaaggaatagcaaagaaataagactagctatagtataaatattatctattacctccgttctaaaatataaatatttctggatccaaatatttgtttcacaaactatgagtatgtttagttgccaaccacacttggtgtccatgtaccaacaaaagtcatcacactgtgtaagctgaggcggtcaatttcattatcacacctagcaagcataagggaatctttccatacttttttttttactcattgatacgtgaaatctaatttgttgaaagaaaatattgccacaactatggcacccagctaccaagttaattaaactcgtctaaccttacacatggtaaactgtggtcggcaaccaaacaccctctactacttatccaatcaaccactttccctttaatttcttcccatcctacctcaagcattcacacatctctaaccttccctcatttatcgagggacaccaaattcttttcttcttaatcctaatttccactaaacaatttagaaatgtttatagttttggaatggggggtgcaaatgttaacaaatagcattgccccctgcgccttgaaactccaaaacaattacatgtacatatcaagaaaaaaatatctaaagttgataaacacttaggaagaagcaagaactaactattttttctttagaaattaagaaaaataaattaagttgaaaaggacccaaatctaggaggtgtggtgtaacatccacccctcccatacaactactcaccaatgaagctaagatgaacccttaaaaaattttaaaggcgacgcattcatcgagagcgaggcgtttgtggttacttcatcaattttaagattcgtcgataaccctgtctctcagaggtgctaatgcgaatagggagtacatgcgtacgtgtatgcgattgcactaaatttcgaaaaaataatcaaacccaacttgccaagttcatagactggcagataaatgcatgtgcatggggtgaatattcccattcttaatgttgtgtgctgaaatgatgtatgttttcttcattattaaaacatattatttgctccacactttgaaaaacatgttttcttaaaaaaaatattttataaaatatttttaaaaacatattttataatttatttaaatcacttatttaagctatttgttaaatttgtttcttaaaatatttaatttacttttataatcaaatcgataatctgttgtaataatctattatcattctaaatgagagtatgtcgatgtcctagttgtcatagtcttaagaaagaatggacatgcgctaccaaaatctaaatttttggaccaggcagttaggttttaattatgggtgcatatggacagattctccggaagattagctgttggaatcaaaactcagtagtaggaccaacgagccattggaaaagtctccaggagatacagtcttttgtttctctggtggatgctcggatggcttgaagttggatcttctgtcccacagcttcttggagtgtagaaaaaaaaagttattgcttttagaaacaaagccattatggtggaaaaaggtgtagtaatagtcctccccagtccccaccagctcatccctgtaaaattagtgtgatgcccatcttcttcagtgaacacaaaggctatggccaaattttccaaagaacaaggtattgatttgcagttctgtgtagagtttaaatctatagatttaacaacaaagttatcataaaactataaatttaaaactaagtattataagactacagatttagtattgaagttatcaaaaaatagattatagagtttaaatccctaacactagagttataaatattatagttttgtgattaaattggtgctaaccatacatgtagttttcgatttcttttttactaaatgtgtagttttgtgatatttgactctaaaactatagttttgtgataactttagtgctaaatctaaaatttgtgatacaatgtcttaaatctgtaatttatcgatagatagatcaaaatatctgtagttttgtaaaatttactcaaactataaatactccttcacaaggaaaaaaaaggaaagaaaccacatacacgcaaaattaaaaaagatctcatgatcgcacatcatccctaacaaaaaaaaatcacagattcactttgttttaaaatgtaataatttttagagtatggcaatgtataaagaataggggtaaaaatatatgttctccttcttagaatggaatgggtaatgtgtaggtccaattatagtaaagccaaggtagggttagtttagcgtcaaaagttaccttttatatatcgaatacgtatcctaaacacacaaggcttcatatgtacacactatgcacaccaactaataaatatcactaaaaaattctaaaaaaaatcgtacatacactttcaatagttatacatctacgtaaatcttattttcaaatttaaccttcgtgaagtgaaaaaaggacaaatttctaacagatttatattcttaaaattgttagatttttttttgttatgtctaaaatataaagaatttgaggttaagattttagacgtaggtgtaatactattgaaggtatatatttttcttttagatttttatggcatttgtttattggtatgcacgcagcatgcatatgaagcctgtgtgtattagatatgtttccttatatatcttgggttgccatatatgagacaaaatttaaactctaaaactttccacgtttttggaaggagggagtactgaatgctacgaatgtttatgttgttccaatgcacaagacggctatagtgcacaaggcatttttcattgtcatcttggaataagaatatatttgatgccgtgcaattctagagggttactttcccaagtaggttcatatgctcaatgcctaactgtacctagagtaccggacaataagacaatttctcattgtagcatcaaattagttagaagacgtatatccgcaaattatataaaagtaagacgacgagtcatccaaaagaaatatgacaaagacatctcgtagggagctaaacgttgacaattctcttcaccattaattgtgctactattaagggcacccacaatagttatttataggttctctacaagagatccatataagcatatttttctacttggaagaaattaaatgaagagagagagcaaagctatctactaacctggagatagtctatagagaaaaacgaggcaattgattagagagctatagatacccatgtagacataccattgaagtggtttactattaatctagtctattgttgagatgtacatcttttatagatagcaccttactttaccattgcgggtgctcttaatctcactatccccgtaaacacatttttcccatgtattaattgatcctttaaaacatgggaatttaattggagttatttcagttcccgcaagattcctccgttgtaaaggaggtataattctcgcctatgtcgatgtacgatagaacaagaggttcttatttttgcttaattaatagtgacaagcacaaattatcaaaacaaattccatgctcgagatcaacccattagggattttccgaggaagaagaaattaacaaaacactaagaaaacagaaaaggagaaaaaggtcgcagccgatgaccgtgcaacagggtttaccggtttacctttccgatggacggcaggataacgaccctcgccgatacaacgatttatatcgaattttgacaaatttcgatcgaaaaggtgaatcctaccgtgcagtgacaatgcagagagagggatagctgatcatctgattcgcccttacaccttttccacgagaggaaatgagacgagaatgagatcagtagaggtgtactgctacaccaatggcaggagctatatataggtaaaaaaagataaaagaagatagtagctaccagcggcggcagcatgactaatttggtaattacacggctcgattcgtctgggaatcttacccaagttagcccacacaccccaagaagtaggaagagaggaggaggagagggtgtgatccaaaagcagcagtggcagcagccaccactttgcacaaaagaagcaaagtaaatggatggccatcgccgttgaggaagggttggtggccatctagagagagagagagaaactagagagagagaggggtgagcagctgagctctgcatctatatacagcactgcatctctctctatttctctctctatatatatctctatctacagtggattttctctctcctctctctctcttgccgttgctgttcgatactgttgttgtcctctcgtggccattattagatggcctcctgctgctgaaatgtgagtgagagctttgctttgcttgcttgctggctggctggctggctagctgggggttggcttcccctcatcctcgtgcatcatccactgtgctcggctcagctgtctgccctgttcttgctttggtttgtactaaatcctcttccgtagtaatactactctaggacatagcatacatgtaacatggatatggatacatctcgccgtccttcccttcttttcatgctgatcttggtgtgtcctttcttcttcctcttcttcttcttcttggttcctttgatttttggttcagaacaattaatcaagcatttattttgcttaaaaatgtgtttctctctctctctcttcttggctttctgcgagcatctgttgctcttttttttctttgagattatttcatcggtttaccctgccaagtggagtatacatgttcttccatctgttcagttcttgttcttccctccccttctgattcggctcctgggaattttctttatccctgcgaatttttttaaccgtctgcttgcgcatcatcacaaggctctaaattaatccgcttttgtttaatcgtttggtcttaaggtggttggacggttagcatcttcctcctcaagctgagatccttcttgacgccattggaggggtcgctgtcgcctgcgtccttgagcctccctgcttttctttttctctctctctctcctcggcgagggagacgacgacgacggtggcggcggcgatgctgagcttcaagcagagccacgaggggttcggccatgtcgccgccgctggagctggaccgcagcagcagcagcagccgtggtgggcggggtcgcagctgctgtacggggaggcgtcgccggaggaggcggcgctgcgcgacggcggccagttccaggtcgtgcccggaggccgcgccgcgctggatccggcggcgccggagccggagaagacggcggtgccggcgatgcccaagagaggaggaggaggaggggctcctgaggtgctgaaattctcggtgttttcaggtgaggttctttgcttcttttttttttcatctttgtcagataataataataagtttatgtgaattttgttttcttctttgcataagtaaatcaaaaaggtgattaattgaaatgaagaattttggcatgcatgtatagctgggttggatctgtaaacacaagggaattattggattatctcctattttctctagcttgcaaatctgaaatctcaaagaattttcaaggcatcatttcacagtctgattgattgttaccctttttttaccaagagaaatctccagctttttatagaaaggagtaatagcaagttctctgatggagtgatggttagtgagcagtttgctattgcttgattgctacacatatttttgaaagaattgaggtttcttctgcaattgatttgtgagaaaatcttgcatgaactagatggatttgcatatgaatgttgcatgaactaaagagggtaataactttgattcccagatgtttttgggtccaaacactgtttggtggtccctttagttacatggacaacactgtttgtcatgcttcacatgtaggcgcattcactgacatttgatttgatgtttcctgttgcaaggcttgccggtggtggtgggcattctttgttttttttaaaaaaaaaaatcgcttataaacctataggatcaaaaaggaacaaataattgaatcaactaagctcccaacccttgaataagtcaagaaaatgggggaatcaggattgaggtatgtaatgtatttgaaggccatggcactgtaacaattggtcaatctaatattttgcaatcttgtttgattagttctatgactgttgcaattttttgtcatctaaaaaaagaacaagacattgcattgttcggtatttttttatgtttttgaggggagcaattgtttcgcctcgtcgtttcgcccattggaaaaaaaacacaagaacaaggtcttattgtggggacatcttccaccaaacactacccaagaataccacatgaggaaataacatgtccttgacaaaaatatagcaaataatatatgacaggggacatacggcacatacttgcgggtttagaagccaacgattctccagttttgaaccttgaatagctttttagctcatatgaccttataaaatagagtaggccaagacattatagccttctcttcagattccatgagtggcactcacgtctctccaaacattatgcatttctataatttaaagcttacatcacctgtcctagaataatttagttgagataaggaagcatcagccgtttggtgtcctataaaatgctctgatgctctaaagtgagactatatacacttaattactttcagttggataattcagaacattgcctagatttgttgcgtgttgttgatctgcatcttttagaatgtggcaagcttctaaaaggaaaaaatacaatgcatgaatgccccttttgaaggttgagagaatatatattgaacttgaaaaataaaagacagaaatggtgacattctaaaacctgttagatgttgtcatggagcactgaaaattaatcatggtaagaagaatcagctaccaaatctttctcatccaagctggccaatgtttccactctagttatgcatataaggattcatagagaagtttttgtttatgaactatggtaggacaacttggtgttgttatactaagaaactatggggttcaggtaatttggagccgggagatacaggagagaagaacagagagcactctgccactattgcaatgcaatcgccgttgccagaatacaacggccatttcgagcttggtcttggtcaatccatggtaaacctttcttctaaacttttcagataggtggaaaagaaagataaactgctatcatgttcactgttcagttggaaattattcagattgtactactaaaaatttatttctgaatagtaccatcagtgtgtttgcttgctaattggtaacatactaacatgtgtttcaggtctctcccaattatccttgtattgaccaatgctatggtcttatgaccacctacgcgatgaaatcaatggtatgggttgctttgtcctatactaaataatattttctatgtttcatataataagatttttttgttttaaagtcaaaattcttttaagtttaaccaaatttataaaagaaaaacataccaatatttttaacacgagacaaacatagtatcaatatatattcaatgttagatttaataaaaactaacttggtattgtaattgtagatgaggtcagacttaaaagcagtttgatttagaaaagaaaaggtcaacatgcattgtaatataaaacagagggaatagcatttcaaatgcgatattagactgatccactgaatcacaattgtacgaagtatactgagaaaaattttgtgatacatgatgtttctctgacatcctgcatttgggggtgtttgcagagtggcgggcgaatgctactgccgctgaacgcgccagccgatgcgccgatctatgtcaacgcgaagcagtacgaaggcatcctccgccgtcgccgtgcccgcgccaaggcccagagggagaacaggctggtcaaaggcaggaaggtcagaaccccagcctccttctagtagtccccatttgccaatgtaattttatgaataaaatagcttgatcaaatggcttgtgaaaaatgttttagcaaatacacttttagttacagatttttgtatgtttgccatctaaaaaaaattacagctttttacgagtatatggtaacgaaatttggtggtgaagacaaaagtttttttcttttaatttactccctcgaataattgacactggaagctttgaccgcttgtatttttcttcttgaaaatatgtagagtgtaatgttaaaaatatagtcatacaaccttcattcatcacaatattatgctgtaaaagaaatttatggtaagttactttatccagtttcataattcttaacattttagataagaataagatcaaaatttcataacttttactatcaatatttagtttaaaggcactagaacaatatatataaatttatcttacaaagtattataataaaagtaaaaatatatttgtttattgtatatattataatataaaaacatagttaaaaatatactttggagaacatgtcatttactaaaacgtaagaatgatgtaaccggagggagtattcgagaacgaagtgagtaatataatttgagtatgatgtaaatgttccttttgttgagtttgttctcaaatctcagcgcatatactgctgctcgttgatggtgcagccctacctccacgagtcgcgccaccgccacgccatgcgccgggccagaggctccggcggccgcttcctcaacaccaagaaagaagccaccgccgccggatgcggcggcagcagcaagacgcccctcgcgtccctcgtcagccccgccgacgtagcccatcgtccaggctccggcggccgcgcgtccagcctctccggctccgacgtgtcgtcgccgggaggcgtcatgtacgaccaccaccgccacgacgacgccgacgcggcggaccactacaacagcatcgaccaccacctccgcacgccgttcttcaccccgctcccgatcatcatggacagcggcggcggcggcggcgaccacgcctcacactccgccgccgccgtcgccgcccccttcaggtgggcgacggcggccggcgacggctgctgcgagctcctcaaggcgtgacagccttgaggcggggatctccaggcgtgcccagagctgctgctgatcgatcaccatcagctttggctgcctgtaggcaaatcattcttggctctttacttgcattggggttcttgcaagcaactctcctcgtcacctaccaaaactgtccctgaaacttctctagtgctggggtctcgatcagggatgatgatgtgatggaggagaggcttacccatatgcctgtaaattatggttagtgttctgattaagcaactagtagtacttggtaattactggctatgaattagtagtatggactctggtgtcaggttgctctttgtctgaataaactggagtcgtttgaagctttgcaacagctgtgagtgaaactatgtgcttgcttgcttgcttgttgttggagtgattaagctggagttttgtctggtttgggtgtgtgagaccagtgagatactgtgactgtcgatatcaatgttgatgaatgatttatgaccttgtttatgctatggtaatagtgagctagtagagtgtatatgatttggtgacatggtattcgctatgaaagttttaggaagtgaaaggctcaaattaacatttgagctattcttgggagtaggtctaaaattttagctgaaacttcagttaaaatgctagatcctataaaaaaaatgagtattttttattaaacccacatattaggtctaagttacacaaaccacaattattttagcatgtaacacataaagctaagtattatacttctaaagtttcccaaaatcacacaattaaccattttgacatgtacctatatcaaaataaacaaagcacatttaacatttatatggtggataaaatgttcataaacgtgcgattgtataagttaaaagtatggcagattaaagtcaagatgattaataacatgcttttgtgaaacgctcggatcataatgcttgaggttacggcccacgtaccaaagttcctatggtgtgaaagttgaatatagttttatgaaatttactaagaaaaaaatcacatactcttttgctggcttgctgcctcccaaatgtgcatcctatcttactataaagttacccccactaaatccttaagcttaacatacaaagataccacatcatcatccactaacaatcatcacatttaaacatcatgcaaacatgctatatctttatagtttttataatttaagagcttttcaaatacaaacatgttaaattatcatccaacataattcacataatgtttaaatgtatatttattatgttttatgatatcctatatacttatatagtttatccttacttagttagtgcttaaatgattaatctatggtccaaattatctttttccttttttcctctaattaagtcatatcacatcaattatttttagcctttagatgattaatctacggtccaaattatctccctacttttcttcttccaaaaagtcatactaccttactttttacgtttgaatcaccattctacatactatttaaatttaaattatcataaaccatattaatttacttaatctgatattatctagctatcttacacgttattttttttattattatcatactaaattcccgcaacaatgcgcggggtttcacctagttacatatagatgttcgatacttttcaagacaacaaaaactagaaaaaaaaggcaatacatgccatgacattaacttgtataaagaattttacatcgcaaaacacatggaacatcttgagaattcaaaattgttttatgcaatgataaacctatgtttgaaagtacttgtacgattcatttgtttaattttgaccgtaaataatttttatatggttaaactacgatgacaagtttcatgtttatatttaggatgctacacactttgataatacacagtattctaaaagtgaggatcagcttggctacttcctcaattttcatttgcacacatttcaaactactaattgtttcgtacagaaactttttatagtagttgctccgcaaaataaaataaatttatgtttcaaatttttaaatataatttctaaatggttaaactaggatgaaaaaaaagacttgatgtttatgtttgggatgctacacacgttgataatacaatatttttaagtatatacaaatttcttatgggaaaaatgaaaatggtaaagtttgcagatgaaaacttgtggaatttttttcatttttaaatttatcttttttaacatttacagatatattatatcagcagaaagagtacaaaaatagaccctgccgccctccatttggg

SEQ ID NO: 7840 - DNA, 28034 bp, Oryza sativa
gttgtgaatttccctctgcctagcctagtagctttgtttgccgtacgacgtgcgtgtgggcaagcctgttacggcaacgcttaaacaaaaagctttatttaattaatcttggtttagttatgctaattatctgtactgtttcctacgataagttgtttgtgtttttttacaagtttgactgaatttatagaaaaatatagtagtatttttaacacagaagaaacatactattaaaatataattaatgctaaattaaatgaaattaatttgatattttagatgttgctaaattttttagataacaattactacattcctttttcaagtagataacaccgttggcttttgaaatgatgttttatcttattaaaaaacttagtgtaaatatgctaagatataagttatactgcaagtttattcaatgataaaacatgtcacaacaaaataaataatatttatataaatatgttgaatgagatgaaagtatgagataagagacggtagacaagagataattagtcattgttaagtaatatttatataaatatgttgaataatctgaatattctcttccaatacgccgcccaattcctggagacaacttcagtgttaaggagacagtaggaataataaatattggggaattgaaaatttcacacgattgatgcaaaattaaagcattacaattggaaagaaaatgtagagaagaaatcgaaaactttgacgccaataatttcacccgggaaatgacgtgcccaagttcagctcactctgtctctagctcgtaatcctctaccggcctcaataatccaaaacaaaatgagatctgcaaaatcctgataagtaattagccgacgacaacggtggcggcagcggcggcggacacggcggggcggctcgtccgcggcggcagccagggttgggaagcggcggcaacgacgacagcacggcgcggcacagcgggcaattccgcttctcccggagccaaccgtcgacgcaccccgcgtggaagaaatggctgcaccgcaccacccgccgcaccttgtcggcgccggagtattcctgacagcagatcgcgcacgtgtccgctccctccgccgctgcccctgccgccggcgaagacgacgacgccgccgccgcctgctcgtacgtcgtgaccgtggtggcgcccccgagcgcgctctcgacatcgtcgtcgtcgtcgcccacctgcgccctcttcctccaccgggcggccgggaacgcggcggcgcaaccgcacgcccccgaggcggcggcggcgaggaggaagacgaccgcccccacggccaccaccccgacgaccacgaggtgaaccgcctcctcggtgtccatgacgtccatcatcccgccacaccggcgtacgcgagcaaacctgcagggcgcgttcgcgccgcggccgccgcgtcgtctccgtgtggggcgcgcgctccgcgttcgcggtcgcggcgaggcagaggcttctgggcgtggcgcactcgcggcgagcgccttcttaataagctcgagaagagttgtgataggctagcttcttcttggccaagtcagctgcccgcgacgcgaccacgagcgagagagaaagcgcgggggcggttggggttggggtttctcagaatctttcttggaaagccttgttttttttatgttttttttttctttttggacactgcctagccttgttgccgtggatggggaagctaaataaggtctcgtttgaatcgcacgaataaaaaaaaggaaaaggctacacgtacgaaacttcttttacgaagcatgtacgaagaaaaggtacgggccgtgcagcctaccttttcaggctatacacggtaatcctcttacgagtattaagcacataaacaatacagacgtggtttcgctattttccaaatgatatttttattttgctacaaatttatgatactgagaaaaatttatacatagcatgtatgtgtccaatctcaaaacgagcaaatcaaattatttcattctcatagtacgtaccatcgactactacacaactaaccattgtcctttgcaacatcgaagtgaataggtagtatatcaagcaagtatatatatcgtattgtggttttagctgagcgtatagtggccacctccgcgatggctacgtccaatcgatattttctcctgcggtcctgcctaaatgggcataggtttgattgagattattctatccttgctctctacacctttgctcaagctaagctacgaacgagcagcatgatactgaatgtgtctattttggaatgggtatttgttttttttccccctactagaagaatccagtgtgcttattgataatggggtgtggcctttggtaggcttttagtggtgtggtcaccaaagtcacgtacgtaaggtagttttcgtacaagcttcgtatgaatttcttcgtgtgtatagcaaggtttaaaaaaacgaatgaatcggaaaaacacatgattccaacaggaatggaaatataaaacagaacttgcaaaacacagaaaaaagacagcaatgaccgtttgattagactatagaaaaaacacaaaaatcggatgagatagatagattcaaatgaaatttttcaagagctgtgagctcttattttctcaaaatctctataagattatccatttcataggaatttcaagaatctggatagaattgacctttagttcaaaggcattcatacaaaatttttttctatagaattgaaatcccataaaatttctaggattttccccatatgaaggggcacctaagcctgttacgccaacgcttaaacaaacaaaagcttctctttaattaatcctggttagttatgttaatcatgatgtgttagtgcttgtttagcttcttaattaatgttggtctctatcccgtgaggtgagaccgtgaggccccactggaggaaaagcttgggggcacatttttgcattgtttcctctttttgtgttttcttttgagtttgtaatcgtcttgtttgtagaacgcgtccaagtctacaagtccagtcattttaattattgacttgattattgcaaagttttctggatgagcagctgaacttcacgcgtcgaaggctctgtttgttctgggggacagaggcgattgtgtctcgtttccgcgcgcacgcttttcaaactactaaacggtgtcttttttgcaaaaaaatttaattatgaaagttgctttaaaaaatcatattaatccatttttgaaatttaaaatagttaatactcaattaatcatgagttaatggctcacctcgttttgcgtatctccaaatctcctcaatccccttcttctcaaacacaccctaagcctgtgttcgagcgcaggagaaagagagaaagatagttttgttttctgcgcgcacgcttcccgaactactaaacggtgtgttttttgcaaacaatttctatagaaaagttgctttaaaaaatcatattaatctatttttgaagtttaaaataattaatactcaattaatcatgtgctaatggctcacctcgttttacgtatcttcctaatctcctcaatcccctctttctcaaacacaccctaaggctcttctcgtcattgtgaaatggggtcaaaacacagtcaaagtagtgggacacgagtttgagggttttctttcttaaaactgtggcaaccaagtttgaaacctaacccaattaatggctctctgtttgatattgtattgattggaatgatagtggaacaaacgactgaaatatagtgaagtgtaggataacaaattatctctactattttaaagaggtacttgtcccacttcttcataaaagccgttcccttccatctcatcttccacttcaaagtaaaaacattttctctcccgtaaaaatcattcaccctaaaaaacagacttcttaaacaaaccaacctatataaaaacaacctcatcaatccaaatcatcagtgagcagcaccgcataagacattcatccgaatcatcccgagaagaacccatgtcttgtcgtcttacataatgatactagtacagtactacccatcgttaacactcaccttaacgacttcctgtcagatccgaatatcttgtagtacatttgcagcatattttacgcctcctactcctgtgtgatttcttttttcctttgctttattttctcagctatgtccattctacgtgtaaaatgactaatatgtatgtgtggccaatcaataagaggaaaaaatggttcgccaaaactcctcaatttggatgcacagcaccaatttttccatcaagtgacggcgcaaggttcctaaatacccgttgattttgattttttttataaacgttcgaccatttatcttattcattctttttgtaaatataaaaaaaataaaattaagtctagctaaaagaacattgataaatcaattcaaaaatttttaaataaaaaaagtgatcttatattgaaaagttaacagcgtcgtatattaaaatgagaggagtaacaaaataaagttgcagcttaattggaatgacgacatacacactcaaaatcgacggtcttgggttttcacatggataatattggattatccttggccctcacaatcgaacagagcatgacggttctaacttctagtatgcactgtcatcgccaaaccaactgctaaatggcgagcgtggtcattaatttcctcggagaaaaaaaaagttactactccaaacgagtcagtttcgagtaacttgtggtttttaaatccaaggacttaactttattctacactaatttagagtattaaatatagattacttacaaaactaattacataaataaaagctaatttgtgagacaattttttaagcctaattaatccataattagagaatgtttactgtagcatcacataggctaattcaatagattcgtctcgcgaattagttcaagattataaatagattttattaatagtctatatttaatatttataattaatatcaaacatccgatgtgatagagacttagaagttttagtcccatctaaacaacatggccttatttcctccaaacgagacagtttcgacgccataattgtttcctcggggccatttttactgcagtctgcagagcagttaccgccgtcgacgtgaagttgccagccatggaaggggcgtgcctccgcctcgtcgtgaacccgcagcaaccgacgacgctcctcgccgtcttcctcctcctcctcgtggccgccgccgtcgcgccgccgcacgtcctcgccgccgaccacgtcgtggggggctccatctggtccatccctcccaggcccggcctgtacagagcctgggccgacaaccggacgttcgtcgccggcgacaacctcggtgagcacaccacatacgcacatccaaaatgtccaatcatcaccagtatttattcaattattctggtggatggataatacagtacgtgttgctactacattttgctgggtggtgcagtgttcaggttcgagacggggatgtacaacgtggtgcaggtggggaggcgggagttcgacgactgcaccgccgacgacccctaccgggactggaccgacggccccgccgtcgtcacgctcggctccgccgccgtccgctacttcatatgcaccgtcggcaactactgctccctcggcgtcaaggtgtacgtcgcctcccagaatgcgccctagatgaaccattccgctttgcttcttctgcagtttctcattgatccatatcacagtttctgatccatcatatcatcatcattggtgttcgtaaccattaaccatttcgctatccattcagtatcaaactatttccaagaaagcaatgtgtactctgtgagataacagaaaccatgaaaacaacaaaggatgaacagcaaaggaagaaatgcatatttagatgcacaactctacgagtctcacggtgcaagcatagccatctgaccacaaaaaatgttgagccactgcacacggtgcagtgtcagttgtagcattcacaacataccgagtttctttttaggaggtaaaactctacgagtctcacagcatagtaaaacgtagccagctattactagatacgagtagcattttttaagtcgcaaacaaaagggatacagtcccggcttaaggggtgtaaaatcagcttcactatcttcatgttcgccgcaacgggaaacagagcacaatcatctttgggtccaaaaatttacggcaaacctttgcgacgacgttgatttgtgaaccaatgacgagtttcctagatgacatactctgcttactgttgcgcgcactgaactctctgggcacctccaggcatctcatcgtcctcatcatacgcctcctgagcagcttgggctttcctgcgcatctcttcctcaatgttgttgacatcgtgcatcgtggtctcctcgcattcatctatctccatttctgtcagctgggatgcaggcttcggtggaagcacagcctcgagagccttgcattgttcaggcgccagggaatcagggaactccaccgtgaaatgaatgtagagcttccccttcatgaaaggcctctggtacattggcattccctcatcgtttattgccttgaattggtctgctcaaatatatgagacaaggattaccgacaagtacagttgcataaatactacattgctcttaacatctacaaggtcttaccaggcttaacaacttcaccggggtttgacttaatgagcagctgtctgttgtccagatgtgtcaggacaaattggaaaccacaaagtgcttcagtcagagataaggtgtgctcataaaagagatcatcgcccttccttttgaacttggagtggtccttctgctggaggacgaatacaatgtctcccgtaacggtatcaggctgcaagtaaaacattcttcaatatagttctggtcattgagtcaatctatagaaactaccctaatagatgaaacaatcataccgcctcatcagcttcaccagggaaagtgatcttctgattgtgttgcatccccttctcaacgtgaacctccagaaccttcttctcctgaataaccttctcgcccttgcagcctgggcagcgatccttctcattaatgctctctccagtccccttacactcattgcaaggctgctgcatctgctgtatcatggaaggccccagctggcggatggtgattttcatgccagacccctggcaacctgggcacctcatggaagcaccagacttggaacccttgctgaaatgaacagggagtaatgttcaagagcaggattgtgaaaatgcatagtttactatgctagggcaaaccagacttaccccttgcacttggcgcagaggacattgcgggaaagagagagcttctttgaagtaccattgtaaagatcttctagagaaaccttaagcggatggatcacatcctctcccctcctttgccttctgcccctgctgctgccaccacctgtgctcaaaacataaacaaacgaaatttcattacatcaacaaaacaagagattaacagagttcaacacaatcacacaggaaaatgtattgtcttcaaaaaataccaccaaaagaaggtccaaagaatgatgaaaagatgtcaaatggatcaacatgggatccgcctccacccattccttccttgagggcatcttcaccatattggtcatagatttcacgtttctccgggtcactcaatacctcataagcttgtgcaagctccttgaactgagataaaattaaaacaaagatatgcctaaaattagcctctttcattctacagattatgaatacatggatgactgaaaaagcagtaaacaaaaggaaatatagttgtgatcactatatggatatatgctatattcgccattccatgtcgcattcaataagacaataagcatttgttgactccaatatgcagtaacaaaatttatactccctccgtttcacaatgtaagtctttctagcattgcccacattcatatagatgttaatgaatctaaacacatacacatgtctaggttcattaacatctaaatgaatgcgggcaatgctagaaactcttacattgtgaaacggaggaagtatcgaactcagaagtattatgataaggagcataagaattaaaaacaatatttcatcatgtaagatacagtgctaaacataaaggggcagagcaaaatctaataggatttaaacagacaaaatactcccaacatatagaaacatttaattgaaagtcacattaccggactacccaaacaagcgcttttcctaaacaattaattagcaagtggatttgaatcacagctagaatgagtagtcctatgatcaccaaaggatactttgcctgaagaacaatgccctaatgctaccagttttaaacattccagtacagccgttactcaagatgttatccgatgcgagaattaaagatgcaatcaatggagcatttcacagctaaagatgcttcgctgaggcagaatgagaacaacgaaatatcttacagggtcagtataacaatacaacccagcaatgagctagattcaatggggcatttcacagctatagatgcttcgctgaggtatggcagaatgagaacaatgaaatatcttacggtgtcagtataagattacaacccagcaatgagctagatggttctctgaaaatgaatactatctgaacacaaacagactttgtaagtccatttcagctagctaatgatcttgatagataaccacaacgcaaattaaaaatgatccagcaaacctcaagcgcagcggaaaattcttgggaagtaactagcgcataaaacttgggaaaacgaacatctgaattctgaaagcacttaaagatcgcacggatcgctgtttcagtggtctcctctattggttctattgtagcagaagaatctgcacagtctacttgatgttacgaatccagtctattgttccccccacaaacccccaagatcatggccatgatcgcatcacaaattcacaattcacactaacccaccccctcagcaacaagtaaaaccgagcaaatctttgatcgcccgcccgctcgccgcccaaattccccccacatgaaccgcagactgcaaatcctaccaggcctaaagtaacaaaacgagatgatgttccgcccgccccccgatccatcatccgcgacgggacgggatcgaaccagatcgcgtcggatcgagaaagggagcaagcggccctgagatccggtagaacggaggaggagggtgggggatcgggatcgggctcggaccttctcggggtcgccgcccttgtcggggtggttcttgatggcggccttgcggtacgccttcttgaggtcgtcctgggaggcggtcttggggacccccaggatctcgtagtacttggtgttgtcgctcttcttcggcgcgcgcccgaacatcttggccccgcctccgcctccgccgacgaaaccactagccgctcccgtgccgccgcctccgcgccgccgccgccgccggggaggaggggatgggggatgcggaggaggaggacgggtcaaagttggtggccggagctagcggagtgggaggagagaaagagggtttggttaggtcgatgcgccagtgctaatgtagggagcagagagtacgtaacctgtatagcgaacgcgtatttcgtgttcgactgggctcgagatgggctgtttgttgctgggcccgggcattgaggcacgtgccgttccgtgcgccgttgccagattcctttatcattgagtttttttaccgttgagatggtgcgtatggattttcactttttctttaagtcagaattatctctatccctacgatctctatctctactacttaaaaaattcgaaacatttctattcgtcgttcgtcttataaaagttcccctttcgttgatctttttctgacacggagtatttttctttcattttttgtatggaaattgggtagcgggtacaacacggcgggtttgttgttcgctagaacacataggctcttggcctagtggtgctccttgcataccatctgtgggcttgcatggtctggtcatgcttgttgcatgccatctgtaggcctgctagcccaagtcccatggcaacgacgagtcttaggccatgtttagatagtactaaaacttttaagtccctatcacatcggatgtttgaaaattaattataaatattaaacgtagactattaataaaacccatccataatcttggactaatttgcgagacgaatctaatgagcctaattaatccatgattagcctgtgtgatgctacagtaaacattctctaattatagattaattaggcttaaaaaatttgtctcgtgaattagcttttatttatgtaattagttttgtaagtagtctatatttaatactctaaattagtgtctaaagacagggactaaagttaagtccctggatctaaacaccaccttaaccgatcagaaacacatggacccatatgacacacgataagtaccatgcatgttaactctctcctgccggtgtcatgtgctcatgcttcgactcagttccaacagcaacctgcacaagtgccatgtagaacaattatggacgtcaatgtagttcatgtagtgatttgcatcgtacaaatgcagataaacttttaataatttaatgtgtctcgcacaaagtcataaaataggcaatttcttgcatcgcatagtaaaaaatgtataggttttcatgaaaacagtaacccaatcggtacctttttttttttttgaaaccgaacccaattggtacttttgtcctcttatgattttaaaagttggtatttttacatcttttgtttcaattgttcttaatatcttctttgtgacttttggcggtcatacatatcatcttacggtcatatatatttaatggtatattatgttgttaagtgtaacttaaatcaatggacagtggtgtaaagtaaaagtatatgctaaatggctaaatatggtgtaaagtgtaatttactcttaacgaaatggtcaacggtagacgggtttgccttttcctctttttctagaaggatttttttttaagttggattacacaagtagtggagcgctacatgtgcgaggaaggaaaagtggaatggacaaaactccacttttaaaagtatatgtcaagagctatgttatgtattttttaatcttagggcttcactttattgctaaaatattcttcctaaattttggtagaagtttgagagtagaaggtttaggaattaggtttaaatctaggatttttttttgggatggaaggggtatttgatatagcttcaattccatcttttctagagctgaagtccaaccaaaccgtcatagctcgcttaaaagacaagtggaacatgttagaattctctcgcaaaataaactgaaaacgtgaggtggggttcatgtcaaaattaaaagttgggagctatgccaaatactttatccaccaaaagattttttttacaaaagaaaattttaatctattattggatgtgaattagggcatgtttagttcgtgaaaagaaatttttggatgtcacatcggacatttgaccggatgtcggaagggtttttgatacgaatgaaaaaactaaattcataactcgcttggaaaccgcgagacgaatcttttgagcctaattaatctatcattagcacatgtgggttactgtagcactatggctaatcatagactaattagactcaaaagattcatctcgcgatttcccctctaaccgtgcgattagtttttttaatctatatttaatgatctatgcatatgtccaaagatttgatgtgatgttttggaaaagaaattttgagaactaaatcaggccttactatatacatctactcctaaattattattattattattttcaaccgagagtagtacaatgggaatgacgctggtaacgtggttataaaatagtctaccgaatgcttgcggaggcggaggaccccggaccccggtgtttacactgtagacgctccggacagatagtctaagagcaggtacaatagcatgctataagccaactataaacatattttaaagatataaagaaagagagagaagagcagcggactacagatctgtagctagccgcagcacgaactttaagacgtaatgtatgtatgacaagtgggaccaagtattaatagtatagcaagtaactattgtatgaattggttattacatttgctatagataatttggagttagtagtgggctatcctattaaacttgctctaacgtgcgagcagaagctgtcttttacatgtacatcagtacttgtacagtttacaatactccctcccgttatcggagtatatttattttttatttactatgcaaaaggttatgtttggacaatggacacgtgtgcgggtcatgcttccataaatgactttttacctactccgccacaccttttactaccgatggaactgagttttactggtgggtccgtccgagtttcattttttactactaccttttctttgccataaaaaaataaaaggggaaaatggcgagccaccctgccgcgtggggcgtctactattctttctctcctctcgctgttcccgacggaggaagggtggcagtggcacgcacgcacgccggcctcgcctcagcctcgcctcctcgcgcgcgcgcggccggacgggaggcacacggtgcgcggccggccggcctcattcgctcacctcgtaagccttcctcctccctcctccgtgcggttccatgatgcggcgaggcgaggcgcggattggggttggattggtttcttttttttttctcttccaattattgacttcgatgctgcgtgctcgccgtgctgtgctgtttcttccggatttctttgatgcgcgctgcagtgcttaatcgagagggttttttttttgtttttcttcgaaagggtttcaaccgaaataccgaatccccctctgcccccaaagctggtttcgtttgaggtgtagccgcatcttcctcttttctttccttttttatttttgggtgagggtttggagtgaatcttctatcttgcttttgcttcctgtgtcgaatgcttggagttcttttgctggaaaattcttcatgaatatctagcaccatttgcagcttcaaagcagtacgggctctgttcatcggtgtaatgcgttcgtattttgcttccttcaaatcttcatcctgtcttgcattttatatcgcccgcattttctgaagttctctgagctaatgtggagtcggatatggatttagggtgatctgatttgatgacggtttttatggtttttttcttttcaatctgatgcgcacaatagtttgtgcacggacaataattaagctaacggttagcaattatagcatttggtatcaacattttcattacgagtttcatgccagtctagatggtactgtgtacttgtaagttctcagtgacaacgagaaacagcagaaggatgactacttccagtaaaccacttaatcatttagattcagtccgatcaaaaaaaatcatttagattcagtgattttctgtctgcttcgatgagatttagtaaaccacttagattctgtattgcatcgccgttaatcattttatttgttaatcattttatttcataatttcttgtagctatgctttttttcttttcatggttcatgtgattatgtgaaggctcttgaatattttggtttcttgtttcaacaagttgtgtgtgttagctcttcctctactattgctatccgttgcttgaagttctggcaattgtgatgttgactatcagcaagttcctttactatacacactatttgttccttttcataagtcttaagcagaaggtacgattgctcatttgtatggtaagcatttcaatattctgaaatgcaggtcattgaactatataaaaaggttgtttgtcatgggtatttcatcgaagtggtttaaatcactggttggtataagaaagcaagaaaaggcccggaatgcagaaaaacaagaaaaggcacaaaatgcagagagctgcgaaacagtaagttatggtattcaccaagattttgtatcgtgtaattatgtagcaagtacttgttctgatcgactaagtctggagtaatgattgttttgtctgtcttcaacttttttccttttttttgtttctagtgtttagagccagcttgataggtggatattctactgttttttgtcttcctctgtcagaacatgacaaatcttgaagagtgagcaaaattgcaaaagagtagatggtttaccagagttggttcggcggatgccacacaagtgctgttgttgacatgtcgttgtcacatgcttgttgcacaactactcttctgagtgcccaacacagattatgtggcaatacctggatattaaatgttctgtattggtgtagtaaatgtttgggctccttacaatatgccattaccatcattgttctagtgcttgtaaccctcctcacctatgaaagaaaaccaaatgggtatattggagtactgttgtggttgctttggtttttagtgtcctactggtctggtaattacagatagaggaatgactgattgttttgtgtaaccaacaaatgattgcactgctgtttattccttgggtgtctgtctttttttcttgacttcttttcctttattctacttcgcaatgcattactatgcaaatgcatcagccactgcccactggagtgttagctatttatttaaatgtagcatgtctaacttgcttggattaaagaccgttattgtagttgtaataggagtattcatgctgttcattttgtttacttccattcaattaaataaaattttaaattattaatatgatatatattgtagtttagtatcgtagtatgtgtttcatgctgcccttgcccaaagtatcactttataagcttgatttcaaactaccagagtgcattagtatgttttaagttttgagaacatattccttcttgactctttttgccactgctgtacaagttggcatgaactgctgtttttactgggctgtcttaccatcatgacaatgtattaaaattattgtagagcacccctgctgctcagttgcttcacaaacggaaacattctttggatactgaacgtgcaatcttagtagaagaacttgcagtgcaaagtgaaccattgactgatgacaccaacacgcagacagtttcagattccatttcttcagacagtacattgcttggagtacatatttctcaaaccgaagagcataaaactaaagaggatgtggctgcaacactcattcagtctgcgtttcgagcattcctggtatgctccctttgaatatcactatgctagataactgatagcatgctgtctctggtctctgctctgcatgtatagtaaacacactaatgagtgtgactgtcttcatgttttgaggacttatccaaataaacaatgcagaaattgtcagaatgtgataagagcaaatgtattatatttgaacaagataatccaagaaaaaggagaaagtattttagtacttagaggttctagttaatttttcaaatatctagaaatagtcacatgaaactgaatcttcatttgctaaattaaacttaggaaactatccagatgtagtcgtttgtgtataacatagcatagactatgaaagcaaaaggctttagtaaaaacatagctcatgattttcaggcttccttcatagtcttctgtgtttgagaatttgaactttttgttgcatttatgattaccaggctagacgggctttacgggcattgaaagaaatagttatactgcaggcccttgtaaggggtcatatcataagaaagcagacatcagaaccccttcagtgtatgcaagctctagtaagagctcaagctcgtgtcagagcaagacaagttcgtgtttctttagagaaccaagttgcacggaagaaggtccctgaacaagatgatcatgagaatcatgttcgagaaattgaggtaggtcacaaatcctataaaagtcattatgacaagatactgagacctatatgcttggatgtcttttcctctcctgactctacatatcttgacacataatctttcttccatcgtatagattatcaccttgttataaatttatcgagtgatatgatactgacatgtaaattttgctcaacactgtggataaaaaaatatttctgctccctccctacttatttgaagatggcactttttttaatagctatgttgcaatggaaatttaaaaagaaaaccccactgtacactttaaagccctaaaaattaaaataaaatcattcctatcgtaaaatcttcatgtaatatttatcatcattttgcacctcattttaagataaaatttcctcactattttacttggggttaggaaagtgacacaagtccacctacctcactattttagggacctacatggcagtggtggtgggtggtggcagatttaccactcaccactaccattgtggtctttctaaaggagtacagaaagagagcagatcatatattaatccgactttcaagaaaaccaaggaaatcacattgtcttcacaggacaggaaaacaagcaaaagtaaaccaaacatttggtacttgacaacttcaaaagatcccctggcaacaactccaaaccacgactgcctactgactaaacaccatgatagaagcttcacatcacatcagggagatcatttgtcttcacttctctcactcacatcatcaatcttgtaacccactcgtccaatgcctcctttccttcctctttttgcaaaagtacgctagtgctgcacaaaagacagattcataagcaacatgcaaagccaattttactaacacgatctcaattacccagtcgatcctagtaagccataatgatcagcagatacttgccagcagccaaactctggcaaaaccccctggcctcaaagacagagcaccacttatgtcatagatgatcacattatgacgcaacacatctctgacaacacaccacacaaaccttgctaagggtcacaagaacagggtgtgattgatagtttctctctttgaacataactagcacaactcactcccctccactttcttcttggggtgtcttttcttgttcttttcttcttttctttcttttctttcttctttttcttttcttttctattaactgaacaacacattgagttctatcactaacagctaggaaaagaaaatgtttgagtttcaaagatattctacttttccacacttccatcatctcttgatcaatctcccctccaaaagttagcaatccgtacatagattttgaacaataacctttttctgctcatgaggccaaataaatctgtcaggatccccatctaaactaatctctcctatcagctctatcaatttgcttaaatctagtcaaccctctaaatattgggaaacactttttgtgtttgaagatggcactttttgtgtggaaacaatatatgttaagaaacgtgactatactattatgcaagttacaaacaattccttgcaccataggattggcttaagtttcatgcctataccattctgggtaaagccagacctcaacctggctagatcatggtgcagtccgtaggggagatgggatggtgatgagcactggcgaaggaggttgtagcaacaatggcatcagtgccattgtactgcactactgctagtatcagatggatttggacagagtggggaggcagagggtgggttgggattaagaaaacaaaatcatgcattactgctagtatcagatggatgtaaatggagtgaggaagcagaggatgggttaggttaagaaaaaaaaagcttggggttgacttggccttgagtcgacacctatataatattcagcttttgtgtggtttatccctaacgctttgaatgaatagtgggttatattcatccattaactgttctttgtagcattggaataagtcactgcctgttgtaccaataacttacgtgtggaaaaatagaaccaagtaatatgagtgggataaatatgtttcttggcagacagtgttttataatgttgtttacttctgcaacaataaatgcaggaacgctggtgtggcagtattggttctgttgaagaactgcaagctaaagtattgaaaaggcaggaagctgctgctaagcgtgagagagcaatggcatatgctttgactcatcaggtaattttggatggtatacctatatacttctgtacaaatactggttgagagttggtaagtgaggtaaactttgattagtagattagtagtctagcactcaatgctttgttaaatatgtgtgttattatagtcaattagttaggaagtcaatgtgataatcaagaaagatagttgtggataatggattttatctacttaataattggtgggtaactgatatttaagttacttaatgacagtatgttacatgtttactctggttgcaatttattcaatatatctatctaaacatagatttaaaaagtgatggtctgagtgaaataactgttgtgataaataacagtagtatcaaatactgatttcatatgtatttatgtttacctgaaatatatcattttttgctagatgctgcttatctatataattaaccagtaacatgaatgacgcctcatactttttgtgggctagaagtccctgcagtaatcagtgaaataaaaaatgatagaaatcatctcatcgaatgagaaatggagaaggactgctacagatatagatagtacaactattacagttatataacaagtattactatattttcagtcatagcatttcagttgtctagtgaatacaattgtatctccaaatttagctgttcggttcaaagtgcaatttttctagtcatatgatcatatcatagtaaactgcagaaatacacttatctaggtgttgctcgtgtcattcttttcactgtgaatctatatgtttatcggataaatcacagtagatcagactttttagatgccctctgtaatttttagtttcaactaatgatcatggaaaattatctgttgcagttgagaacttaagatttgagaatgctcttatgaatataacaacactgcatgtccccacaattctgtagtccttttcaatatacgtttagctctggagtcattaagttatgccttttgttttggtcagcgacaagcaggttccaggcaacagaaacctacaactccgcaaggacttgaacttgatgacagccactggggatcaaactggttagagaggtggatggctgtacgtccatgggagaacaggttgcttgacagtaacaccaaagaaactatgccactgtgtgatgataagcaggatatggaaacaaagtctcagatcacaccaaaggggaaagttcaagtttcaagtgccctttctaatggttctaacaagaagaaaggcataaaccataaaaaatcatattctgatgtaacttgtgcttcatttggacggtcgccaaatataccttcaacatctttgggatcatgcaaacaaaagtcaaagctttcagatgaagctttggaagaagtcagctcccagccaacagatcttgcgtctttgtccacatgccaaccaaaagccaagcttgtgcaagcgaatactccagtcaagaagtggttatctctgccaactaatggtaaacacaatatcgataacttatacatatttttttttctcggttttgtagtagtcttgttattggcaataattcagaaatctgttggacattatttggaacccttctctcctaaggaaaccatatactgtagactaccaagtagtgtttgctgcgagagttttttttttagtttaaatatttttataccactaatttaggtgttcaaatggtgcaatttttttccatattccattggcaagtaagcgtcatattacaaaaacattttttctgcaagaaggttgtacagctctttagttgatcagctgcttgggcccttgccgccttaggtttccattctcattctgattgttgtatgacttccatgtttgctatgcatcattctagaaacttgcttctcatctccttttgctttcatgtatttactcgaaaccaacaatgttgtaattcagcaagccatttattatgtgtgcattaacagttggtgggggagcagcaaagggcgcgaccaacagcaactcgatttgcagatccaccagtgccaagtctgatccaaaaccacgggcaaatgcttctaaccaatccaggaagcaagttgagttgcaggcctgattgcacattcccctttccctctgacttcggtaagtcatttcttatttgctgtcctccagctgtgcatgctacttctatgtacataatttttttccaagaaaagaatactgtatcttagatcttggttggtggtgtgtttcgtatttttcttgtgcacggttgtgggtatgtcgtgccatatttttcttttgcatttccatcagtttttttaccctcttgtatgttgttgtgagttttgaaagaaggaactatgttatgtctgaaaagtgtggtcctgtgcagcattgcagctgtctttctttccttataaattcaaatctgccccttctttattgttaaccctttgccaccatgatttgttcattgtctcattgataatgtgtcatcagatgcacgcccgcatataaaatcagtgtattttaagtaaccatactttggtgtaaacagcatgtgagatattttagcagccattcttttcctctaaaatacctttgatccctaattgcctcatggaaaggccattcacatttattctgtttgacgtgggccgtgtacgaattagtactactactatagtactattggcatataaacagaatgtatatggttgagctctgctgccctccaatctccatgattgagatctcctttttttttttttatcaagtgtggtgtgtggaagtttcttgtgaagtgtgatctgcacctctgcaaagcatcaggctctgttgctgctacatctttggggtgcaatcatgcaggtcaaagatgaatttgcagatctcttttatgattgaacactaataaaggtgagggttgcctttgggtgtaaaaagaactagcctttccctgaccctctctattctgttgttatcatgtgctgtgtcatgtgtattgtctgcttgcctcctctccatgctgttgtgaggatgttaacagtggagtgctgggtgcatgaagttcagatgttcagtttgttttttacctcggtaaaattcttcagtgttagtggagaagaaatgctggattcacatatcctattcatataggggtgaacaaaaaattccgaactcgtggctcggattggctcgtggcaagctcggcttgaaatcgtagtcttaatgagtcgagccgagcaatttagcttgtaagtttaacgagctagctcacgagttgctcgttagtacaaaatatccatatcttcgtatacttagcgcttcttaactagtgcttaatctttaattacatcaaattatttatatttagtgagtttttttattagtttctgtttatttttatgttaatacttataaaatgcaacaagtatatttgtaattattaatatgatataaatgtcatatagctcgttgacgagctagctcacaagctgagccgagctagtcttttagctcattaacaatagctcgttaagataacgagctcgttatccatccatacatgtatagcttcatttgctctgtttttctggtctaaaatgtgtcagtttggaacaatgaatttatttaccataatgtgctgctttgttgtgagttgtgaccactagattttttagatggcaaagagccaaagaggtaagaattgcaggaggaaggaatccaatgtgtgtttaacagtttatcatcttcgctggtgccgagggccaaccaatgggatcttggaaatatggggctttgcatcgccatgacgctgtggctatgcctttggttggggttgggacctcatctggatcagatctactcctatcctgccatggcatggtgctgcatgttttgacgttcttttaaaatggcctctctctctctctctctctctctctctctctctctctctctctctctctctctctgttcttttttaaccggcctctcgtctactacaaggccatgtttggcaaatgggataggaaaatgatttcccacccatcaaaagatatctttaaatcctaaccattcattctcccccttttatttaatcataacccttcattcatttcccaatcccaatcccacctctcatttcccattatccaaacacaccccaagtgtggatcttttcgttggtaggtgtgatataggagtacaggtatagtatgcgtgcacaggtagagacatttgtcctcgcggtacaagaagatggaacaacaggtctcacattttaaagagaaaggacgagtgggctcattatgcaactctgtgctaactatggatgaagattcaccaatagactggaataatgttctccttgtcttatttggctttcttcttttgtttggtgtggttgctttaatttagactacactcttctagagtcctagactataataattggctgtagctattttgagcaaaggccgggatgctttcgttctattctgaaaaaaaagtgggctcattattttttatttttgagtaaattgtactttacactagtaaaacacatccgttttactttacaccagattgaacatatactttcagtttatatcagttagcttcaaatgagtttcacttagcatcaggatacatcatcaaacatataaaaatttcatcaaattttacaaaatatgaaagaaactttgtgaaaagtggtctgaattcaaaaagattcataaggttcactcgtgatttataagatttttttttcagttatatgataaagtccactacagagtgaaatattttgatctatcctagcgcaaagtgaaaatatgtgctaaacttggtgcaaagtgaaacaatatactcattttttttggggggggggggggtaaatttcacgaaaccttagatattatgatttgtttcaagtaaccctagattttagggtagaatgtttcaagaaacccatgtttacatcaaagattcataattccattattttatattatattataagtatatgttcacgtcattagcctcaaaatacatatccctcccatgtaatttataaacacagtacaaagtctctaataatgaggtttattggaacattttgcctcaaaacctagggttcttcgaaacaaaccttaatacctagggttttgtgttatgagtgccccaaaatctagtgttttgtaaaatttattccttttttatttgaattgaggccaattatcagtttcacttaaacatttcaattttaggagggctaagagcatcaccaacagaatgtgaataatccacttctttttttaattattcggtttcctaaactgaaaataggtagtgaaaaaacccatctctccaagagagagccttaatttaattcaaaaaaactaaaaggtaggcccatactgaactaacaaccgaaaacaatagtgagcttctgccccaatagtgctcgctccttgatgtggcccctctacaagatccactgccgggagatcgatggatagagaaggcgcgcgagctaattttgggagcgagccctcgatatacgcggggatgagagtgactaaattttggagatgattagggatactgttggattgttttttttcaactaaaatcttaaaaaatcatgattgggaatggaataggggtactgttagtgatgctctaagttttaccctaagggctaccatgaattcacagttctccttggaaaagtgaaaaaatgaattcgcaactcagctccaatcatatattagagggaaagaaatgagaagatggtttagtacaatttcgtaacagaagcaaatttcaggcgaccgtcacttggaatctagacactcccttgcctaaaagagtgtagaaaagcatgtgaagacgtcgcttctattgtattgcaagcaaattttccctttgttttttgagatggtattgtagccgtaggcaagcttgtcatcattagatatcttgcctagaaaaaaaatagctaagcatgaatttccacatatcttttatggaaaaaaaaagaacatatggcccctaatcgttgacgcaagtatataccttatacgtcacgtgattttactagctatgtcatgtgagcacattcttaggccaatccacttggcacctgtacagagagaacaaagcccgcgagactgaatcaacaaaaggacaatatacatttgcttatgaattattatgttaagagtaaattgcacgcatgatgcaacaacttggcaggtgggtgcaatttgatgcaataacttgaaaaatgagcgttctagtacaacaacttggcaggaatgtgcaatttagtataagaactttataagtgatcgtataaatataacaacttgcaaggtaggtacgattttgatacaataaatgaagaagttatgtgacaacttaattatttaaagcattttttatataaattcaaaatttcaaatacttattttgacaatatactagcgtggatttatataaatatatttatatttttatcctaataattaataactgaaagtcaattaaactggatgtagacattatttcggttgatatttcagaaagtgaagaaaacaaaaagagtaaagtgcaccagcggtcctcaaacttgtaagggtgtatcatctaggtccccaaactctcaaatcgcatttacaggtccctaaacttgcttagccgtacattgcctgtccaaaccccatttgactcggtctgctcgctgacatggcttgccaacgtggaggggaggagacagccagggtggtgcattatgcattaagccccttattttttcgccagccctcagacgataaatcccccactgtttcgcttttttttccccatcgagctgagccgtgaaaccctagggaggctcgattcgtcgcctccatcttcagttcgtcgccctcttcttcaagctcggatgcggggcatccaattggttccatttggcgtatctagagtgaagcccttcaatttgattggcgccatggaagggggctcgagttcatcgtcgacgaatcggcggaagggaaatgggcgtctccctctgattaagtgcccttgttgcgattgtgagacaatcattaggcgtgcggctaatacgcctgagaataaagggcgcatattttacacttgcccttgccatcaggttagttcttctcttctataatctgtgttgtggtggaaaattttcaattcgcatcggtttgctgaggttaattttgtacattttttgcgcagcgagatggaattggatgtcgcttttggtactgggaggaacaatatgaggagtacttgattaatactgggcatcttgcatctcgtgctgtgcatattcagagtccatgttctgctgtgcgtgttcagacaaatgcaatggttcaacagggtgcacaaccatatattgaaaatgatgcagagcaaattgctaagcagattaaattgcttgttaggaggatgaacttgttgatagacattggtagggatattgttgccttattgagatgtgtagtagctgcctgtgtggttgttgcggtgacaaatatgtatgctttctttaggagtggttgaaatgtgtaatgtgtgaaatgcactaaaaatgcatggtgtgtgatgaataaaatagccagtttcttcaatctgcatctttgtgaatgttgggtctatacaaattttgaaggaatgcttgttcaattcatagaatatttgaggcacaatattgcaaaggcaaaatgaggcacacattcagtaaagaggcagaacatccatttcagatactttcagcacttaagtatcacaaaatgcaactataattctggcaatcagcaagtagccatgcacttgcactacagcatgcagctgatatagcatatttttaatccattatatacatcacagtgtgttgacaaccaaaacaccattttttgtcagattgtcactaaacaaaatatattcccagctaactaataggcattaatttgttccaatcccaggtgcaggcttcttttttgatgcggcacttgcagacttcttgtttccagttgtggtctttcttttcttcagtgccactgacttccctaatttggtgttggttgtaagaggagctggccttgctgatggaatgttagacatgataaaggcaggatctggcaatgggccttgttgttgagatagcacagaactttgatttggctgcaaaattcagaacatatatacatgataaatagtttgcaatgacaagtagtttgcaatgtgagattgaaatgattgaaaacaacattacctgatcagccatctgactaaaaacagtgcttcctagctgtgatagtagttgagatgaagtatgagaagcagcaatatgttcatctatgacatcctatatataccataggtcatgtagttcataagacatgcaaaaaaaacatgtgcaacagaggagttatgttcagtgatattttacctggttgataacatttggttcttgttcaatgatattttgttgaatctccattgcaagtgattcttttgctgtggcaaccatcctctttgcctcctcagaactgatgccctgcttctttagtttacaaccccctgagttgtgattttcttctccacaatacttgtagtgcatcatcactccatgttttgtcagctttggaccatttttgccaattacttcatatggtgcctttctcctagactttttgggcctgccagccttcttctcatacacaggtggcttaatctcaggaccattgacattttcccatttgctcttgtcattgcagggccaaatgttgaaaccataggctttactgaatgcatctgtagtgtagcaattagggagaatactttcagcatttatcctctcatgcctaagacaggatatggcatgattacatggaatccctgtcaagtcccacctcctgcaatcacaatacatagcattgatatccactatgtactgatattccctttcatgcacttgaaatattccctgcccagctggtaatgcataacatgtattagctgcatctgcatttttcagcaccttcttcctaattttggggcagattaagccttggaactgatcagccaactctttttgtttattgaaatgcctagtcatgagttgtccttttatcttctctagcatagtcaaaataggtaattctctagcttctagaatgtatttgttaaaaacctcgcaattattatttagtaatatatcacacttagggaattctgagaagaaagctctgacccatgtgtttggaggcaacttttcaagccattcataagcactcttgttcaaatttctcatcacatccatatttttgttccattcttggacagaagatgacctagcacatgcccacaattgattcttcagtacttctcccttaaactgaagctgaaagtttgagtacagatgcctaacacagaacctatgttcagactctgggaagacctgttggacagctggtattaaccccttctgcttatcagtcattatagtccaaggatatgtgttttcgatgcctagatcatttttcagtgtctccaagaaccatttccatgtagccagagattcaacctccactacagcaaaggcaattggatatatacagtcatttggccccataccaactgcagttagcaattgtccaccatactttgtattaatgtggcaaccatccaaacaaatcaatggtctgcaaccattgagaa

SEQ ID NO: 7841 - DNA, 23048 bp, Oryza sativa
gcgagcgagggaagggtcggcggcgatgaggccggccagggagtcgaggtcgccgagctgcgccgcccggaagaagtcgtgctcgtcgccggtgcgggcgcagctgacaccgtgacccatgacagcacctccctcctcctccgccgccggcgaaggcgcagtgggtggcgctgccgtggaaggaaggccgagagtgagaatggggaaaggaaggagctcaacgcctctttattgacccttcttccttcttcactctctctctctctctctctctctctctctagctagtctctccctttctctctcctctctttttttttaaaaaaagaagaaatattcaaaacaggtagaaatatcttcgaattatttatttgagcctttcactgaatgctgaaatttttttcattcctcgtaactgctaccccccccccctaatttatgactctcttcaactcatttttacaattcagtttgcagttttttttttactttttccaattggatgaaaattgtacggataggaaaagtatccatatttcaaagaaaaaaaagggtctaaagtttcttcgattccctgtgattagtctcctctaagaaaataacgtgggtatcactttacttttgagaagtctcctctgtgttctttcggccagtgatcgatcgatgctcttgttacctaaaccgcaggtgagattagattaggtgctaatgctactactttgtactacacgcctaccgttgctctctggttatcgtggacccttctttcccttcttcaaaggcaagtctatgtaaaatgtctctagctagcctctcttattttgtgttgccactgcactgcaccacacaaccagactgacaaaaaaaataaccaggttgattggcttattgggctcatttgccaagcatttacagtggctaaaattgtactagttcttttttgggtaaaatcatgtttgttgttcatatgtgaaagtagattaatttattgttatttttaacattaccaagtttttcattgtcgaaatttaaagaggcaacatagcaaatacgccattaccaacgcaacccctgctaaattctaataattctaaaattttcctcttaaaaccctatcaaaatttgaataggcctcgaaccaagcactagaaacaattattttctttcttttttttgcaattttttttgtaagttgtaaattgaacgagtcaagcagttttatttgataaagaaattgtcacccgctatattttatttccctctatttatccactacatcatcataacctaagcaaaagagatttaagagacatacccaaataaaaaagaaatgtcgtagtaatctttgccgaataggagaaaaaagattagtcatcatttcttttatatttttccccaataaaatgaacacgcgtgtactcttaaatcaaaactagcgagatcttttaaatctgcttgcgtccttcatggattaggtaatcaagaaaatacactcaaaactgaaaaacaaaagtgaggagtcgtgatctttggggatgagtcggcatgtatgattgatgaagccatgaaggcaatcatcatggtttatcttctcttttttccggtgtggtggaaatggttttattggacgtatatattattagtgggcacaaatcaaattattgcgaacttgcaaggagacgtgtgtgtacaagaaaaggagagcagatggtaaacgtaggacccatcactccatgcatgcgtggtaccatactaccattagacatgcaaagctcccttttaattagcatgatcatacatagttaacttaatttgtgtataatatttttctttttttcctccaaatgggggttgttgcaagtttgaaggagaatgattccctccattttcaaggcgacatattgcaactttgcaagcaatgtggctcaaagaagggagcactttgtaaaagtaaataaaagtcttttttttttgggtaatgtagtgtgtcggtgcttctttctttccggctattattatgttggaactgaattattgaaatgagttaattagtggatagcacaaaactattgtgaaattaaatgctgatttctaggtaaattaattaatcgatcatggaatcatctatcccgtacatatttcctctgttctaaaaaaaaataatttgagtggggattcaacaccatttagaacgatgaatctggataatctttttgagtggggattctagcttgattttttgttgacaagagggagtacatgcattggggacacgaaatgaagtttttcgagattgagctgtaaaggctcacaactcgtacaagaagaagagttttgacaagaagccttgattgatcgtttgatgtgatccttactctcgttctgttgtgttttgtttttcttgccccatgtccgatatatgcatgcagaatcgtcccatcacagattcgaaatggggcattctactggagatccacagttttgacaatggtatactgtagtaattgcatcgttttggtagtagagttttttttttaaatggaacatttgcagttattgttagctggggtaaaggactgcaatttgcaatttaaaaggaacaggattagatcacgctaaccaaaccatatggtgatgacagtgtggtaagcagggttgaacatgagaaggtatttttagctcctcaaacaaacaaatgagctccgttttcttctctaaatcatttgcttaaatctctactcaagaatccagatctctaaacaatactttagttaatttcaaagaggccctactgatttgtcggtttgcatccaaagatgatgggcagggaagatctcccgtgggtaggagcagaagcagagcatggaacaacgagctaagcacatgtcatgtacacacccatttctcatttcttattgattaattggttcgcacggttcagaaggttaagtaggagtaattaattaatgggtacacacatcactgtggcatgtacctggacagatgaaccactggccccacatcattttcctgcctagctacttgcttaatgcacatgctgtgttacataatccatcctacttggatgagccaggttagtttactgacaccatctacttaagttatttttgagctgatggatgcatggtctaaatgattcactagtactatgatcacatgtagccatagatgataagcatatttcttatttacccaaactacccaaccaatcttattattaaatcttgagcagttgcgccgttaaagttagctgctttaactcaaatggattaaccttagcttaacttgctgacgagagcctagctagctccatgaccgtgcaacagtgaatgataaaagagagatataatcaaattgtcgtcaaattaactgcagatcagagatgcatcgatcacagccacttgtgagtagtgtacgtaatgtcaattagcagaacactactgttccaattgggccactattagggtggacctaagcttgcctagtgtggtctcttgctgatatatagaatcagttccaaccactggttattgttactgtggccccccatctctcttgcactgattccactgatcatcgatcccaattatatatgtatgtggcacgttttatctcatcacatttctattttggtagtactgattagtcaaatagagattagaaaattaagcacataatacatgttttacattaatattgtcttagtttttatatggacttctgaaattaatattgattttgtgaactatttggctttttaatgaaagctgggcgtatgcatttcctctaaaaaaataatattgatttctcagttttctatgcaaattagggttggcgaaagatggctaaaaaataaagtagaaataatatagtatgatctcaacaaaaacaaaacctaccaattttcggagtctctctgaaaacatggacaatgatttggtgggggagatttaccatttaagttttcctcaataaagtttgcttttgatcttttatgaaaaaactaaagtcagaggaaaatatcttcgcccgggtagtacgcgtggcatgcataatgctgatggatgtttcattagcaaagacagtcacaaccaaacaaacttttggtttaattaaaagtaaacccgggattagaatatataataacatccttatatattgcccaatgctttctgttaattagtagtaatggtttcgcaatcaggttgatgacatgagatgctcgagagactgacacgtccattaccggacggaccattggttgttactgatgttaatgttgttctgttcacaaggattggcgaatcgaatccaatgaagcgtgattatggtggttgctagatctacttgtaattatcaattatgactcactaatcactgtagtttggatgctaaagttgaaagaattggtgctaatggcttcggctcaccaaacattggtaggtttcgatgctgacatctctgaaacaggaatatggttttacataggtgaaatctctgaatttttactcaattttgcatactctgataatctgaatctgagctagcattccatttgaaaatcacagaaataacaggaatattgatcgttcgtagcatttctatcaaatcccgcatagtttatggatcttaaaaaataaacaacaaagctagctaacacattgaaaatttcaagttccattcaggagatcgggctatcaagctccaatcccttgtgcaaatcattggttaccaattgagcccagcccatgaaagacggataggaaattcggcccatttgaacatatgagcaaacagcagcattgtcacctctgaatgagtgatcagaacgaaatcaaaattctcaagaatagcatatggcatcatacgcgctcctctttttttaaaaattttttttttcagagaaatgtattttttacccaacctctatatccaaccggatatatgcagccatttaaattagaaacttagccccacaaacaacccaaattcgctcatatgaagatttgagctcaagactttgagggtgctaattagctcactgcaaccactaggatcatttgtgctcctccatgacccgttctagtaattaaacactgttccgtatcaagaatccacgatcccttcagacaaagaaaagacattctccaatggcattttcctgaacccttgactgaatctctgaattgttcagtttaaaagaaattaatgcaatgccaaagttgcaaaaagaaccaaccaaccattgctgcagaatacaaatcgcaaatgcgttcgtgttcaataatcataactgaatttttatcatttgagaatatgtgtagacagcaaaattgcaatgtagaagtaaaaatatagcatatggaggcatcccatgatccgttgtaaacattgagctgcatcacgaatgaatttatgatcaggccatcagggaaaagaaacatttctccaatggcgtatttcctgaacccctgactgaatctctgaatttttcagttagagaatgcaaatcgcgaacgcgatcgaactcgataatcaaaactgaatcttttatcagtaatgttttcatgtacactgtataatcgatcgcaaacgtagtatacgtatacaagcgctcatcgcttctctttacgaatcaatcaaacccaatcaatctcgcaagagcggattactacttcttattcacaacttgatcgaacttgaactctcatcaatggcgcgcggatcatgccatcttgctcagtagtagccaccgtacgccgacgccatgggcatcccgtactgcaccggcatggcgccggcggcgagcctgtccatggcgacctgaccctgcatgccgccctgcctgtactgcgcccacatctgctgctcctgcaccagcagctgctgcttcctctccatctccgccatctgcacgtacgccggcggcggcacgcccatcgacgctgcgaacgggtcgccgccggtggttcgcgccgtgccgtcgggcgccggcagcgccagcacgggcgcgcggcgcggcgccgccacgctgctcgcgctccccgtcgccgcctcgtgcgcgcccacctgctgccggacggcgccctggtcgtacatcccgtgcagcagcagcgggtccagcccgccgcccatggacgccttctgccgcgacagcttgctcgccgtctccaccagggcgagctcccactccgccttgccggcctccgccgccggcgtctgccacgccgacgtcacctcggccgcgtcgtccgacgggaaggccacccacccgccgttctccgtgccggagaagagcgccagcgcgagcttgttctcctgctcgtcttccaccacgggttccctgaggtcgacgaggtcgccagtctgcggcggcggcggcggcggcgccatttgttctggtgcaactttctccggcgccgatcgcgatggctcagcggcgtgatgctccggcgccgggagcgccttgatgccgttcatgtcgagctcgtcgctctgggcagtttgctgctgctgctgctgccatggaggcggcgagctgtgacccgccctgccgcgctctcgcacgaactgctcgagcgtctcgaggagcttgtcgtcgatgcgcttgacgtcggcgaagtcggccgggcgggcgaggcggacgtcgtcgcaccagccgtagaaggcgaggaggtcgtcggtttgcttggcggtgctgacgtgtgcctcgaagaccttgacgcagtcggggtagtccatgtcgaagaagcggtcaaggaggacggcgagcacgacggcgacgtcggagcagagctgcgtgctctccttgaccaccgggtagagcgtggcgagcacgacgcggctttgcctcgcgccgccggatgggcggcacgcgaggacgcggtcgagcagctggcggagctgcagcgcccggcccaggagcgcctcggtgtccatctcttgcaccgtcgccgccgtcgacccccgcggcggcgatcccgtctcgtcggcgaagcgcacggtgcgcggcgcggggaggagggatatgaggaagcgggcgcggtggtcgaggtagagcgcgtaggcgcggacgaaggcggagtggtcccacgacgcggagtgcgcttcgtcgcggaactcggcgaggagcgcgagcatcggctcgccgcggcggcccgcggggcggacgagctcgtggcggaagtgcgggtcgccgtcggcgacgaggcggtgggcgagcgcgaggcacttggcggcgacgacgtagtcgcgcgtcctggagaggcggcgcgagagggaggcggcgcaggcggcggtgtaggggcgggagtgcgcggtgagggtgaccacctcgcggacatggcggtcctccgcgggggcgtcctcgtgcgacgtcgcgcggacgatggcgacgtcaagctccggcgcgatggcggcggagaccttggcgatgccgatggaggtctggtccttgacggcgcccagcgccttgcggatcgacatggcgccggcgatggagcagcgagcagagcaatgggcagtggcaatggcgagctcgcgacgaggtgttcatccggttcttgacgacgtaggaggacgcggtttttgaagaggagggaattggtcagcagaagatcggacggctgagatgggaggaagggtggagatggacggacgagatggattcggagagtgggtggcacgtaggagtggagggggcacaagtcaaaggcgtggccggcgggcgctgacactgggccccatcgttggttcgctgggaatttagttggaaaaatatgaatactatttgatttcttcttgaggaattaaaactcgtgttgtcttcactcgtttggaccggaaaagtacacgttttcttttttctaatttcgatttcttgtcattttgtttgatggatttcttctttgtgaggtgccttcgaaaggaaggtagagaaagtaccaggaaaaaaaaaacttggagaatcaaacgagttgatgggtgggaatttttagtttttatcaagatagcatatatggatcaatcagatgatacgattccatattcgaaatgtgcgtattacatactatggatttgtggccaggcatgcattcacaaaatgcaaaacatttccactaaaaaaacaaataaaaacattcacatggaaactgatcgagaagtttcaattacgaatgaaattgatcggacgtttcattctgatgaagggccgtgcggcccagtaatgggatgggcctccagtgggcccacagcactctcgcatgtatagttggataaaagagcatttattaattaatttggccatatcatacatcacacgataattaatcgtataatcgattgtctagctagttactttagttagcgtttaatccttcagctagggaaggtaagaaattttagagcctgcctgggaaggtaagaaatgtttgcactactaaaacttaaattcttaccttcagctagggaaggtaagaagttttttgaacagtacaaggtctatggtcggtggtcctcttcaaggagttttttttggcaaagctatagctatatccacttcaaaaaatcttattagccaaacagtctagattgaaaaggctcgtaactgtacttcacataaacaaactagtagccaaacgtgatgtttctctaaattcttattagctactccctctatttcatattataagtcatttgtattttttactagtcagcattccatgatcaagacctacatgcacaacagcgcaattataaaactttgttaagtttgactaaattcgtagaaacaattttatagttatattgttgtgtatatatgtaggtcttgatcctaatttttgtgggcctcattctgctaaattgcagcccaggaatgacaaggcctcgagtgggcccttaaactacaccctgatcatatgtcacttatcgtgagcattagtttaatttaattaattaatggggtagtgacataccgctctgtactaaaaaaatcaaccgagtaccatgcgaatttagacatatttctgttaaattcattgtactagaatatatcatattaattaattagttataggttttttttatactgagggaataattaatactactccatactcctgcctaaatatattagctagcgccatgagaaagatatatgtatcaatcgggtaaattgaaacaggagagagttttcagggaaaacttaacgctaatttggactaacaaacaatacattcatgcatccatctaccctataatttaccaacacagtattacattcctcattcctcgttgatcggtcaggatgccctctcacagatccaacgcctcacgtcgctcccaccttctcccatccgcgattctccctctaaaccgcgatctctctccctataatctctccacctaaccacgccccaccgcacctctccctcgcgcatcgcctaccctaatcgccgcctgccgctcactccctcgcgctcgcgctgcctcgcaggtccgccgccgcgccgctgccgacctaggtcccccccacggcgaccaggcagagacggacgcgggcatccatcgcctcatcgggcccctccactccctccccacctcgcgccgccggttgacgcggcgcagccggagccccccgcagagcacggcgctgcatcaccttcgcccgcgttcgtttctcccgtacctgcggaggcgggtcgccgacacccagcacctccgtcgacgcgacgctgcggcctgtctgcgactcctcctccttttggcccagctacaaaatagcaaacgtatgctcagcatttcaccttcatatgcttctatttttgggaatccttttgctaaatagtccttccacccttgagggtttttgttcggtcttatccgctgtgtacttgaagggcaaatgtattattgtatactgcataacacaatcaatgctctcgaagtttatcaatgcttgaggatcaacaagttatggtctaaattttaaaccatagagtttattactttcaatattccactatgttttccaaattggcatggtgcgattgagaaatcaaaatgatgtatatgttttcatgctgctattgagatatcaaaatgatgtatatgatttccataatttcaatataagatcgcagcattgtgaattggtttcaactaatgtttgtttatattttgtctgttagatatggatcaaaatgcttctgctaatgaaggtcgctttgccgccaaagatataacaaatagaaaaatcaatatgttttaagtgcataagacaagaaaaatgaatggaaatgacctaagggaaaattcgaattcgtgacatgcctttatataatttttctattcgtgacatctgaatctattttaaagttttattaaagacaaatataattacaccgtagcgtttagcacgggcatattactagtatataatagggtaagaattaaagagatacgcttttactctatccgttctaaaatataagtacttttagaatagtgcaaagtcaaattttttaaattttaactattaatagcaaaatattaaaaaagattaatcatataaatttgatattattatatttatcattaaacgaactatcttaatatacaactctttaatttaaaatattttacttttgtagatattattggttaaagtagcatctcgaagaccgtatcgagatcaaaaatgcttatattttaggacaaagggagtatatatatacttgatcttcccaaagtgatttacactaactttaaagcataatagttaatttgatgatggatgagtaggactagcttcttgaactgtttttagatctccaaattaaacacatatttattaattatatttattactatccattactgatttcaaccaatgtattgcgcgcgctgcaagcctgatgtaatggtgcttaaggcgaaagaatatgcccatatatattatcgatcagataccattatgtgaggttttttttcctccgattaattaattaacacaagtatctacacatgaaggtacgttacaagcaaaattaattactcacgttctaaacataatttgacttgttaagatttcagtaaaagccgggctcccgaaggtttttctcttaaaaaatataatttgatattttaggatatattagcacctcttgtatcccgaagaaaattaaacagctatctaattttgatgatgagcgttcattaatattctatgaacgacttgtatggcagatggcctcagtactgagccaattttaagtggtgttttaatactacaattagtacttaccaagtagtaatataattcagggcatgtttgaggaagcttctagttacaacagctttttccagaattagaaactccccaaacagtacagctttttatacagattctaaaaaactatcgttgtagttgtataatctagaaaataaactagaaaacagaagctagctagaaaacctattttttttcatattctcatatggtagcaaccaactagatgcttcttgtaatgttaagctcaaacatgctcttaaaacattgagataatcttttcctagtgaaaaaggactaggaaggaccatatctctaatgtacccgataaacactgggtcgatagccaaagcgtagaggggataacatttgaaattggtatttgcatatacctctcatgcatgctcttctcctaaatatatatatcaaactaatttagacatagatagggcatgtacaaaggtagagtcggatatgagctctacgttatctagagactagcatcctacaacagttagagacaatatggtctctaatcattaatgtatcaaaatactttttattacttttctttcctttctttcaccactatgcaacaaaatttgctctaataaatgctaagagtcgactcttagccgttgtcatgcataacaactatactccttcctctttctttcatgtcaccaaatttacttgcatggcaatagagagagaccactaataaacaccattgtacatacccttattagttagcttactagctaactaacaacagtttatttataaaactaataccctacattttagcttgtaatacactacactttctttaagagattatattacaaggaagatacttgaggaaaaatgatttttccccaaaagtgaaccctgattccttgaatgaactaaagacgcggggacacaaccccagagatgttgatcaagacagagaacactgtattccagactgattgattatattcccagtgattttacatccaccgtacctgcatcctctctctagagatgtcatttttagtttccctagatatatatacttaacgaaccagcagcagctgcagctggcacattccaacacaatctatgcatgcatgcatgaatcgagataccataaagaatatatgtgtgtgtgtgtgtgacatctagtatcttggatgcatgggttaaatcatcattattcctcaagaatccaaaaaggaactactaattatatgtacatcgatcgtctctctctctatcgatagatgcattagaatattatagctaactgttaactccaaatcatctataactaatataatagcccattcatacattatgtatctataaaaatatactacaccaataatacccggttccacctttcatacacacacataacgtcttagagtccgtgttgcagctggctacaaatctgtagcccgttttcttccctatcttctattttcttctcgatatgtgattatagctggcttatagcctgctattgtacttgttcttagactagctaactactacttaattagcttgtagtagtagagatgagatgagaggatcagtagcatgcaatagtatggtgttggatgagtagttgcatgtgcatggtgactttattctcccaaaggggagaacagaaatgaagagagaactggggagaggagaggagaggggggcctaggccttcgagaaagcaaagccaaagcaaacccaaaacaaagctatcaaagcaaaggcagtgcaggcagcagcagcagcgagaatctgattccctgcccctcccctcctgcgagtaacatgccatgcatgcgtccctcccagtccctagctatatttttcccttcaattcactatcgatcatgcatgctgctaattccagatctatctatcttggaccagctagctaccaaccaatctaggattacatcgtctctcatcagtacgagtactgttactatctctcctgttattaatcactactcagtactgatcagtctcgctcttacctaacttaacaatgcatgctaaccttagcttagcttagctagctccagtactagctactttatatctccatatatatagtattagttaacctaagctaagctagctagcaacatgatgcatgataatgatatcctcagaatatagtactgattcatgcatgatagagagtagtagtagtatgatctatcttctctctctctttcactatctcttttgcgtggcacacaggcacacacagagacacacacacattctttcgtacgctccattcacttttctgtgccagtcttgttggcagcagcttgtgcttttgggcacagcattccatcatctgctatctctctctctctctataggcagctcttccttagctgcttgtgttgtgtgtgtgctagagccatagacatcgtcgtcgttgagacgatgagagagtacacacgtagtccctgaaaaaacacccggccggctagctggccacacaaacacacaagagctatagcagtagcagtgtagtaccactgaaccagagcatgcacttccttcttcagctcatcttcttcctctttctcagtgcacttctcaaacttccatgcacacaccatcaccaacacaacgacgaagactgaataatattatatatactctctcatctcatctcatgcaatgtcctccatgaaactcgccctagctacattacatatacttctcttccttccatttacatagtactctattggacactactgcatgcttgcctagctatctgctatctatacatactgtgtacggagtagttactagaatgcatgcatgcagtgaatttcaggtgcatttgtggtgattgattgagctcagaagcttaattatctgtgtggtatgcttattaattactaaaactaagctagaatatatgtatgtagctttttgtcatttacattgatctcaaatatataggaaaataatatatatatatatatatatatatatatatatatatatatatatatatatatatatatatatatatatatatatataggttggatattatattaaaaagtagcatatatatgaaggcaactgagaccaacttagcttagctagataggagtagtatatgatttgagctgatcaaatcaaaatggccctcatgaaacactaaagatcaatctgtgggatatcttcacactttagtacgttctatcactgtaaaaggagcaaaaggtaaaggtaaaaaaaacaaaagagccttgcttttgaatgggccttctcagccctctttgactacaccctttaatttgtagtcgcaattaacattgcaatcctattgccaagccgtactacgtgtactatacaccgtagagatttacatatatacgttatgttcaaaatgtgcgtgtaattaaaattaatagggcatatgcgaaatagactacaaatttgttaatagaccttatgcgatataggtggtattgcatgtttgaaatagttgcatatatcttacttagagacgaattcatgcagtagctagcttagctatagcttctaatatatttctgatcctcaggtcattacaaagacataaatttatactgattgttgcaccaatagcaaaattaagaattgagagagaaggcatcgatcatcacacgtaatatataggagaattaattgacatataataggagtttccattaacaaaatgaacaacagtagtggtacacataacgtacgtggccccaaatgcacgagagagaaaaaaaaaccctaacatttaaaagaaaagaagaagaagaagaaacacatcaagtgagattagatcatgcatgcaaagctaaactagctagaaaatactagtactacttttgcatgatcaaaattaaacacacactcctccagtcttcattgggacacatcacctaattgcaagtgcaaaaaatgcaaatgcctcgatctcgatctcgatcgatcgagatcaaccatccttaaacttaatttggttctatatctcacaccaccatcaccatcaccatcgatatgatcgatcacacgccctattatgaatatatatctagctagctaatcgtagagagtctgcattatatttgcagatctctgccattagctagctagattgtgattagttataggctagctctcgatcattacaagagatggttacctgtggttgcactggagtaggaggtgtatcctccagcgaggtgatgatcgccatacatgccccttgggtagccttctctcttcgatgatggcatcgcatggtggagctctccaccgtcttcgccgccgccgctgccatggccgtcgccgtctaggcctagctggaacatccccggcattgccattgccggcggtggcgccgccatcgccgcctggtgatccatggcgtggaagaacgggaagctctgcatctgctgtagtctccattgctcgaggccggtggcggcgccgacggagtagcagccggccgcgtcgacgggcggtggcttgccggcggccgccgccatgccagagaaggtggagccgaggctcatggcgtcgaagtcggcgaggcggagcagcggcggcaggatggagaggttgccgcccagcatcgccgggagggcgggcgcgttgggcgtggcgcaggtggaggacgtcgtcgtcgtcgtcgtcgaccccgctggcgtcgagccggcggtggtggtggcggctgaggcggagcccgccgcggacgccggcttgggcttggcgcgcttggcgtggcggcggtagccgccgccgacggggacgttgcggagcgcgccgccgcgggtccagtagcggcggcaggcgcggcagaagtggcggggctgggagagggagtagttgttgaagtagcagaacttggtgttggtggagtcgcagcgcgggcacttgagccccggctccggcagcgggatcctcgccagccgcgccctctccgacatcgacatcggcttcgccggccccaccgcgccgcctccgccgccgccatcggcaagcgtgcccggaatcattgactgctgctgcagaagctcatggctattgccgtcgccgccgccgccgccgcctccacaaccggcggcgacctgatgatgctggtggtggccgtgagcatgttgctgaattaatgaatcaaaccaaatcaattaaacacaagcttaattgtatatatatattagctagagatcgacaagagaagcatctagctagcaagaaagatggaagaagaagacgattatttgggcagtaagtatataccaagacagtgctccggatcggaatattgagctagccctagcaagtattctcacatctctttaaatttttcttttccaaattttaatatatatatatcgccacaactttgtagcttttatttgtgctcttgcgcaaaagagaatgaataaaatctcttgacggaaaagaaagagaaagaaagaaagaaaggggatgagctaggaagaagatgatgactggaaattgattattacctgctgctgctgctggttgtggttgttgttgttgttatcattccagctcgaggaatccaggaaggcaggggggaagatcatggtggtgggtagcaagtgatgctgagctgagctgagctgaggtctggtgactctggagagaagatagagaattaaagtgctagggtttggcaaggccttgtgtttttcttttctctctctccctagctgctgatgcctgattgctttcccttctcttctgcagctatagctagctaccttgtattttgtttgtggtgtatgtggccaaagttggagagatagtggagggaatcagaagagaagaaagctagccaagactaataacaggtgagagagagagaaagagaaagagagacaagatcagtgagagtgaggtggaagggatagatgaggtagcaattagcagggaaagaaaggaaagagagagagagagagagagaggaaaaaaaaaaggtgaacatgtcatgtaccaccatccttccttccatgtatccatccttattttttgtgatcttgtgggctttcttctttgctatgctgactgctgctctctctctctctctggttttctcaggaagagggacaccaccgtgcaagtgatgacagctacccgtagagatccgactccaagtggatggaaggccggcgatgacttatgtgagcttttagagatctaggaatatgcccacctcattgtcaataaatttaaactgaatttaaatttaaaagttattaattcaaactcaatcatgtattgaccaaattaaaaacagctagtgtacacacacatatatgcaaatacaagccactgtaattcttatataagtctatcgcgaatacgtagagcacgctaacacagtcgccattaattccttctattttcaaggagtagatcgagatatgtagggcctttgttaaaatgctctaaactatatttaggaagtacacaaatagccataaaggcttttcaagtaaagtagtttatagtgtagtaaattattgtcctcaaacattttacaaattattgtgatgcatatctaaatataggagaacttaacaagaaatatgtcaaattttggctagtaaaagagacaaaatcatagctcgatgtttacatagagattttttctttatttccatcgatcgttccttaaaatgtttgagacttttttttttataatcatgtacttttgatagtttggagggggactgccggagagcaccggaggactacatcttaattgattggttttgtcttatacatgacatatcatgttcaaacttcctcaataattattgtcatttaattggcgacacaaatctcaaatcaaatacatatataccaacatgcaatcctccatttactagatattaattagtactttctccgtttcaggttataagatgttttgtctttggtcaaagtcaaactattttaaatttgactaagtttatagacaaatacagcaatatttataatactaaattagtttcgtcatatcaataattgaatatattttcataataaatttgtcttggttgaaaatgctactacttttttctacaaacttagtcaaatttaaagcagtttgactttgattaaagtcaaaacgtcttataacctgaaatggaaggagtacctcgcaagcaagtgcatatggagatggttaattacaaaatataactatatgagtcataaaagaaaatatacatagtaactaatacatacaacccctcatcctctctctagataactttttctctttcctccctctcttccccctctcaagtaaaggaaaaaaaaggggggaattttactaactctcttcaagttctacaggatgtccaagagacaggacacatgcaactaccaacttcagagcctcaatctcatgttggccggctagctagctaccatgtctagaccccacagtacatccaacatttttgtgacattttgcatgcaactccaagcaactggggagagaaatagtcttgggccttaatctaactagcttactatagcttgagtattatacttgcactatttttatgtacacaatgttataggatcaccaggtgaataagattcaatttttaagtttgtagtatagtgttaatacatcttgttttgcctgctgccggaaatctaacaaattaaaagtttattcgaactaagccttattgttcttattaatgagaacagtgataacaagttgattcgtctgctcgtacgtcgctaattgcttgttagctaggtactatataccaggtacgtaaaattaagctttgcacaggagcgattagctagcaattagtacgtaaaattaattgcttgttaggaaaaaaatagggtcgcttagcaactacagttccaacaagaaattaatcaattgtttaactaaaattgtgcattttgatcgtggcctataactaataaggacgtacgtacaatgcaacttgatcaaatatatagtcgcaccagcaatcaactgcacgtacgaagaaatcactgtataaaatgggcccagatttttgacaaacttgcagtcatttttatgtttacaggtaggatatgccaatcattcgttaactcacgtgcggttaataatttggaccatttgctttgagattcagcggtacaatatttaattgcaaaactaaatatgatttccctaattttttcctttttagctgttgtaccataattggaaacctagaattttagtgaaaattactatttcaatcaaatactagtatagacgtcctttcaacatactgtaggtaagttgctataggaaccgtcatatcgatcggcttatcttaagcagcataacttaactggttagattcctggtgatggagccagcccacccggattcaactcttagatttgatatgcacccctttgacagtgaagcgtctatgatgacttcgtcaaccctcacgataccgttggcctagtcttccaggatacttatagaggtcgaggagtacgtgtatacgctcatagagggtgagtgtgagtgagtgtgtgtgtgtgtgtgtgtgtgtgtgtgtgtgtgtgtgttatgacttatgagtgtgtcggaggatgaactcctccggcgggggaccatgagagcactccttttttggttcggccgggggcaacaggtggaggtcgaggaactggaaagattgggagaaaaagagggggggttgggcccccttacttagggtgagacacaaggggtttatatagtttcgggccgctaacaagcgtaatactctactcctgtgtatgatgatttttttgagctttggaagtctctgaatctctggtgtacaagctagggttgggtgtccttactctcccttcttttttttcctcactggacgtccactccccttttatactttaaggggttattacatgagttctatgcgtcctctagtaagagaagaaacatcctctagattgaacgcgtgtctcgcgctgcatgcgctacagcttggaaattccctacatcagtagtcgagcgggccccaccaaattatgccgactgacgcaagccgacatggaggaggatccctgtcgttcttcgtttaatggatgtagatttgaggctcgtatgcgctggaaacgccatcccgggcgctgcacctcctgtcatcttgatgggacagggcataccaaccgcacttcgcctgacacctgtgcgaccgcgcgtggcttgccgctgtcccgtccgttgtttcaaccgatcacgtccggtcaagattcggtcaggcgagcggcacgccacatttaatgcggcgaggcacgcttgcccggcccactctgcccacattaaatgcggttaggtgggcgcggaggggtatccacgaatcatttttgcatggtgaccacgtgtttaccaccctgaggggtcggggcagcccgacccctcgggttaggtacgggcggcttccactcgtccacgggcgcgaccccttggggtgagcgccacgtggatgccaagggcggctcctcccttctaagttcggtactcccggtacccccgggcccatatcaccgacagagtgcatgcgtttgtattgtgcttctatacaaacttgaggatgatgtggacttaaatatgtgcttctttacaggagtaattataattagtgggatataactatatttatagaaatagaggaatagcctatatttcccatgcaattgcattgagctagattaaatcttatttaaaagtataattcatttttgtatgtgcatgtcttgtttataatatatatatatatatatatatatatatatatatatatatatatatatatatatatatatatatagctgtacatattttgtaggattgtctagtaatttctatcacctgaaaatacccacaaatttcagtcacttttggacaacctaggtcgaggcaagattaatgcgtaacctcctcctcctctctctctctctctctctcccccccccccacctatgacactggccagatcgagcagcctaacgtattgagctccgccgccactccttcccgtcccggcaagacccccttttgctagcattgatgagcctctccggaaccacccttcccatcacgtcatccctcaccttatcttcttctctccaccactcattcccatgccatctccctcctcccgatgcccaagcagcaccactctcttccatctccctcccctcgccacctaccttgtcgcccaccgctctcctccagccccacaccaccagcaaatccgacactgctcacccatatctgtcgttgtaccaccacaaaccaccttgacactgacttcatggccatccttctaaagtcgtctggccctaccttcctgcaccaccttctgatcctgaaaccctaatctattagagtttcgatattgttgccaccaccatgaagttgtcatcgccattgctagtgagtccttcatgtgaatcccgcttttcctaacctctcccttggctagatgtcgaagatgactcccttgttgttggctgagagtaggggtggacagaaaagaccgaaccgaaataaccgagactgagaccgaactaatcgaggcaatgaatttcggtcttcatactcaactaactgaattttgcttggtcaattcggtcataggcctcagctaatcaagatgaccgaattgaatgagtttagcccaataggcccagagaggaagcactaaatccccatgtcccacatgcacataccaagccgctggccgatttgacatttttttttattttgtgtgattttttggacatgctgtttatatgtgatctatgtgttttttggatctgcttaaattttggtcatgaccgagactgagaccgaatttcggcgttcattattttgcaatgcaaatcgatcggtcttcagtattacaggaccgaagttttctaaaagaacaaagaccgagactgaatttgcagtcagaccaaatgcccacccctagctgagagaaggtgactgagatttggggaagtctcagtgacatgaaagatacttcctccggtttcattttaattaacgttttggacaatgcatggcacggtctacaaaatatatctttgaccttatttttctattataatatacacaataaataaatacatgtttacttttattatagtgctttgaaagacaaatctatatatgttgtcctagtttctttaaactaaatattttttaagttattgatggtcaaagttataaaagtttgacctcaaccttgtccaaaacgtcaattattatagaactagagggagtaccaacatacccctattttgtattaaattatatataatacgaacctgatcaccatcatgatcaaatagtatagatctttctttctttattgatgtggtaatctctaggccttctcctgtccccttttaatttagcagtcccttaacaacatatatactactaatatatatatatatatatatatatatatatatatatatatatatatatatatatatatatatatatatatcactggtggagaaaccatctttggtcggtcggccaaaatacacaatagtcccggttgcaataaaaaccgggactaaagatatctttagtcccggttcaaaaggatagagttttttttttatctttagtcccggttgg

SEQ ID NO: 7842 - DNA, 3849 bp, Oryza sativa
  unsure (1)..(3849): unsure at all n locations
aattcctgcagccctgtgatttgttgttgtggatgatttgggatgtttgggatattgggttgttggtgtagatgatttgggatgttgaaatgtgtggatgatttgggatgtttgagatatatattggtttgttgctgtggatgatttgggatgttgagatgtgtgaacgatatgtgatgagtgatgtgggaacacaaatatgtgatatttggcgctagaaaagaaaaaaaagaaaaaaaataacttttgtaccggttggtaacatcaaccgggactaaagatttagaatctttagtcccggttggtgttacgaaccgggactaaagatttatttttagtcccgaattcgtagtctcggttagaaaaccgggactataggggggttcccaaccgggactaaaaagcgattctccagcagtgatactgatctccgccaatcttatttggggcttagtacgtgtaagaccatttgatggtttatattttgcgatgaaaaattaacaatatatttgaaaatttggtttggaaaatcgaataaatgttggctttgagagtgtgtgtgctaataatgtgaatcatgacaatatctatatgcttgaaaacaatttgttttggttattatattggtgtgtaacttcttttggatcaaccttggtcaatggtagatcgagactaaattcatcgatgagttgagtaaggtccaaaacaattaggaatgccgggtgacaagcccatacagtggctttgagttgttggggaaaaaaagctaggagcataagagcaagtataatagtgagctataagcctactataaacttttgtggaggagagaggtaacaaaaaatcaagggagttggctctcatgcaagagctagcttaacacaatctccaagacaaatacattaaatgtataagagcaggtacaatagcatgctataagccagctacaaacatattttaaggagataaataaggagagagaagagcagcgggctataaatttgtagccagctgtagcacggactccaagacacagtgtgtgtatgacaggtggggccaggtattaatagtgtagtatgttactattgtatgaatgagctattagattggctatagatgaattggagctagtagttggctatactattaaacttgctctaagtgagagatagagagaggagaagaaaattgtagccaaccttagagaaggtacaatagcagactattagccagctacaatcatattctaatgagatatataaaagataagagagaggagcagcgagctacagatctgtagccagttgcagcacggacttcaagacacaatgagtgtatgacaggtgggaccgtatattaatagtatagtaagcaactattgtataaattggctattatattggctatagatgaattggagttagtattgggctatactattgaacttgctcttatagctaatttattatatatgttgactttaagatggactaatagtagaaagtaagctatactactatccttgctctaagtgattcctcagtttagtacagagtgcccagtagagatgctgaacagaaggtgagcaaactcacatgagtgaaaaccctactttattactccctccgccccctaatataaggatgtgtttggttggatggttttggtgggtcgggtcggggccatccctttttcggagctgtttggtttgaggattatgtgggttgggttggttccaaaaaggaatattccaccaatattcgggatgaactgaccacccaaaaacgaccggaccgatcgaacccacctctctccctctcgcgcacgtgagttgcacgcgcctctcctgagcggtaaccctatcctccctcagcgcctttccccatcgcactttcaccatcgaaaaaaaaagaaggcggcggcggcaacgcaagaagcagcggcgaccgcgcgtgcaggagccggaggcggcggcgaccgcgcgtgcaggagcccgaggcgccggcgacagcgcgtgcaggagcaagcggcggcagctcgcatcctctgtccgtcctccatcctccatcccccttggctactgcagcaacaagaggaagaagaaccagcgcctcccacctgtcgcctcctttcctcctctgtactcaactgctcatcctcgtcctcgcatcctcagtgagaaaggtaagaaaaccctagcacttgaaaccctagatcttgctgaatttgtttcctgagatgattttcccttgttgttgaaaggactaggtgaagcagttaattcacagtagatcaatttatagttgaatagatgtttgcctattgatgtggtatttttgtctatttattcacagtgattaatttctgacgtgagcaagtaatttgtgattacatgatgtgtgattgagaagagtttttgtgctttactttgattgttgtattgtagatggataagaggaccaagcttttaatttttgctgctgctgcacatattttattgtcaatgatggccattattattcaatctagaaaaagaaagagatgtgcacggagacaaggtgttaagtatggcccaatggatgaaagggatcgaatgagatttgaatacctagacacaaaaatttggaggaatgatacaacttgtatcgacatgcttagacttagaaaagattctttctttcgattttgtaagctgtttagagatcggggtttgcttgaggataccatccacatgcgtgttgaggagcaggttgctatgtttctaaatacagtgggacacaaccttagaaataggttagttcgcactaattttgataggtccggagaaacagttagtcgttatttcaacaaagtacttcatgctattggtgagctacgagatgaactaatcaggcccccctcattggacaccccaaataaaatagccgggaaccccagatgggatccttactttaaggtgtggcatttatctatctccttttcagatttttatttccaaatatatatgtggtccctaattatttatggtactgaacacaaattaggattgtattggagctattgatggtacacacattagagcctctgtccggaagaatatggagtcttcatttcgtggtaggaagtctcatgccacgcaaaatgtaatggcggccgtagattttgatcttcggttcacttatgtcttggttggttgggaggggacagcacatgatgctgtagttttaagagatgcattggaacgtgaaaatggccttcgtattccacaaggtaatagatatatttagttccatcaattttgtccatgggaaatgttaaaaggtagaaatttgatcaacttgtccctcatttgataggaaaatactacctagttgatgctggatatggagccaaacaaggattccttcctccctttcgtgctgtccggtaccacttgaatgagtgggggaataatccggtgcaaaatgagaaggagttgttcaaccttaggcactcatcccttcgaatcacggttgagcgtgcatttgggtcactaaagagaagattcaaaattcttgatgatgccactccattcttccctttcccaactcaagtagatattgtagcagcttgctgcattattcataattgggtcataaatgatgggattgatgagcttttcataggtccaaatgaaataattgaacccaatgaaacatctattggcgaagcaaatgaacatgcattgatggttcaattcaggcaagcccttgctgatcaaatgtgggaggaccgtcaaaaccatcgtggacactaatatgtagcagttctgtgtgatgnggtncgaagagntagtcatccatgacaggg

SEQ ID NO: 7843 - DNA, 1410 bp, Oryza sativa
  unsure (1)..(1410): unsure at all n locations
tgttggctgatttgtatggacttgtttgctgatggtcatttgaatggatgagctagttggttgaatttaatttgtatggttaaatatgctgttgatggtcatttttcttcactttatgtgtgaatttcatttaaatggacaacttgtttgctgaaaggtatttttatggtcattggtttattatttctgtaccatatcatgcttgctgaacttaattttcatttctaaatattatggcttgtaggaaatggatagcaaaggaaagggaggaagcaaccatgcttcatggacatatgcaatgtcctctttcatgttgtctcatctagccaatcttgtggctagtgggacgaggacttcttctggcttcaaacaggcccatctcaacgcatgtgcgagggctctcaatgagatgttttgtactaattttaccggtgatcagattaagaatcacttgaaaacatggcaaaagaagttcacaaagatgaacaggcttaggaaagtgagtgctgctggttgggatgaagttaattttgttattactcttgatgctgagcactacaatgaatatatcaaggtataaacactcctgttccatgaaaatttctacagacttttcatttttgttgcaagcacttattttgttaaatatgttacatgataggatcacaagaccgatgctgagttttttaacaaacctcttctgcactatggtgagatgcttacaatctttgggagcacaatggctacaggaaagtttgcaaaggactcaagttcagttcttggtactgaagatgtagaaactgaaaacgaagaggtgaatcgtgctccaactactattgatcttgatgctgaaacttcatctgcaagcaagccaaagaaggccaaaacatctgaaagtgaagatgatgggttgattagggcaatcaccaatgtgggtgacaagcttgctgctgctatagtgaaggctggtgagccagataatacgctaccggtaggtttatttgacaccctgaaaagccttcctggttttcaggacatccacatatcattttactatgcttatttggtggctaaccctcacattgctagagctttcgatggacttccattcgaaaacaagctacattgggttgctatgttcattagtgacaagtttcctggatcaatgtanggtggttggatgagttatctagttcttttgctattatgaatgtgctgccagtgggtggacattacttgtaaggcttgaacttgtagggaacttatgtgtggcttctatgcttgcaatgccactatggttggactgctatgtgtaagaattcaatgggctactaactcattatttgtgttggaaccttctatgtgtggattgatgtatgctatttatgtgtgattggttctggtctgggt

SEQ ID NO: 7844 - DNA, 3960 bp, Oryza sativa
  unsure (1)..(3960): unsure at all n locations
ccctcccccaccccccctctctttcttctcaagaaggtgacagcgagattcccccgctccgccgtcttccccgtctccggcagctccccgtcgctggatccgccaccaccggccgccgcctcctaatctcatgcttgctttgcccccgccgccgacgccggcccaccaccctcctacatccccacagcttcggcggtgccgccgccgcctcgccacccgctggattccaccgcccactgccggtcctccgccggccacggccatccctctaagcgccgaggaaacccccccctaccctaaccccaaccccaaaccctaacgcgtatgctcactgtcggagttgggggtgtcgccagcgccgaagaaaaaggggagcccgctgaagttagaggagagatgccgatgcacgaatcttggcatggatccaatggttcaaaatctttaagatttcatccccaaatttcattcaaatgacatatagcaattccataattaatgcttaattgttcatgagccgatagattaatatattaattgttggcgaatcgcaacaattaaccggcgcatcacatttggcaacgtacgtacttgagtgcgtgtcacttgtcagaagcggagtctcgccaaattctttcatttcattgcactattatataagcatacgaatgcagaagtataatattaaattctgcattattaagcactaatgctagagccttgagcataaaatcattttaccggacgtacgtatatatagtgcatgtggtaatcaactgcatgcaagaattattagtttagcaccatccgttgaatggtaattgattggtcgatcgcgcaatgccaatatcaatatatatgccatgtcagtgtcaccagtacgagaataagaacgatagatacatcatatcttccaaattaaacagaactaaaatttaatggaggatgatgtgtcgatgcctgccttctccctctaaacataggagtaaataatgcatggcattataaaagataaacacagtaatgatgcatgcatggcgagcttgctcaactcattataaaagaagcaattaaggaatgccttcctcaactcattccattcatcaaatttgaaggtagctagctctagcgagcttgctctgccttggaagctaggccactaatacgtagaacgtagcaatggcacaaatgctagacggcctaaggcatgatgagcaagcatcgctgcatgctccacaggaggccagcaccatgccgacgatgtcgtgctctgatctcctgctcgccatgatgtgccctcttatcctcctgctcatcatcttccgttgctatgcctacgcaacaaggtccggcgggatgctcagcagggtcccctcgccgccgggaaggcttccggtgattggccacatgcacctcatcagctctctcccgcacaaatcactccgcgaccttgcaactaagcatggtcctgatctgatgctcctccacctcggcgcggtgccaaccctagtggtttcgtcggctcgtacagcacaggccatcctacgcactcatgaccgtgtgtttgcgtcacggccctacaatactatagccgacatcctcttgtatggcgcaacagatgtggcattctcaccatatggtgactattgcggcaaataaagaagatcgtcaccatgaatctcctgaccatcaagaaggtccactcctatggccagacacggcaacaggaggtgcggctggtaatggccaagatcgtcgaggaggcggcgacacatatggcaatagacttgactgagctgctcagctgctactccaacaacatggtgtgccatgctgtgtctggcaagttttttcgcgaagaaggtcggaaccagctattcaaggagctgatcgagatcaactcgtcgctccttggtggcttcaaccttgaggattacttccctagcttggccaggctacctgttgtcaggaggttgctctgtgccaaggcctatcacgtcaagaggagatgggatcagttgcttgaccaactcatcgatgaccacgctagcaagcgaagatcctccatgctcgacaacaatgatgaggagagtgacttcatcgatgttctactctctattcaacaagagtatggcctcactaaggataacatcaaagcaaacttggttgtcatgttcgaggctggaacagatacatcatacatagagctagagtatgccatggccgagctaatacagaagccccagctgatggccaagctacaggctgaggtgaggggtgtggtaccaaaagggcaggaaatcgttactgaggagcagctaggtaggatgccctacctaaaggcggtgatcaaggagacactccgactacaccccgcagcgccacttcttgtgcctcatgtctccatggttgactgtaatgttgagggctatactataccctcaggcactcgtgtcatcgtcaatgcatgggctattgccagggaccctagctattgggaaaatgccgaggagttcatgccagagaggttccttagcaacacaatggctgggtacaatggaaataatttcaatttcttgccattcggaactggtcggaggatatgcccaggtatgaacttcgcgatcgccgccatcgaggtcatgctagcaagccttgtgtatcgcttcaattggaagctaccaatagatcaagcagcaaatggaggcatcgatatgacagagactttcgggataactattcacctcaaggagaagctcctccttgtcccacatctcccttgagataattagtcaacttatctcaactttaagctgttggtatatattatcttacaatttgatagcttgatattgtatagtaatcacctccgtcaacaacttatgtaagtagtgggcttgtacgttgtaactatttttgtcttttccttctgaggagggctttgttgtaacttgtatgtataatgtatctatgccactccacctactcctaattttacaaataaccccttgaacttctcagtattaaaaatctatcgaatctctaaatggatagccacatataatatcaaattaaggtgaatattccctatagcaaaatgataggtacacatttctacacaataaaaaaggtatattaatatttcctttctagttaataacttaatattgatggcgattaccttttgtcaacatatttgtgtgagtgttgtaacatgtaaaggataaacatatactatatgaaaggtggaaccaatatttcaaatactcaaatttattggaacacttgctccgagcactacagcccctcccattcacagctgctgccaagcacctgccgtggatttgaggtgagggagggaggatctgaggtgagggagagagtgagttgatggacaaagagatagctctaagggagagggtgaggtgatggagaaagagagaacgagggagaaagaggccacccttgactgactcaattgatttattttatacatctaaatgaattttgcatgcggtcccgcttgtaaaaatgaacatgttttcataggcgttttcttttaatgaaacacttgcaaaaatctctataatattaatttacacaggtggtttgtgaccttaggaccacatgctgcatttttatagaggtaggattttttttatcgcttataaaaataaggaaaaagtacgaattatctccccgaactaatgcgggctnnctgaactaccacttgcgcttacacaatccccagatccttcattctctcatttatgcagacctggcgcatttatcctagctttaccctctatgcattgtaagtttgggtctacatcgtctattccaaactgggccttaatagcatcacaccttcattaaaaactgggcgactccgctttataatcgtaacctatactgttttagtttcaacccggataaggaatctatataatctccgcttgccct

SEQ ID NO: 7845 - DNA, 4971 bp, Oryza sativa
accatctccaaagtttagcccacatattttgctggggagatctatctcacaaccaggcgtctccactctcaaatacctcaattgaagcacatggctaatggcagtgaggtcgacttgaccgccatggccttccaattcgatgtgcaccacccgtatatacttggatagcatcagaaatgggagcccacgtgaacactcaccaaacactgaaactgatcgagcacgagccatgcttgtagaaatgacgctgccctcaattgcgcaatctgatcttgcagccttgcactgcagggatagccgacggaccttattgcaactccgctcatggtgcatagccatgcgcatgtagtctttacaactgtgtgcaacgctgacaaaattatcttctgcacacttgatgaggatcagatcaagcatcatatcatgcaccttgcaactcaacacctccccaccatagccggtgctctctggttgaatcaagcccctgttgataagctcactgaagtagccattaccagtagcctccaagttttccccatgagggttacccataataccttcagctatccactccgtaactagttcatccctcccgatctcatagtcctctggatatttaccaatatataggaggcatgttttgagatgaagaggaagattcttgtaactcaggtttaaaatattcctcatgccttccaagctcttgtttttgtcaaacggggcacccaaagaatcccgtatgctcttccattcttccattgttcttggtcgacaggctaagaggctccctacagtaacaattgcaagtggcaagccactacacttctttaagatttcagttgaaatttcttcatactgcaggacacaactatcttcaggcctaaatactctatcgaagaataactttcttgagtccttattgttcagaggctgtattttgtaaatttgtccatccttgccacatgccaacctggccacatctttcactcgtgtggttactatcactctgctacctttgccattgtttggaaaggcacaactaataataacccatgcttcttgtttccacaggtcatcgactataataatatacctgccaattttttgtttcaaatattatatttacatgcaccactttaagatgtgttataaatgaaacattagagcaatatatcctttacaaaataaagtaaatctatccaagctgataatgtgtggataatgctagaaaagcatcactgaaatctccgtcgatatcaaattcagaatatgccataggcgatccaatatactccctcgatctggttgatattataagacgttttgacttttttccttgtcaagctactttaggtttcaccaacttgataggaaaatatagtactaactccgtcccagaatataatgagttttagagttggacatggttattaagaaagtaggtagaattaaatggtgaaagattgtgattggttgagaagtggaggtaggtgggaaattgaatggtggagggttatgatgggttgagaagagaatgttggtggaaaagttgttatattttgggacgaattctaaaggctaaaagttgttatattttgggacggagtgagtagcatttttaacacaaaacaaagatattatcatattatatttaataaaactaatttgttttgaagttgttgctaatattttctacaaactcggtccaattttaaaaaaagtttgtatacagtatgtataacccaaattatctgtatgagagttgtatgaggaataattagcccataaatatatttttattatatttatagaatatatttttttgttcctggaggaacctttattttacaatagtttcaatttattttggtttaatataggcaaatgttcaacctgaaacttttacttataaaataattttttttgtacttggaagaatcataattactaaaactttcaataggattttattgaggttgaggatttactgcggggctctcgtctatttgatcatgtgttaaggactctgcataatccattataatatatgttcggctttccttttttagtttaacattgttgaaatttgtaataataagtatgtagtcacatttgtgtgttgagtcttaattttagtatacttctgaatataacaactctaaaattcaaaattaataaatactgagttgtactactccctccgtcccataatatagcaatctagtatcagacgtgacatttcatagtacaatgaatctatacaacctcctgtccagattcgttgtactataaaatgtcccatctggtactaggttgctatattatgggacgaagggagtacattgttttgagtctcagtatacgaagtagttcctttttccatgatctaataatttcaatattccataattaagtaatgcatactgagttgcatgtactcggttagagtctcaatgatagacattatttaacatttggaaattccaaaataataataagttggttgtgtttggcagtgttttttcccttttgtaattgaataacctgttaactaaaaactaaaacctaaaaaccatagagttcacgcggtattaacaagatgcatgttttattgaagacaaatcctcaatatgatttacacaatcatagcaataccattgatgtacctaacgagcggtcatatatttttggttaattaacatagacatatatggcagatacagatatagattgaacatgacttgattagtacatgcaagtgaagtgaaattacgtagataaatattaattacctttcatgctccagataggctcgtatgtcgtcgatgagttgttgcacgtcgtcgcaagcttgagacgtgccccctatgtcaagcttggattggatgctactgaggatccttgttatgtcaggtttgtgggatactgagacgaatgccgtgcaatcgaattgatgcccgatcttgtcgtacacatattttgcaagagttgttttaccgagacctccaaatcccacgacggacaccactttgagttgtcgttgatcggtatcacgatctaacgacaacagctggattagttcttggcttgggccatcaatacccacaagactcccggcattttggtagagcgatgttatccgtggatctatagcaggattggcagaaacaccatgtttgttgttacagtcatcaagcctgtatctcacgcgacgctcatttgcctcgaccacacgagccttgagctcattgatctggctggctatgcgatgacgcacccgcaatgccctgagacggcgagctatcttgcggattaaccctgcatctgaggaagagtaacgatgatcaagatgacttgtgaagtaatcatcaatgcagtcttccatgtcataggccatctccctgacgtggttcctccagtccttggccagaggatcgagctcaccatcatcatcatcatccatgagcgcgagcttctcgaggaaagcgctcatggtggtgagctcatccttgaggaaggagacctgcttcctgagccccttgagcttcttgtactcgtcgcccatgagcgtggtgagctttgccatcagcgggttcatcacccccatggatgcactcaccaccatcttaatttctttggtctctctgctggctgatcgatcgggttaatttcctctcctggtttgatcagtcagtacctagctagtggctagtgtgaccttacgtacgtgtgagaggtagctagctactccagctacaacaagcctgcaactgagcaaccgatcgagttttcctgtatatatatactatatacaattagccccaattagtgcagccatttgttgggggcaaacatttttcttcccttgagatttgcgcaaccactagttaaaatagagagattacagtaatgatcttactagcttcgagatccacgccgactctctctcgttctcaaattgatcatcatataataattttgttaaattgatcatcatataaccgcatgaacacggatttcatcggaatacaattgatgtagcaaggaggatgtagttggtatgatattttaatcgatgcatgtattgtgagataatatgtgtatggtgtcttgattgatgcgatttaaattagcgttggtctgggtgcataaacatgtaagacgatcaatttagaatggagtgactagtttagagcaagtactataagcatccagacacaatgatgtataaagttaacggtatgatatattttaaaaaaaatgaaggtagttttacttgctcttgcagttcttgcgatacattcgtcgatacgtccagtgctttgatccgttcgcgggaatcctggagtaagatcgatcaatctgctgtctctaggattcgttctgatgagctggctgtttcctgcatatgcatcccactatctcagcccccaagtccatcccaaccaatatgcatgagctggctctatgcagttggctatattgttacaaaaaacttgctcaaaccaatccggccatgatgtatatgtgtccctcccgaccatactcacctaccatagtaccatgtcatgtgccctgcaacttcagcatcttacacattattaagtatatacactggtggagaaaccatctttggtcggttgaccaaaaacaacaatagtcccggatgcttaaaaaactgggactaaaaagcagtttaaaagtgcaatgatctttagtcccggttagtgttaccaaccgggactaaagatcatcttttgtcccggtttatttattggcacgacgtggcaggtttcctaatatttttaatcccggttagtcccggttgtttataccaaccgggacaacaaatcagtttcccacgtatctctctcttcccttgttctctccgcgcgcagagtagtcagtactcagtcctcacccttatctcttcctcccctccactctttatctctcccttaggccttatct

SEQ ID NO: 7846 - DNA, 22579 bp, Oryza sativa
tggcaattcaacatgaaagcacactgatcagtaatttaactcattactgctaggagtatatggtgtgtgcagtaggacgtgtaggatctagctagcagtgatatgaccaaattaaattaattggtgataaaaagaccatcacaaataacataaatctactcgattactgtaggtcttgtgtagctactgctacttggttacagcaccactttgatgaatgcaggagtcaggaggaatatgcatgagatagatgaacacagagagagagagagaggtttgagtaggtaggtagctggaaatgcttgctggtctctttgggcatgcatgcattgatgcataaggctgcgccttgtatcattattcgtggactaattaataactagagtcatgcatcgatcgatcacacagcttgtttatatgtacaatcagtaacagtagatgcaatgatcggcagcctttttctcctagcatcgcggaacatttcatcagagcaagtttaatagtatagcccagtactagcttcaaatcatctataaccaatgtaatagctaatacatacaatagttgcttacgtataattaacacctagtccaacctgtcatacacacgttacgttttagagtccgtgctgtagctggctacagatctgtagcctgctgctcttctctctcttcctttatctctttaaaatatgttatagctggcttatagcctgctattgtacctgctctcatcaccatggtcgatcttcgtcgtatactactccatgtatgtgcatgcatataatatatatatatatatatatatatatatatatatatataacactttttattttaggttataagaatttctaacattatcagtaccgatgttagatcgatcgattgccagcgacggcgcatttcagggagaagctcatgcctagtatactccgtagctaattaattgaccatactgcatgcatcgatctgcttttatataatcctatatgtacgccaaatactaagcaaattaaagtggtgttcttttctcttgaagatgaagataaagattaatgcttttatgcaaaacgagatagtattaacgtatcattgattgagttttaattattacaaatttaaaaaatagattaatatggtatttttaaagtaacttttatatagaaagtttttgcacgaaacgtaccgtttagtaatttaaaaaacgtgctacgaaaattttaatcttcatcaactcttgttggagaaaagaacgccaaagcccggcagagtcttcaagctgctgagacttgtactaccagctgcttgcggagtgagtatgagtattatatgcaacacacttcagcaatctgttcccaaggccagcagtacatttttccttcatcccaatttgcttttgacatgataggatctttaattggctgcatacataattaaggaaaaaaaatcaaaaaggcaagcatatgcaagctagtcaaaagatgattgctactagcgtcttgttccaatgagcagcaggcacagccgtaacaacgcctttatgatgatcgaaatgagagagatggtatatatgagaatgatgcacatggaggaacaacatataagcactcgatcgaatctctgaggtaaggctgaaaagtgtcttatgttgatggcgcccatggattgattgtatttccccttctttttggaacacaacaagcagctgctaccaagcacatttatatcgatagagtagcatagtatccttctctacatatgtggatgggtagcgtcacgtcttatatagtacttcatccgtcgtataatataagagattttggagagacatgacactttcaaatactacgaatctggatagctcccctatccagattcgtagtcctaaaagtatgtagcaaaaagtacaagtttcctctactattttttgaccagctaattaaataattaatttcagcgtatcagcatatatccttgactccacctttcctccacagtgcacccgttgacacgtgagggtggaggtgagaggggaggagcatatgccatgttggaggccagaccggtgcgacgcttcctcatagcggctggtcgacggatccatggcagagtgaaaatggaagtctgggaggagactacaataggtgagcttgcgcatgtccgccttgatagggaagataaggtggtggcgtgagaccaacacggagctccaagaggagaagagcggtacagtcgccattctctggcaactttctgggcatccacatgatcatctccatcgacatgctcagagagatagagaggagagaaatggaggcgcatgggacttgtggggctagctaactttttataaaatatgtgttgactggattaccacgtagaaccaaaaccacccatattaggctaagagtatattagttagtttgattaaatagtttaggaggataatttatcaatttctatagttaagagggtaaatcttaccttttctttactatagttgatgaggtaaattagacttaacccttgtatgtatgctcccgtaggtaggtatgaaggaacacatatgtaggtacgtacggtgaggatcctgcagatgcacttctttccacggtcgtcggagtgagttgtaaagatgatgtgcatggaggtactacgactgcaaagttggctcactttcacaactcatcttttgcagcaggatcttatatttgcttctccatcatgcatgtttgctgctgcctagctatatatacgtacgtaccctacctctaattatattgcatgggctgctttctggagacagaaaatggatgagcaacttctttgggggcatatgctgtctgcaaactcatatattccagctcccaatctttggatgcattttgatttctgcctgctgcagggctgcttgatttcaggggcacctttctttcttcagacattccagcttggcttccaaaagatgtttgcctatgaatcgatataatgcttcttctctgctggtgcagaaactaacaaagcatatgcatatactcgatcagtgactggtaatatgtgtcgttgtgcgttctgagaagaggtgatcaattgcacgggtagcaatttcatttttgtcccactataaacagacagacaacattttcttcaattgtaaaaaaagtagcttccaaggttacaaccttatagagttataatcttgtaatttttcttctgctctatcaatagaacttcgcaccgccttatgcgagtcgttaaaaaaaaagtagctaccatggctagcagtaagggtattatgtctttctcatgtaggtcactagtcagattgctaccatttgtagcaatcctaagtatgagtaaaatgattttaaaaatataggacaattaccagtggtagtggtccgaaacagggaccgaaatgaaaaatacctggtcaagacaggattaaaatattaaaaaagatgtcgagccattatcaatgttatggtccaaacagagaccgatcaatatgaaaagtaaccaggagctgaattgcaaatgttcccgtactgggctccttgggccggaacggccgtaagtggtctgggcacaggctttgatgcatctcttttgtccttgttgttcttacttccattccattgtatagattttaattgttcttaaaaacaatagcaaatgtacagactataatacttaagttttttttatgcagttcctttctgtattgaacatgttgcgcaattccttactcctttacagtaggacactttgttattgagaaacacaaacaaaagaacaaaacagaggcgccagaatgataaaaacaatagtatagtttggatggagcaataacataataataatatctatagtcaactgaacaatgctgtgtgatcaaatgtgtagcaatagtagcatagttacgagcaaacaaaaatcttttaatcctgtgagaaaaaggaagaaaagaatagaaagagagagagagagagagatacagctgaggagcaccccagcatgttcagatgacaagaaggaagttctattagctctatacgaacaactcaactgaaaactctgaataattttctatgacaaaagtgcctcaggattaatcctgaaagctgttagatgatgctcctttattcctattgatcatgcaccaacaattccctcctcttttgagtatcaacttgttttaatttggtggccaattaaatcttctcttgcttgtctcctacgaggggaagcatctccatccggctcctcggcgtgcgtgggctcgaattaacgctctgctgcgagatgagatgcctcacatagccatagaaggtgcagccgacgagcgtgattgcgcacccgacagcgttcatcgcggagatcgggttccggaagatcatccacgacaccaacacagccacagcaacctgtataaatcacagtatccatcaacccaatttgtgaatgcagagcacaaatgaacagcagtagagttgcagtcgagtctcactttcaggttgccggctacgttaaaggtgacagccgttgtggaatggatgacgtagaagatggagaagttgaggcaaaatgcgagtactccggaggtggtgatgatgatcagtgcagggacgatggaatcatacgtgtagagccaattgatgacgccactcccttccagcacaatcgctggtactgacagtatcatggttgcaaatggcgccatgtagtacacagtgttaatgctgcacagaagaagaacaaaatgacagatgcagaatcaataaacacaccaaaagaggaaaacatgcaaggctaagtatggtaaagtaaaattcagactgaatcaatttttactggcccaaggtaaaaagaatccatttttacctatcaaatttgtatccatggagtagagactctgcaaggatggtcttggtagatgttgccaggcaaccaacaatagcagcacaaaaaccaaacatgttgaaactaagctcagttattgatgttaacatgattcctcccactattggtaccagagaagcccatatgcgccactcgaaatacttcctccagaccaaccactgcagaataactgtgttacaatggaagaatccatcagaatatgcttacattaattgcagaaaagcggaataactgagaacgactgaattgacaataaagagctcaaaaaaaaaaagagcttagaaaggccaggaatcagagaacctgtcgttgcaggggtgaaagattttatggtctgcatgaaggagactggaatatatctcaggctgacatttcccagtacaatgtttatgcagaacacaaatgacattgggaatattcttctccaccgatcctctggggcaacttcaatcagtggtttcatcttgagaattttgattgcgatgtaagctccaatcgaagagcatataaagtggacacacgagacagtaagagggaacttgaactccaatttctgcatccaaggaaaaaaaaatgaaaaccatcaaattgatgacttgtgtgaatgattatgcagtaatattctgaaaaagaacacaattttggactcccaagtcaattcgaagaaaaaagaggaactgtacacttcatcatcaaggatcgatttgtgcagcgagaaaacatcacacgctacagggtttcttcagtaatacatcacccaggccactttaagtgacaaaggttacaaagaccacgaagttgcttcagaatagcagcagttttgtttttgcactgagtctaatatcctgtggtatgcaggctgttagtatctttaaaaccaagttttcttaatgcaatgatacgcaagctctttgtgtgttccgataaaaagaattgtaccacaaccttcaaaaatatagatggttgcaaggaggtgatttttttttcctttttgaacccaaaaacaggtggagagatcccttccaagggttcaatattcatgaaagctactccaccaaagttccttccagaatcagcactgttctagttaactttacattggacatccatcaagggcatcaagatgcaaactttaagcttttttttttctttttggatgcgacgttgtacttcaaatttaaggtagaaccatagagttgacttacacttgggtgtggctgcgtgggtgatccaccaaaagagaattgtcaaactttataatcttttgaggaaacattttcagttagaatgattgccagctagaaaaggtagtgttttgagtcatatcctcgatctctccgttgtatttctcgttatcttttctgaacatttaactcattcttaagaggacatgacaaattgacaattcctttcagtgtctgaaaggaacagagtccttggagttttgtaaatctcaattctcaaaagatgattcccttttcccagtcatagccacccataaactaccagatgaagcaaactatacgcacaaaaagattgttcctttgatggagtatcttgtttcatgttcctatattatgctgcatccctaggaaatcaactacacccatgtgaagcagataatttgcaggaaaggcgtgcgtgaccctttgctgttaataatcatacgaggggatcatctcaaggacagaaaagaaaaaggaagtaacggaagaagaataggggggggggggggggaagaaaaggagaggaagattatggaagaattggaacctggaagatccatttgttcatgatgatgacggtgacgttgaagccccaccattggaggatcgccagaacggctcggatggtggcaacgtctcccatcttggcttcctccatcgatcgagatcgagatcaagatcgatctcgactcgactcgatggatggatgatagatcaatccggccggtgtcaagaaacgcacgcccgaggagtgaaaaaaccggctttgtatcaatcaagccatcgataggaaaggaaaacgatccattagaggcatctttgtagaactagaaggcctgcctgcctgcatcgatcgaactaattcagttgtcttctcttttgtttgggggctttataaatatatactactacaagagacgagaagagaagaggaagatgaagtgaatcgaagagggaggtgtttaggttgcgagttcggttggtgtgagcagatgattccctccctctctttgcctttgggtgttgtctagtctagcatagtacgtgtctctctctctctctctcgcgtgtgatttgatttcccggcttctttctttccctttctttgaaaaacgtggcaccatccatcaagtctgcaactctcttacctttgccgtgagtctactcgtcgtacgactggttccatgtgctcacacctctcaaattttatgcaaataactagtttgagaatttttctgccatgacttacttcttaattaatataaatcgacgcaccagccaactgttttaggaatccatgcttccatttcagtaaaatatggagtcataaatcaaacggtcaaacgagtccaattgattttcagcaaaataaaagcatactactctattgttcagctttatctaaataaaaaaaatacactattgttctgagtgaaaaacgcaacacgtacggttccagaagccaaccacatgcctactcctgacagtagcggctagtacctcactcccaaaataagtgcagccataagtttcagcacccaactttgatcgtccgtcttatttaaattttttttataattagtaattttgttgttataagataataaaacatgaatactactttactcgtgaattatgtttttaatttttttcaaaaaattttcaaataagacgagtgatcaaagttggacgcgaaaaaccatggctgcacttattttgggacggagtaagcagtacataatgcaaatcctctacagttaggcaggcaggcctccgtatcctgccgtgcaaatcctctcatgttcatgcatttgttaatatagaggtcaacactcaccacaaatatcattaattcatatcaaggacacatataaattcatcatctggagatatagctacactacttattaatccaaccacagaatctctaatatgatataggagtactatttactataggaatgaatattcagggttagtcatacactcaaactatatactagtactacttacatgctccatgactgtcacaattgtctgacaaaatgaagatccactttcttccttgactctcatgcttgtcctcgactgaaataagacctccaaaaagcttcaggatcaaccaaaccattacatacacaacatacagactataaaccttcacaatcatcgatcacaggctataaacaatgacgaatcaagcaataaaaaggagattaaaaaaacaaaatcatatttcccccaaaaaaacgtttaagaataccatcacagggcaagtacaggacaacattcacaatggtcactgaaagggggtaaagaaggaaggtgaacaagtaaacaacacatcattccgcccagctaaaagactacatacaccatcttcaccaggtaagagttcttcctgtagatgtcaacggcagttaattaaataaactacacaactgattcagtatcaaagtcggtgtatagccctcctaaggggccaaagaatctcttttcctgagcttgtccaagcgagctcagaagctaatccacaaagctattgtgatgatcacttttcagtaccatcaccttcagaatccttcgactgattcacattacaagcatgcttactattcccatgtattttcagcacagaatcctcatacttatgcattccttccgctgccctgcggatcttgcaaaatgtacagtaccacttacctttggggatagtgttgcgtgctggtctcatgcaatatatgtgataaccttcatcacagccatcacacatgactatctggtcatcatccttgtcttggaagcaccctctgcagaggcaagaggggcagtaccagcaaccaagcttcttttgttgctcaattgcaagctggcttgttttcaggcatcggatatgatagaacttgtaaacgcagtaaggatgtccgcataccatgaatctcttgtcatcgtcttcgcatgtgccacagtgtttgcacaagtttgacagggcagttgttgacaggtctggttcattgtcttcccccatgcttgagacggagctcccctctctttcttcagctaattcaatttttatgggaagcttgggatcttcttcttctgtcttcaccagctcgagctggtcacacaaaacacagttaccaccatgcaagcagtcatgggcaacattattcgtggtatctgcagccaattcttttttcttgaagctgcaggttgaacaatgccagattgctgggacttgcttaatatcaggattgagtagcttgacacatgcaaagtggtacatggtgtcacattcatcacagattaggccttcttcaacatctaccttggtgccacaaccatcgcaagggcacagatcacgtccaggtggcacagttcgtttcggtattgtagaatgactagaatcacatggggccaactgcacggtggtagtcgactcctttgtgacaacgtggacagcacccggcaaacttatttcctaatgaagaatgcaattagtaaaaccattattaattaagtgtgcatgtggaacaatgattagcaaacatcctcaaacagacaacttacctctattctgtgctcagccacctcagcttcagaaaatccagaagcctataaaataatttatccattagtaatgcccagcataaaaggaaagatttcaatatactaaagcatcctgcaaattgcagcatggttgccaagtgtgcagtaatagatttatcttaactcaaattgtcaaaatataaccatctcgacgctagagacattaattgaaagataaagcaacagattacctgcttttggtatgaaactcgtgaaatggttgaaaggttgctcgctagacctgtcatctcttggccaacttgctcaaacttctcccacatctacaaaataaacaaatagagagttgtattaagaggaaggctcagcaggcaacagtatcgtataatttttcctagatgttactacacaacttctatgtttagagcatgaacaatataatgtaaacaaaaaaactcacagatgaaaaaagtatatcaatgataactgataaggaaatcaatatagaagagtaattgttcggtctttgagatgtgctagcactaaatattataaaagttttcttttttgtgttgtgcccatttaagaaaacaagtgataaaaccctagttgacttagacagaaacctcagcattgagtggttacacatgcagcatgcatgagatgttccagaattttgtgtgtgtcataccccagctcaaccacattatccatggtccacttcatcaaccatgaagcgcaagggagttggcatgttgcggacagcagatgaagcagacagatagaaatagagcatataaagttgcgaagacatgatagtgtagaaacagggctagtataccatttaagttgactagcgttccaaccctaacaaccagagttctagaaggtcagttgtgataaactccctaggagtctgttgcttggatggttcaaacaatttgggaagatcttaactagcaaacgcaaaagaagctcagataagcagttgagcatcagcatcattctatcaactggccgtacgtagaacattttgctcttatgatttacggagttgtgaacaataatagatggagaacacattaagctttagcatacagagggcgcttataagtacaggtaatatgcatcatctttattagataaaagataagaataaacactagctagtattatttccctccaacaacagtagctaaattactttcatgggagcaatagagaaacaattacctgctggatatcatcgtcaaatagtgcagggttgtgggcatagtctccatttctcatcttggcgtcgattttttccaagtcgatgacatcaccaggtttattgacatggaaggtcccaagtagcaaatggcacaacaaggcaaatttctgggagaccaaaatgtcgaagagggcattattacacattgccttgttagcttcggaagaagctgcggcagccgcatcttgtatagcagcatctgcagaaaccaccttgcctccagcagcaccattagggtgctgcacttttgcttcctctccttgggaatgagctgggttaccctggtaatgagaaagaagtcatgtgttaggaaaattatcattgcataaatatatatagggtagatgcaaacaaaggtggtgtgtgttactttgaattcagtgtgaacaacaacaccattggtgagcaagcaaggattgtgttggagagcatgacggatgcaggtctgaattcctccaccctggctaatagcaggggattggaggaagccgtggagagtgtccctccagctaatccaatgttgggccttggcgtctttcttagaattggcgccgttggccatgagtggcaaaggctgcaagaaaagaaagcacaacaagtagatgtaatgagagattgtaagaggaggcaagaagcgagagtacgaatcttgtagaaatcgaaaggaaatctggagaaagaagaagaagaagaggcagggagttggttggttggttacctgtgtttctttggagcggcggcgcttgtaggtgacgaggtggtcctccggcggcggcggctgcctcttgcgcggtggtggggggcggttctgggagcccatcagccacctgcggggggcggctacagcatggacagcaagccgagccgccgggaggagacgacggacggagcggagcggagctgcggaggggaagcaaaaccccggaaaaactagggtttgtgcgggcggggtgggcgcgggtggcggtggattcggatctctcgcctcgccgcggcagagaggagcagcagcggaggagcgggatttggaggcggcgagcggagccggagacaaacccaaaatctctctctctctcctcttattataacggaacgggaatggaaactgaaacggggttgggctggacacaagacaacccatcctcatcctgtgggcccttgtgtttgctcgctccaccaaacctccaatactccaatgtttccaccatacacatctacgagtaaaattatgggtctatttgaggagcttaagattcttacaagcagctagttgatagccaacttctgagaatctggaaaagctagcttttggcttctagttcattttctggattctataactacagcttatcagaatctggaccaaaagctgggctatttgggggagcttctgattctgggagaagttgtagcagctagaagctccccaaatagagcctacatagcccttgagattcttctttttcatgttacatgtaaatcttagagttaggctggtatatagcttaagtgagtaaaaggagataatagaggtggtgacagagataacttatagagtcaaagagattatagctagtcgtacatctagattgttcttaatcggtgatgtattgagtaaacaagtattaacatattattgccatgcaggatggcgaaaaaaagataacggaacataggttaatatacaagacaattcgagttggttatgtgttccattacgtgtgcgggtggattcatgcagtatgcgcgggaaaaacctatgacgtattgagaaatataactataattaaaatataaataatatagtgacggaaggttttcgctataatgcaataccacgtgtcgatttctatgctctatttttatatttcactaaactcatgttttaatgggttttgcagcccagcaagacaccccaaatgtttcagtgggaaaagcatcgaagaacactaccactttccatgacaattgtcaatgatgaacaatgtcaactttatagtttcttacccgggctggaccaaaatcaacgctccatacgcccccaaaggcccaaatacaactagtagcgtttcttttactcctccatttatattctaccataacagctgtagacgtagcaatagcacgcaggtaatcaatactgcaacgattcacccagcgacatcatgccaaaataattactgtgccagcttacaatttgcgctggtcacctagctgtatctgtatgcctccaaaattttacaatttgacattaatgtaactttcaactcatgtcagtttaacacctcatgatgttatcatcaggaggctggatctgcgactgtagctcatttgctaaattttgacattttagtttactgcaggcatgaagatgccagttcagtaacaagggaaatacagatggagttggctgcatttccttcagggtaccaatatataccatattaacactgctgccatgctgcttccattaacagcagcagcagcggtacatcaactcagatcaacgtacggtgatggccaaccttcaggttcagggtgaaaaatgtgggattcagatcttcagtacaagacgtatggcaaggaagcacagtagaacatgatcccgcaaagatctgtcgctgttgcctctgtatcaggtgataccatcataacggttcccaagccatcttttacctaacagaaggggtttcatcttgtcaaatgagttgatcaatggaagtataatcactaaatagataggatgctagactatacaagacaaagcatttggaagcaaaaataaagaaattttgatcaaatattcacaaaactgtttgttacaacttagaaggaagctgccatgtttttacaggggtacaggtcaaatatctgagaatctgtaaatcacacacataagtcgtagaaaaatggaagagctctacatggtcgtccagattacactccaggctggtcacaaagaggtaactgtataatatgataatagaacttcatgcagacagtcttattttgcatggggtaagcagaatcctcagagattcatggatcatcctatggaccttactcagtttatacgtgattaacagcagtacagcacaggctagctagtatataattataaatctacaataaagcagtagtgtaacaagaaccacataaaaactagtacattaagtttttattaccagtgatcacttgttttatagtcatttagtactgctgactactgtttcagaacaaatgcaaattaccagttactcgtgtattttttccatgtacagagaaaaggcactgatgtattttgccgtgtactgagggcacagccttcagctgtacagcagtatagaatgatggggcatgtatttctatccatcaccatgaatactgacaccttaaaatttacattcaaagaagaactaaatcgtgcatggaacagaactaagatcactacatttaggcttgacactttaatcctgtcgataagaagtggctgcagtcaaagaaaactggctgaatcctccaatgacctatcaaccagcaagagctcagtctaaagtttagcattggcaacaagagctcactatctaaagtttagcataaagcgtctgattttgctcacaactgaattaccaaaatagataaacctatacaacatgataatacaccagggactggaattcataacaggtatcatgtgcaggtgcagtaacactagtgatacgcataccttggagaagctgggaagctcgtgctgccaggtgccacagcaaagacattggagtaagactttgtgaggtaggcgaagttgggtatcggcggcaatgaaggcacacgctcccctctccttatcatatcctccaggtccagcctttgcaaggtgagaacagctttgttctctctccaaacaaatgcaagccggccatccaggaggacaaagagcgatccgggctttgagccaggatacctgaacccatacccggtggcaatgccctcaccagcaaagcttctattgatctccacagcacgcgactcctcatcggtttgccacggaaaagtctcagtggatggctcaccgacccgcacgataaacatagaggacccattcggatgcacgacatagtgtgtaccctccaacaccttggttgcaatcagctgaagcttcccttcgctgtcctcctcataggagaggagtaggaagaagagagccttgccaggtttgcgctcatcctccggccgccctggcggccacccgaatgtgcctccccacaaaccggcatactcccggccaggcatgggcgcctgcgtcgtcagcttgtagagcacaaaccggttgtcatgcatgcttggccaattccggtagatagacagcctcatccgcgcgccacggaggctcaggccgacgctctctccggctcgcaggaactcgtccaatggcagatgcttggggtgggcgtactcagccctggaattggcggacgccgaccgtgtcaccatctgccgcaggctgttcctgacaaaaccggcgaccaccgagaaggtcctccgcagccgcatcttgtcgccggcggtgtcggccggcagcgccgccgtcttcctggccccgatcagcagcgcctcgatctcggccctgcgcaccatgcccccgccagactggctgtgcaggcgcagcatggcctcccggcgcgcggcgagcagcgggaggtcggcgtcggagcgcgcgaagagcggggcagtggcgacatcgggggggagggtgaggcgggaggcggcgacgagggcgttgaggaggcggcggcggtcggcgaaggcgaggcgggagaagtgggaggtggaggtggaggtgtgggcctcgaggaagagggtgttggcgagggggtggagggaggaggagaggaggccggggaagagggagtcgtgggcggcgccgtggaggaagaggaaggcggggtggccgcggtggtcggcgaggagctcgaagacgggggcccagaggaggcgcggggagagctcctgggggatggagcggacggcgacgagggagaggaagccagggagggcgaggacgaggttgccgagctcggggttctggtgggcccagaggccgaggagcggggcggcggagtggaggaagcggcagacggcgagggaggagtgggcgagggcggtgcgccaggcgaggaggtgggaggcggtggggaggaggcggcggcactgggcgagccacgccttgtcggcggtggagacggcgttgcggaggctgcgggaggcggcggagagggcgaggaggtcgcgcgggcggaggtgggcggagatgagcccgagcacgtcctccggcagcgacaggatcagctccgcgccgtcgacctcaccctcaccggcgagctcgtcggaagtcatgaggatggatgaggatttcctggatccggagggaggtttccttcctctactctctctccctccaaactcaaaacaaagtgaggatttttcacttctttcttctagaaatatcactgaaaatagatattttttatctaaaaatatgatattttctttaaagaggagaatagaggtttctgataatatatagtgccaggtaccaaggtctgatacctagataccagctggtatccgaggtaccagataccagccagaacatccatatgtaccaggtgtgaagagggagcgcatgccatcgtcgtcgtgcccggccaatgaacctcttgctgccatatgtcctctcattcctttccctcctcaacgtgcttcctccctttccttccgttgatatggctagcaagacaaggagaaaagacgtggaagctcagctataaaaaaaaggggatgagtcactctaagtatctcattctaacggtatcccgtcctctagtctctctctataaaatacgatcgtttttggagagagagaggggggattgactgaagaagcaagacttgctcgcttggcacatattaggggcttgttcaaattgtagccaaaataaaccttaccaattttggcattgcaaaattttggtatgttggcaatattgtaaaaatcttggcaggatttcttatatatttattaaagtttggcagcaaactaaatgtaaccacttttttttggcaactttgccaaaatttggtaagattgaaaatgttatctaagtgaacatgctctataagacaaccgatctggatctggtttttactacttcactaatcaattaactaaacaatcagggcctctttgaatcgcaacaatgcaaaattggaggaatagaaaaaatgcaggattctaataggaatgtatgtgtaaaatagaggattgcaaaatacaggaaaatggtcgtttgatttgaccgcgggaaaaacgtagaaatcggatgagagagatagtctcaaagggaaatttcaaaaaggttaaagctcttgctaaatttcctctaaaaactatataagattatccattccataggaatttcaaagaaaagcataggattcaatcctttgcttcaaaggacttcataagagattttctacagttttgaaattctctaaaatttctatgttttttcttcaaattaaaggggccttaggagtgacactttgggtcctaaaactaagtgaacaaatgcttctctcgagaaaaagaaaatataaaccttttgtataatacctgaaaaagaaaataatcactgaaaatagagggttttttaatccaaaaatatgattttttttttctaaagaggagaatagaggtttttatataaaatacgattgttttttttagagattgactgattgactgaagaagcaagacttttgctcgcatcgcacagatcagcagacgaccgatctagatctggttttactatactctactctactagtactcagggcctgtttggcgggactctagctcccatattcatcttacctatagctgtagtccatccaaacagtccagattcgttcgaaacaggagcggagcgcaccgaatcgctccgggaaaatgaactaccggactagagcggcatttttgtcgctcctcaactccaactccaatcacattacaagattgcccacacattttcgatgaaattaccagcaaatgccaccgccctaacccccatccctccctcccccgtaccgcttcaccccatctcccccgacctccatctcgagagagcgaggaggcgaagcagcagacgacgtggggaggaggggggagcagccggcggcaacgatggaccagcgggaaaaatgcggcagcgcacggacttctccttccagtgtatcccctcttctctccttcccatcccggcacacggcgggcggcggcgcatggcggctaaggggagcacgggggcggtggaggcaccggcggctaggggcagcgcatggcagcgaagaaggttgaggatgagcaaggcgtcgggtgcaagacggctaaccacggccgacactgaggtaatttgttccccaaaccctaaagtttctcccagattttaacttcaaatctagttcgttcatgtggggatggctgtctactttgtttgattggttgctattatgcaatgaaaaagggggaaaatttcagatctggccgtgagaatttagggatgtgaaatttcatatttcagaactagtgaccatgagcattttgtttgactgaacatgttcaatgtccacctccctgacatctagttgtctaaactctaaagttctatattcccaagcaagttgcaatggatgcagccattcttatgataatatatggatgcatacagttgtctgaacaagtgcagtttgtgaggtcaaaatctctatttgagatgtcattgagcaatttgcaggtgcagttgaactaaatcatatattaaccctatataacaagtgcagctaaatgtaatagcgaaagaataccataaactttgcattgatatagtgatagttcatctactggatgtaccaaccagagttcatgtattgataggatagctcaataggactacaagatgccatggactttgcgctgatagtgcatctactgaatgtaccatattgttgtagaatgaaatagcaggaaattgacttagttatgcttacaatttcttgatccttttaggaagaaaaatgctgagctcattttgccattctattgttttgcaggtggtgagggctgaatttatgcagcgtagaacaggaaaggaagttttatgcttcctaatagttgtgtaaacatttgatgattatgaagtaggaatctgaagaacctgaccagatccagcaatggatgcataactatgaactgtagaagtggtacttttaatgtctctttgctagatgagtgactatgtaaatatgtttggatgactatgatgctatatgtatgtcatggatataggaatggaaaagtatccggtgcaatactactattcggtgggagaatgcaatcatcaatgtggaccgtcggatgaaaagtgtacaacacagatcgaagcactccccacattgttggttgtttatgcaaaaatgtccctatgttatatgccaaaatgctttcagtccctctattatagcagaagccaagcctgaacattttagctttccccattgagggttagggtttccgtacacggtagattcggctcatcgcactgagcggcgggggcggtctcaggtccggcgtgcacctcgtcgccgtcgtctttccagccggtatgcggcggggtgaggggccgcaagcctgttgccggctaggtctgggacagatataggcaaggtaggtggatcgatccggtggggggagagcttggggatggagattcgtccatccgcgacgatctgccagaagccaatggtgggccggctaaatacagtacaaagttgaaaatgatccgccaaaacagtgcactttcacatcgatgtgtaaggactttattcaatttggttcacaagttggacaagtttggacgttacacaccaaaccataggttaaaggtgatcggatctgagccgcaatttgattccaagttgaaacaacacgtgcttaaactattaccgccattattacagctataagtaacaaaaaaaaggaagaagagagagattaggagccactgactttgactggctgtcgtcgtcggagtcaacggggatattcttcctttttaccggtcagggcggccgggcccactgcaaagtgacgtatcgacagctctgcttatgccagccactctactgttctgtgcacaaaaaaagtgagaccacgtcaaatatactagcatccattctcttcaaattactagtactagagaatctgctgatgatgctggatgctcctctttcttccgacaaattacattactcatcatattgtactttgactattactaaattgctaacacagctcacatatatccagactaaatgaaaaggtaagttaattaaaaatgatttgaaaaaaggacaactatcaacagtctagctgctccataccaaatggagaattacagatctccaaatgtgaagattaaaacaaggaggtttgagtataaattgcttaatgcatactccttccgtaaaaaaaaagacaacctaggatgattgtccagattcgctatactatactgtatcacattccattctatgttgtatttttttttaaaaaaggagggagtagtgtcgatgaagattctttcacatacgtcgtaggacatgtgcttttaatatctaggcccactagggtggacctcacgtgtttgtgacccacattatgttgaatttacgttagaggatctatttccatacaatgtaatgtgatagattttctttgagcttatataggtttaaaatcaacactctaattaaaacaaatgagagtaaaatataatacttagaaaagttctaccatgtataatatttttgggcaatctcagcttgccatcagggcgctgcttaattagcttcccctccattttttgaaataattaagttttcttttactaatctatttttggcataagttttctaaaagggtcaataattagtcaagttttcggaggggcggatggtttttggaaaatatttatttttgtacgtttttcttatcttgtgctgcacacagccaatgagagtaggggcagcggggatggacgaccacacctttagagagtagtactaatgtcatgccctgtgtaaaatacggattgttgatttcatagattttagtttttttctatcttttttttctggtgatcaattttatatgggtacaatgcgttttaatttggtggtcttttaggcagtgtggtttcttaagcaaggataatagtgggttatactataaacttacgtggaaaagagagacaaagaaaagtgagggtgttggctcctatacaagagctagttttacacatgctccaagatatttacaataaatttatagcgagagaaagagaaaggagagaaaaaatagggctaaccttataattaacctcttgtacaagttaactctaacttgagcttatagctaatagttagatctactattaaacttgtttttatgtggggaggaggataaatccgtttttacatggggatactataaaaatttgcaccggtaaataaatgattgtttccggctataatatactgtgtggttcgctcttcataagcattagtgctaggcaacgacatacatgattttatataaatcagtacactctagatatgtatatgaggaggactatactgaacgaatatatcaatatagggtctagatatatatttttttgaagggatatagggtctacatatatatgaaattaaaacctaaaactctcctctttcgtataaaggaaaacgaaaattaaaaagcaggacgccaaccgttaagcaagccggatcgatgggacttaaatccagcccatgtttgtcaacagtgtttgatcgacccacccaaggcctcgttaatttgataatcgcggaataatgggctggaatttaattaggcccaccaggaaaacccacttcaaaatagtatcgctaccagtgacttcattcattttcttctcttactgtagcagcaaaatcccttggtagcgtattcacgataatgaagtgtggtggtaaaaggatgatggaatggccaacgttttctataatataaccaaatatatggagttccctttcaactgcatgagtatgttgggtaagtagaactattttcaaaaaccattttcgacgccatcaacccatcaccattttatttttaagaaaaaatacgaattaccccccccctcgaactatcgcggtcgtccgaattaccccctgaacccgaaaaccggacattcttcacccccaactatacaaaccggacgaattaccctgcctcgacccaatccgcggtggttttggtctagtggcatacacgtggcagtccagtcagcattctatttatttataaaaatgtgggacccacctgtcatactcctcccactcttcctctctctcacgggcggcaggcgggggacagagcagcgccacccctccgctctccctcgccgccgcctcgcctgctccgc

SEQ ID NO: 7847 - DNA, 43418 bp, Oryza sativa
cactggtacagtagttcatcatatttttcttcaacttaaattatgatttaatggatgcatgtgttatatggtatgaaaagataacatggtttggagagccatatattttgctgtaatcgaaagttcagaattgttgatcttcttgtgttgatcatggcttgaatggatgcatgtgtcaaatggtcaactttcctgtgttgatattggtttgcagtaataagaagttcaggagtgcagtaataagaagttcaagagtgcacgtcattgataatcttgtgttgagcaatgttccttttttttataatatgagcaatccttttgcttattcagttcaagcacaaataaatttattttcgcttcaccatgagttctacattttattttctaatatagtgatatgaattgttagtgtggtattcatggataagaactaattgcatatgtgagaggtaacctcaccaagaggtatccctatctaaacaacccaccttcatccctctatccaaacaagggatcgagccatttcaacccatcatatccctcaaaccaaacaagaaacagggttcgctctgtccctccaaccaaacagaaactaggtccatcccatcccaaaaaaagaagaatggacctaacccatcccaccacatcctcaaaccaaacacatcctaagggattttgatattttgtttgcactgtttgaccattcatattattcaaaaaaatttagaattgttatttattttatttgtgacttactttattacccaaagtactttaagcacaactttttgttttttatatttgcacaaattttttgaataagatgagtggccaaacagtgcaagcaaagtgtcaaaatcccttatattaggggatggagggagtagttatcactatgatttctcgctcttctcgatacatccgagtgatagactttaaaggtatggaaaacatgccttacaatgttctgatcgtgccttgggattacaactgataagtaaatgcctcttattcaaccaatgaaggcaggtagggcttttctttctttgtttaggattggcaaaaggatagcagcttcagtttcaaagttgttagagaatgcactcttatcactagagagacgcgagagaaatttcttgaagggggtattagagggatagggcattacaccttatgctgggattagcaaagagaagcacttgacgatgtcttagggttagccttagggcgtaaacccacgacacaattataagtgccaaggtccaaattagacttggactagatgagttatgtgacttgttttgcagaatcccaacaacccaataggaatgttgacgtgagactaaaaccatctgaaagtagactacataagttttccaaaaatactcataagctccaagattccttctagattagtagttaggtccgcttgaagttaatgttaacaggaggcccgaatccgaatccaaaacgtgtaaaatttcatctctcatcttttgtggatcaaaagtgacgtggtgacatgggagtagacaaggggaaggatattggttggtccccaatctacttcacaacttctttgatcatccaagtattctttgtgcttagtctctttctccatacccaagtaagtacttctgtaaacgagaatacacaaaattcgtagtgcaataatgtttgttcaattatataacatgtaaatctaacatataaatcatgcacctttacttgatgaatacataaggtagctatggttatatccatggtggtgatgtctccatcaccattcataagagaaagagccactacaatatcccccgaaaagacgactataagggtaaacttaattaaaaggaaggttgaggtacaaattccatttgttgggtcttatcttatcagaaatataatttttatgggacaaactttgaatcgtagaaatgtaattattatgggacgtaggtagtagtatcaaattgacttccctggttcagagtgatttttaatacacacgaaaggagtactacatccacgcaaaaagaaaaaaaaatattaaaattgtataaacctctctgaagattaattagaccacacaacaaattttggaacaaaaagtttcagctgctacatatccatcctaatcctattagatattaataagctatataagagccaagtacctcttatgctgcagagattctcttaggctgtcgatgaggtccttcatactgcaggagtgagaagacttttgccgcccaatttgtaaaattatgctgatgagaagagctgtcatatcaggtctttgggaaactgatacaaatgccttacagtcgaacttccctccaatatcacggtacacttccttgacaagtgtggttttacctaaacctccaagtcccacaacagataccacattcctttcttgttcatcacccattaaccatttgataaggttcgcctttgggtcatgaatacccacaaggctggatgtctccgtgtagagtgcggacagtcgaggatcaatgggaacaacagaagtagggacacaattgtcggcatgtaccttatgcgccgtttattcgcctccaatactcgagccttaatctcttggatttggttgccctcagtgtgttgagacggtgagcagtcttgtgaagaaaacttggcttggctcctttatgatctgatactgcgcggtgcatgaagtcatcgatgcagtcctcaatatcggagaccatctccctgatatggttcctccaatctcatccctatcggctagctcctcaagtagcgcattcatggtgctcagctcactgttgagaaaaactatctcctttctcacgcctttgagcttcttgtactcatctcccatcagtgtggctaacttggcgagtagggggttcatcgcccccttggaagcggtcaccacaatctcagacataccgtagatgctagccctccctatgcttgtgtttgattatggctgccggccggagtggttgatggagtggcttcatgggccaggcccaggccaaaaggcccaagaaagagaagagggaaacaaatactgtaggaataatcaaggtccttttgtttagccttgctagctagccatataatcttgctacacccaaataaaacaagtactagttgtttcattgagccttttttttaagctacgagccactcttgtagtctttcttgtacgagtattaatttagccaaaagttatactcgtcgtggactacagttgtaacgcactcatacatgtatatatagtactaactttgtttctgtattatatatagtacattttgattttcttattcaattttaagtttgatcaaatttattaaaaaatatagcaatatttttaacataaaagaaaacatagtaccaaaaatgttcaatatttaatataatgaaactgatttgctgttgtacatattactatttttttcaataaatttaatcaaacttaaaattttgacttagaaaaaaagttcaaacatctgtaatatatatgaaacattacaaacggatgaagtaccagtataagttaaatgaaccataaaattttcgcactgacataagctagtggttaactacgctcaatgcgagcgtgtatattgcctatgagttcaagtaataaggttggctttttttttccgcccagcataaataaacttggcactcgtttccacagaaaccggccatgatatcaacaaaaagtaatattctggctacatatatattatagcagtcatataccagacatgaggggtgtgtacctagttcaattattagacataaagtcctgaaaaatggggcaactgcatgttgtccaaactgtctctggaaatgctatcgacgatgctccatcatttcacttctacttatacttatcggtatgacttaatacttgtaagtaagcaaagaccatttaatttatatgtaaaacttttatatgtgttcttaactataaaataaactataatgagaaaaacacaaaatcaatttcacaatttaagttatataaaaaatttcattattgaagtataggcatacgcgaaactatataacgtcgtcgtacgtgaataaatgtatggcgatacatgatgcatgctttaataatgtgttaataaactcccttcttcctaaaacaacaagttgagcaacacaggaagtatacatgatactatgcggctagctgtacactagtcataacctagcttgcacgccatgctcttcagctactgtgtatcgttccatgctacttatccagtacaatcaactgtaattgcttcaccaaaaactgccgtacaaatgcccagaaaactgcaatgatttgtgcgctactagcttgtttcttcacatcactcaaattaaattccatttcacagatgcgttttcagcaggcgaagcatgcattctgctagaattgtggttaaaatggtactgtagtaatctttttttccccttgtactgctgaattagtgcttgttcaactacagcatatggctaaccacgcacttggcatctcgttgtattttaccactataaatacctagagcgcctaacaaacttaatttgtccattgtgcacaccgacctaattaattaagctagctgctgcctgctatattgggtttggtcctgattgctcctaatcatggaagatgagtaggcgatgacacaagactcttgtgcctaattcttcttgattcctgcaacaaaacaagaataatataatctacacactatatatcattaggagtatatattcaattactaccgcaatcacaggaccatctacgtacgtgctctagctatagcctctaggtaccataaaacctaacacaatttttaatctcgctgctacgcagtataatcatgcttttttttggataaataaataatgaaaagggcagctgcaaccgatgttctaaagagtaaagaattaagctgcagctaagtagaattattcagaaaaaatattcattcagtagaccacagaataacatttgtatattatatctcattccaaaaaatattcatgcaaactgccaagcactgtctaactatcaccaaaaaagatgaacagaaactttacaaaaagggatacataattacatagtgattaacatgaaagaacactgatctgtgattgatgatcattccatctgcaactgcaaggccatctcaatcaagaagtgaggaaactgacacgtataaattaaaatgaaattctttttaccactaaaaccgcaggtttctactgttgcattgcatggtcagtttcaccatcatttcttgccggaattactgcaagaggaggcggtggtgtggtcgtcggacttgtgcaccttgctcttccccttgtgcgccaccagcatcctcttcagcgaccgcatcatcgccaccagccccggcgcccgccgccgcgagctcctcgacgcccccaaccccaacaccgccgcgcctccgccgccctcgcgcttctcggcgaggcccgcgccacccacggagcggcggcgcgacacgtcgagggaggcgaggaacatgtcgccgcccttcttcccggctgcgtcgtcgtcgttgaggtcctcccagagactgtccatcctctcctcctcctcctcctcttcctcctcctcctcctccgcgccgtcgcagaagccggccgcgtagtcgctgagggcgggagagcatgcgccgccgccgccgccgccggtggcgtggcgacgacggagcacgacacgcgcgtttcgccacggcgagccggagcagtcggcggcggagaagctgcggcggatgggggaggagagtagccagacgggcggggaggaggatggtgacggtgagcaggggaggtggcgggtggtggcgaaaaggtgcggctgcggcggagtcgggaaggtgaagtcgtcgtcgtcggcttcttgtcgttgcttctgctccggcgccatgggcatcgtcgtcgtcgcggcttgctgctgctgctcgatcgcgtggagtggagtgatgtcgtcgtcgtggtcttggttcaaatggaaaatggaaatggaaactgaaaagagaagagaagagaagagatgcaagggaaggagaaggaaaggaggagagaatgacggcagcgagcggcatcgtcgccctttattaccattattactaggagtggactaccaatgacgataaagttataattaggtcaatgctttgtttctttttggattttttttatgtcttgtatatgaaatgaaaacgtgtgtctaaatttgtgttgagtaaatataattttataaagttgaaatatcactgggttgtaaaatagaaagaaagtaatacagttcaaattttgtttgactgttgttcctggtataaaacagtgctcaaagtcgcttttttatgaccatctcaatgttaaaattacttactactgtttgtgattcggtctaaaacaaggtttgccattggatttgcaatgtacattataaatggtgggattatatatgtgtcaagtaagagggaaaaaagcaaaatgtacgaattttgaaatgctcatttcgatctggtgttgacttgacccgaacaaatattcaaggacaataaaatttaggaaaaagtacgaattaccccccgaactatcgcggtcgtctgaattacccccctgaaccataaaaccggacattcatcactcccaattatacaaacaggatgaattaccctcctcgaaccaattcagagcggttttatccaacgtggcgcacacgtggcaatccagtagcgtttttttaataaaaaaaattgtggaacccgcgtgccatactcttctcttcttcctctctctcttgctcttttctctctcacggctcgtgctgcgcgcacggtgagaacggcgtggggacgggcggtcggcgacagtggaggcagcgagcgcggtggaggaggcagcggcggcggtggccggcgaagtggagcaaagtgcccgcagcaagaggcaacgggcaagcacgcggtaggcggagtggagcgggcggcggcgagcgaccggagcaagtgggcgagcgcgcggccgccagcagagtggagtagagcggcgggagagggggagaggaggccaagcatgacattgtcgttgcgatggatggcgaggtggaggcgtgggtgaccggtgttggcccgttgataggaaggcgagagcgtcgggaaatacctcgtcagggtggtccaagtcatcatttggaggcggcagcggctacgccccctccacggcggacccaccggcggcgacgccgaccgccgcgcctcttccctcccccatctttcgttgtccacctcccctctccccctctccctcctcccgttgcaaggtgttaacagtgaaatttggtaatcggcaaagacatcatcggcttagaatcatatcggctgcagcatctcggaatcagccgatgggagttatcaagtcgccaatagtcggattcctactatattcggttaaggaaatcaatctactaaaggaagcttatccctaagtgaccgagtttaaagaggatgcggcatggcagtttatctattaattaggaatagtttgttagtttccttttatctttaggaaagtgtgtaaggactttatgttttccttttatctttaggttagtttctttcttgtccgacaaggacttgtatcaacccatgggtataaatatgtacacccggggtctatgtaatctatcttcacgatcaatacaattcggcacatcgccaccttttaccttttctactttattttatcgttcggcgggacttggcacctgacgcggggctgcatcagtgttcgatctccggctaaggggtaagtccaatgttccgtcggtccaggcaattgtctcatctacatcggcgtcgtttaaggctgcatcagtacattagacctcttggatcgctccggtttggatgatatatttgtctacctatttatcatatgcctctgttaatatagtcttagcatatcaatttacctctatcggctgcttctcgctttagggtttctgccggtatcagctaaatcgtgttgctagattagaaccataatctctagcctgctttttgactgccaataggggtttcatcggggtttcaaccggtgagttatctggacgttgcattggcttgtaaggattgcatatacatataagttggatttagccgatggcaataaagatttaattgtttaatataatcttttggattttatggcatcggacctcctgccgatgtatgctttaaccttcggatcaatgcttattccatcatattattatcagccgattggtttatactggattatattgttatcttattacatcatcatcagccgattgcctttatatcattatctacattggacatatagccgattgcttacaccctatcgctatcggctggtattggcatcggctattatcggctatcggctggaactactccatccgcttgtcagccgatcggctgttttgatctactatttgcatatcttgtcagttgcaggatcaaactgactggcacgcccgcatctcatcaacctttggacctgcactggagttaagcagatctcccaggccggtgtgttcgattttttcgtcaacacaaggccctcgaggcggcgaagctcgattgggctcgccggccacctctctaccgccgccggcctatcccctctttgcaacggaggcagcgcccgcgacgaagcggaggaaggcacggccgcaggctggggctggttgtcgcgcatggcgtcggccgccgtctcgctgctgccgctgcctcctccaccgcatcctgccagcagcatgagcttccgccgtcgctcgcctcctccactgcctgcctcgccgccctgccccgccgctcgcctccccacgctcgctgcctccgccgccgctgcctcctccgccacgctcgctgcctccgccgtcgccgaccgcccacgccgaccgcccatccccgcgccgtcctcgccgaccgtccttgctgtgcgcgcagcacgagccgcgcaagagagaaaagagcgagagagagagaatagagagagaggaaggaaagaagagtatagcaggcggatcccacaattttttatttaaaaaacgctgactagattgccacgtgtgtgccacgttggacaaaaccgctctgaattagttcgaggggggtaattcgtccggtttgcatagttggggatgaagaatgtctagttttgtggttcaggggggtaatttggacgactgagatagttcgggggaggggtaattcatactttttccaaattaaagcccactgtcccctgctctatcaatatatacgatatatatgtgacaaaggttttaccctctttacgaaagaaaagacccagcttaatatgtaaactattgagtgtgttattgccattttctacttactatatggataaattagaaatgaactcaacaaacaaatgatctaaacaatataatacaatataagaatatattataagaaaattcttttttcaaaattggaacaatttataatttggtgaataagttaaaaagaaccaggcttacctgtcggagcgatttgatcacgatgacctcgtcaattacaggatatatcggcagcgttgttttaaaggtgctcgtaggattaggatatgtgtgtttgtatttataaagatgagtatatgtgtctgtaccgcgtgtgttttttttttttttttttagaaaaaaaacaggttcaagttagggtcaatggggtccgaccgaaccgtgccagattatatggacattggtcaatcaaggcctaattcgatcgtttgagagagagggagtcaagggctaaccagttaacgtttccatgcatcttttggattcaacttggatccttctcccatatgtatcctttctactggtggtggacgatcgattctctacggtttgcgcctaacattggacaaatttaaagtcctcttgcagagatatagctctactcgcatcgattgcaatttcatacttgactattcactttagatagtacttgactcacttttgccaaattaatatttgtaaacttttgacaggaaaaccgggtgctaattaattgcaattggacaacttgccatcagctgtggtacgtttttgttcttcattcccataaactacagcagcagctcttcataaaaaactgtgattagtgagagcagcacagattgacaaattaactgagagcacaatgtaattaacgacatcctatatggtgagtagaaacatatatagcatatgtagggaagtggagtagcatagttaagtgactgatctcctgatttccatgtggaattaatgttgactcttaataagtgttcatgtatgcagaacaaaaacagtagtggtacttgatcattaacttatatatgctgcctaatctacctacctatctacctaacttaggactaactactattagctgtttgcactacaattatatggagtacttgttggtagtacgtaccatacatgcacatacatggattaattgtacatgtcccgataagcaagataggtgatgaacatatcttgacgctaattctctcatcgatggacttattgaactactgtacaatacagcaaattaacgtgcgtgcacttaatttattagctaattcaatacagatcgattgcttcagtgatctggagaaacaggcaatgaacaggtagctaaattgattatccgatctgatcctcttaatttgcaactgagctgattgggcccatcttgagttcagttcggttaatgcaggccttgcccctctaacttaatttaagtcgcagcagaccgaaggcccatttcaaaaggaggttgggcttcctttaagcccattacaccgcctccttactcaattccggccgctctagctcaaccccttctaatctccagtctaatcgatgctgatttaaaaacttaagggtgtgtttggataatgggaaatgaagagtaggattgtgattgggaaatgaataaagggttaggattaaatggaagagggagaatgaatggttagtatttaaagataccttttgatgggtgggaaatcattttccaatcccattatccaaacaatacctaagggttttgataagagtataagtgcaaaacagagaaatataaaaaacatgtgaaaaatataagaatggcaactttgactagacaattgtaggaaaagaacaccgtaattagaggaggaaataaagactataaaacctcatattaacattcctcagtttttttgtcttcatttcaaagcacgaattacatagaaacatttttatatagcattttcttgtctgttgtagcattcaattcctgtggaagaccacggcaacaatacatggatcgaatgtatatatatacttgatgttgctttgttcccaattctaaaagcaagacatgcatatgtgccacacaattaatgaacagtctctgtcatagggccgggctacatgtgtattatgctatatatctgccagctgccacgtcttacttatattttcgtcatctatcgattcggttgctgcaacttgcaagcaacgacgatcgagtaattaactttgttcaacataatcatgcatgtttacactcacctcatcttcattaattattattaacaacacgttttgttcacgatcgatcgatcaaaggaggattagctatgacgtacgttgcaaattgggtatcagttcttgactttacgccttcccaaaacaatgtgtgattcgtcctgctacgcctacgcgttttgcattgcatgctgctgtcgtcgtcgtcgttgcttctcaattccatcagcacctagcagttgatctcttcaagccacattattttccttctcttttttttcttttttgttcgatacaacaataacatatatgcttttctatttcttccagcgcatgcatgtccatgtccattccttcacgccttgcacaatctccattgatcaccaattcaccggagcaaattaattgagctatctagctagctgcctgtccaagaacaatccagtgatcgatcgatcatggcgtctcccgcagtcgtcaggcagaggccaacggtaggtaagcaagctggagaaggagagagcgctgctgctgccggcgacggcggtggtggtcgtccgccggcagcaaggcggccgtcgctgttgtcgcaggcgctggcgtcgacggcgagcctggcgaacctgctcccgacggggacggtgatggcgttccagctgctggcgcccaccttcaccaacaacggcgcctgcgacgccaccacctcgctcctcaccgccgccctcctcgccctgctcgcgctctcctgcgtcctcgcctccttcaccgactccgtcaggggccccgacggccgcgtctactacggcctcgccacgccacgggggctctggctgctcgactaccctcccgccggcgccggcgcgccgccgcagccggacacgtcgaggtaccggatgagggccatcgacggcgtacacgcgttgctgtcggtgggcgtgttcggggtggtggcggcgagggacaagaacgtggtggggtgcttctggccgtcgccggcgaaggggacggaggaggtgctgggcatcgtgccgctgggcgtcggcgtcatgtgcagcctcctcttcgtcgtcttccccaccactcgccatggcatcggctaccccgtcaccaacaacactacttcttcttcttagttacttgcatcgatcaaagtatatattactcctatttagtagtaattactttactcgatttgatccattattaattacggctcaattttccttgtttcaattaattgtggattaagtaaatttcattaagtatactacagttgtgttgattaatctttgactgcaattctgaaagttttgtctaaaattaagaagctactagcatttgttatgcgacaagatttgtcacctgatgcacacctagcacagggttttctttgggtaagagtctgtttgttcttaggcaatttcttgcaaagctgggtcaatatattttgctctgttctctcaaaaaaaataaacagctaccacatgatgaatattgaagctcaaccggaaacataaaagaacgagaagtggcttcgccggcgtcgaacagctcgttccatctcttgttcaccttctctgctctcgcgtacatggtgcgtgtaaaaccatgtatggtttgattcagttgtgatgaaaaattggcaagtgccggattaattgcaaggaaatgtgtgtgtggattaacatatgtatgtatgtatgtgttaacttggatgcatccttataagtacaaaagtacatacatatgtactacagtatgtgttaacttcttttaatttggtcgtttcttggaaggaaaatgcaagcaaaatgatggtcagtagatgggccgggccgtattggatgggctacactgtgtacatgtactacgctaacatgaagtccagtgtatctagcttgggctgcaaatgttaggcgattattggccttgtttggattctgaatttaacttgcatttcgacatgtacgaattgagctatgacctaaaagtgaaagccaatcatatcattcttttttaaaaaaaaattcaccacggtagttaggattccaacaagggccaatgaaggttttgttgatgtacatccaaaagtacaaatggagtgcgacacaaatgttatacttttatgcaaacattgtaagttgacatgtgctaagaatagcttattctacaagtagttgaacacacttacaggactgtactcacgataacatctaacactgataattaatttagatggatactgtagaccttgacccaatgttgtaccgcatgcatggctatatatgcaggatgcatatatatcgacacaatgttgcacagcatatatatctatcctcaataattagcaatttgcgggactaagaagagcttctccttccgatgtatggccaatccaaacacatctgtcatatcgatatcctccttcttcatccctgacggtagcttccagttgaaacagtatacgaggttcgccaacataatctcgagtgtgacctttccagaatgaattccagggcacattcttcgtcctgatccaaatggcaagaactggaagtcttgccccttaaagtcggtgttcttattacttccatccatgaatctctcgggtaagaactcatctggcttgtcccagtaattagcatccctactaagtgcccacaagttaataagtacacgtgttcctgctgggatcatgtagccatcaacgttgcaatcttctctggcgaggtggggaatagtgaaacctcccggtgcatgtagccgaagtgtctccttgatgacagccttcaagtagaccatgccgacgatatcatcttcggttaccatatgttgtcctttcggtgtgatgcgtctcacctcatcttgtagctttgttagaatgtgtggtttgcgtgtgagctcgaccatagcatattctagaactaggtgtgatgtatctgtaccagcttcaaacatgtcctacgataaatggcacataaataatttggagttaaacagttaaaatgttccgtgtggtttatagtttcaactatccttagttttctaaatttattgtaactatatttgtaataaataatgtttatgtaaattttttttaataaaaaaaaaatatcaaacgtcatgtcaaaaggcaagatgtcatacatacattaataaagaaaaggagaaagtatatattttgtactacctccatcccaaaatgtttgacgccgttgacttttttaaaaatgtttgaccgttcgtcttattcaaaaaatttaagtaattgttaattcttttgtatcatttgatttattgttaaatatacttttatgtatacatatagttttacacatatcacaaaagtttttgaataaaacgaacggtcaaacatgtttaaaaaaatcaacggtgtcaaacatttagggaaggagggagtagaaggaactcactattgatatggccttgatatggtctctggtgaagccatactcgtcctggagggaaagaaggacatggatgaagtcgtcgtcgtcgtttttagcgcgatcgcgagctgaggctacatggtcgtcgatgagcatgtcgaggagttggtcccacctcctcctgatcctgatggccctggcgcagatgagcttgctgatgagaggcatcctcgccaaccccgggaagtaggcctccaggttgaaccctcccagcagattgctgttcgcctccatcagatcccggaacaccttgttcctcccttgctcgcacaagaacttgcccgacaccgcgcggcagatgaggtcgttcgcgaagaactgcagcgtctggctcaagtccaccgccgccgccgccgccgccgcgccgcggagcctcgccatcaccagccgcacctcctcctcccggacatggcggtaggcctgcaccctcttggagttgagcaggtggacggtcaccaccttcttgacgctgcggaagtggtcgctgtagggggcgaagcaggagtccagcgccccgtacatgatgatgtcggtgaccatggagcgcggccgcgacgcgaaggcgaggtcgtgggtgcggaggacggcctcggctgcgcgcggcgaggagacgaccagggtggggacggagccgaggcggacgagcatgaggccgtcgcggccatgtttggcggcgaggtctcggagggagacgtacgggagggggccgatgaggtgcatgtgcccgatcaccggtagcttgaacggcggcgaagggagcttgctcagaattaactcacgagttttactatccctggaacttattgcggctcgtgcaaagtagaacagaagagcgagagggaggaggaagaagaagaagacggttaccactgcttgtgctgcagtttttgcttctagctgcaggatgagctccatggctcactagatacatgctagctgaaagctcccaataagctctatcgtgtgagctagctagcttgcatgcagttactggctgtgctatgcatgtgctgatattctcttcttgagttcttcatatatataggcaaactataacaccatgatcgagatggagttctaatttattggttgtattgtactacttgagaacgattgatctagattgtgcacactataaccatgaaatggatggagttttaatttattggttgtattatacttcttgagaacgattgatcaagattacaactacgccagaaccgttcatctgtgacggcccaccagtgacaggctgcagtgcttgtcacggatggccggcttcacctttgacgggtctatccagagaccgtaataggtatttgatcacctgtgacgggccagaatttacatccgacagagagttgcttttgttgggttcaaattctggcccgtcacaggcgatcaaataactgtgacgggtgtactgttctgatctagcccatcacagatgaggtattcacctgtgatgtgtgtaaaatttgtgtgcccgtcaaagatgataaaaaaaaattcactctcataaccctcccctcgcctcccggttcacaagcccacgcccatccttatcctcttctcctttcttcttctgccttgaccctctctctcccttcttcttccgccacctccctctctctcccttcttccgagcacctcccacaccaaagccgccgggcgctagctcttatgagccctccttcccgttgcaagcccagctagatgcgtctccgaccgccggccgtcgttcttcttgggcctcctgtgatccctccttcccctctggctcgatccggcgagcagtcgtcatatgtctcgtcctcgagcaccggtgtggctgcaggcatgacgaggaagggcaagatctggccgccgctgcagtcgtcctcgtggttagggggcaccagatccggcctctccgaggtcgggggtaaccagatccgggtcctgctcctcctccttcaccgagtagccacctccaagagctagccgcctccatccccgagaggcaactgccacagcgtccgcctcctcctttgagcattggtcctcgccgcatcctccatcttcgagcagccgacgccttcaccatcgagtactacgtgtcaatgcctcccccgtcatgcattggatgggtattgatctatgtgtttgtagtcttgtgatttgattttagaccttgcaagttatcggtaccaagttttcgattggggtgtgtcattcttgtttccgcatgatgtgttgccactgggaattaattgaaggaagggttggatgactgatgctagaaaagttgcgctctttggtgttttgtttttcttgaaggtggtgaactgcaagtgtttagagtttcgttgtctttggtgatgttgctagaaaattggaatctgaacattgcagttctcaagtagttttgcgctagtttgtttttatgttccttgtaacatcaacgttgtaagttcttggattagaaatgtagtctaaaatgttttggattattcagcgtggatctgttaccgatttttcattgttgcagcggggcacccttttttttgtttgatttttcacacctgtgacgggtcgactgcttcaactcatttgaggtgacataatctgtgatgagttttaattataactcgtcatagatgtctctcaccactaacgggttgctcattacaacccgtcacagcctcacaggtgtctctcaccactaacggatcttcacccgtcataggtgaggttaagtcatcactgaccactaatctgtgaccagggataaacccatcaaaggtgaggatttggacccgtcacagatgacctgattcggcatagtgtgcagacatccaacttggcaatcaattaattgcaagtccctctccatctattaggtcctcgttttgagtgcgtttgtgtacccttaaggccttagattgcacactaggctccatcggaatgggcgatcctaatgggcaatcgatcgctggagatagggggcagcgatcgattccctcccccttcctccctccacctagtttccttttttggcaccgcattacttttctattttagtaaatttatgcacctaaagtttatacacctcaagtttacacatctaaagtttagagaccaaaagtttataagttaaaagtttatatatccgattcaaatttgaatttgaattcaaatatttttttatatatagtatttctatacatctaaagtttatacacctaaagtttatagatccaaagtttataagtcaaaagtttacatacccgattcaaatttgaatttgaattttatctgattcaaatttaaatttgaattcaaatattatctatatatagtatttctatacatctaaagtttatacacctaaagtttatagacccaatgtttataagtcaaaagtttacatacccgattcaaatttgaatttgaattcaaattttttatatatagtatttctatacataaatttttctaactttttgttttttaaaaaattttgtggtgtagaaagagaagaaggggaggagaaaaggggagaagagggactataggggaaggagagcgcggggtgatcgctgggtctcccgcgcattagcagtttcgcatcggaattgctatttagcttggctagctgtattcctatagcgtatatatacttttttcaggtgaaacttctcatataaaagttctttacaaagaagcgtgctcttggaacaaattaaagccgcgtgctacacaacaattccacatattacaaattaatatgtactgcaacttggttgtaaagtgacacgagaaacacaacaatagagtagcttagcaagcgtcatcgtcgccctcttgccctcctcctctttctcctgtactgtatgtggtccttgttatattatatgctgaaattctatcatatatacagtataaccatgagacgaaggttttatcagctatatattgtcttttcaatggtgtactacttgaaaacgatcgatccaaattgcagaaacccaacttgccaatattctatagtgcatgcatgtccctctccttccattagataaaactcttttaatcgcacgtctactcatttattatagatcaattaaatagttataaattgttttaaaaaataacaagatatattatatattatatatatttattttagtatgtaatatattaccttacatgcaaacataaaagttcaaattcgacccctacaaattgtaacaaaaaataaattctactatatgtgtatactaattggagtttaatttattatttttgctataacttgtattatttgattatgaactttcatttatgtgaagtgatatattatttatttatctatcttgttatttttttaaaaaaaatattataactatttaattaacatgtgataaacaagtagacaccacacacgattgattataatccctctccgtcctttagccctcctttgagggtttgcacacatatgtacgacgatatatagcgctaaaataacaattccccgtgcggaggctaacaagtgtagatgaatgctctcacttccacattttacaaacgtgaaacttgggtgtaaagtgacacgtacgtgcatgaaacacaataattaacagagtagattagtcactattttaaaaaaatagcctggtcaagatttcatttgaattaagagctagatactagaaagtatggtttagctatgttaattcaagaatattaaaatgcacaattaattggtcagaaatctagaaattagagctgatgaaaatatattgcttcatggtctgatggtacgtatatatgcaccatgttaattagataatagcaacgttacaaaatactacctgtgctgccttttcactgtacgttacaaaatactacctgtgcaacagttgcgaatatagcgtgtattatttatatacaaatttggtaatttttttacttgtgtaagttaaatttaaacttacgtatttttaagtgatgtattatatatacctatcttatcaattgttttagactttttaatgacattaagataacacacaagaatgagcgacatatccgctcgagggacaaatatacttcccgaccatatgcatcatgtatgtgttatcttcaagctaaaaaggtatctataggaaaggaaatatagaaaagattttttgttttccgtgcgcatgcttcccaaactgctaaacaatgttttttttttgaaaaaaaatctgtagaaaagttgtttgaaaaaaaatcatattattctattttaaaagttgaaaataaataatacttgattaactaatcatgtaatgatggtttatcttattttgcgtattaccctttcactcaaacatagtctaataggtggactggtgaacacaaaacaattaaatgtaacacatttatatcttcacattaaaatctccatgtgaaaaacgaacggccagaatcttaaagtacaaaagacgagcagtccatgcttttatttttatagttgtctctaatgaaacatacgtgtatagtatatgcatgctgtcaattccacatattataaatgtggaaaatatgttgctgagtgattcaagaagtacaattattaataataaagtagcttggtcaagaactcatttgatttaagaaattaaagagaaaatattttttagctgaaacacatacaattagagaataaatataatcaatttgtttgaaatgatatgcgatgttggacaatagctaaggtggagaggagcagggttaaagacaacttgtgggtaaacttttttttaaatagttatcacaatttttttaaaaaaagatcacaataatcatactccctccattaaaaaaacctaatctagatgagttgtaacactacctactacctagtacgacgaatctgaacaacttaattaattcgttgtactagatagtgtcacatcatatcccgacctagatttgggtttttatatcactattttttgagcagatttatttgttttttatttgtaggttgattttggaattgatatttagtggagtgacagatgatgtacttacactgtcacgttttttcataaccatttatattaattttagagaaaaagttaattgtggctaagtaattataggcatctccaatatgcatgtaaaagtgagcataagtaataacttaatatttgtagtataattttatgcataggaagctatatttgtaaaaaaaaattgtggctaatcccatacggaatataaaattactttatgtcttttcaacatgtttgttggtttgattaatccttcatgcatgcaagaaggactaatagaaattattttattaagtggatcgcagcttaagatcaacgagagatattcaacattatagcattagctatatataagtaaaaaagacatatgtctatggatcttattgagaatctatatatttaactatttatgttggctcttcactgctaataagtgtggtgtcttatcacatactagctccatctaaaaaagggaccaagctatgtaggatatgcatcatgttcaagtatatagttagaattgattttttttttaatgaagggagaatgccttatcttgttggtgacatataaaagttttctttttcgaggaacatatatgaaggtgttttgaggaggtatactccctccgtaatcataatggaagttgttttagataacgacacggtctccaaaacacaactttgactttttgtttctataaaaatatttattgaaaagtgatatatgtatacttttatgaaaatatttttcaagacaaatctatttatataattttaatattttctaactcaacaacttgagagatgtttatgatttatatttttaaggtttgacttcaacattgtcctaaacgacctcctttatgagtacggagggaatataagtggagtaccatgcaagtacgtgataataatattaaaaaggcatcgatctcataggtgggtgaagacagacagcacgtttcccgctagattatcacatggacgacacgcttttcaaaccgtaagatattcgattagaccgtaatagtgttgatgggaggggggcttaagttgtatgtgttgtaagctttcaagcagacctcatcgtttgccttatgatgtatcagtcgctactaaaattaaatttttaaaagagatattttcgacatagttttttttacagcattggtttttaactcgctaaaaacatatataaaagtttacttacaaattattttttatcactaataagccgtttggcatgctattaactccatttggtccgccggtctaggcctgcgggtgtcatcgatcatgtgtgcaatgtttgctaatctgggtctacaacgtctgcaacgtttggcatatcaattacttagaaaaaaaagtttgtctcgaaaaagaaagaaaaagattaagtatttcaaattgatagggaccaaagccacccgtgaatatgaaaaacaatgatggacggtgacatatatgtatatgcatattcaacggacattttaattaatttgtacaaacaagtaaatgacatgtgccatgaattcttatctctactattataaaaattaaagatgtttttaccatgtgctttggtacgtcgtgaatctgtagcttagtttccggattttccgattctgtttttttactcgtatatcttcctttcgtgtgtccgattctattttcttctaccgagcgcaacgcagatgaccggtgcaaccctggggtcgttctaccgtacggctgacctccgggccgagcgtcttggccaccacgggctgagtgtccctctttttaactgatgggcctcatctgtcttggcccacataattcttagtaaattatttcttggtatttttctattgtttcagtttggtgttctcccctaatttttctttattgcttctccctatttcttccgaatgcatgtacacttttataaaaatcaaaagatattataaaaattaaagatgtttcagctgtatcgttacatcgttcgtatttgagtcagtttttaagtttattcacttttgaaaatatattaaaaaattattttaaaaaacttgcatgttaacttgggacgagagtcggacaactaattgtttcataattcttgccaagccattagaaagcaacgtacatgacatgaccaatcgtcctaataagagttccgaattagatataaatactatcaaaataaaaaatcccatagactttttaaatagaaaaaaaaatctaacaataatacgattaaaatagccttcacctgttgcaacacacgggtatttttttctattttttataaaattataatttttttaactgggcaaaaaattaattgagaggctaggaacatgctgagcacatgggctagcgacgttgggccggccataaaagaagacccatatgcatgcatacgtggaagcgctctcctaaggcggcctagaacaaataaaacgagtgatgtccgaatcagagcaaacactagaccgcataatccttaattattactccctccatattttaatgtatgacgtcgtttgctttttgatgaatgtttggccgttcgtcttattcaaaactttatgtaattatcatttgttttattgtgacttgatttatcatcaaatgttctttaagcatgacataaatatgtttatatttgcataaaaattttaaataagacgaatggtcaaacgttgattaaaaagtcaacgatgtcatacattaaaatacggagggtctaccttgtagactataagggttaggtctcggcgatcgatggcttttcttttctttatttattttttctagcttagaaaaacagctcgcgcgtggttgcggcattgcgtagtattacgaaatgctctaaaattaaattagagtgatgtatgcatactattatctttactatattgggctatcagctcctctcgtgatgaaggggccgacggtggcctcccacgcttgcacccatcgaacctctcgctgtcaacgccgcactccgaccccgacctccagttctccgatcggggtcgccatgagaagcggctcgggaggataaaggagcagcagagtgaagtagcatattgtcacgctgctggcctcccgctgccgcgtagtctcgtgtgggaagaagggaggacgaagaagaaagggataagtagggctgacaagtgggccccaccgttttttatttttacttttgtcactaaaatgtggggcccacttctatttttaattcttttgatgattgggctatcacattaggatacttggaccaaatcaacgtgccacttcaacataaatcgctttcaaaaccaccaaaggagtcaatttgcaccattttttgaagctcggggaggcattatgcccggttttacgattgagggatgcgatttgacaagggcaacatatgaggaatgcaaaatagacttattcctaattaggatctaggccaatgcaggctgggccagctcaagatctaggcccaatatttattagatccaccctgtctgaattaatatatatatatatatatatatatatatatatatatattgaagagtttgaatttacagaaggaccaaattaaacaaccaatgaatatcacaaacattaatgatgattatattgtttgggtgtatatgtagtatacattatacaagtaacagcacaaatggagggtgatccacatggacaatttgttttacaaacaagtgaaatgacatgtgccaataatagctcttattattacacgaacaattaacgacaacatgtaacactaattgatttagcacgtgattgctggatgaataatataacttgccccaacgaacgtagtactgattcttgtataggcatgtacttaggcagcttgcgggactaagaagagcttctccttccgatgcactgtcaatccaaacacctctgtcatatcaatatcctcctccttcacacctgctggtagcttccagttgaaacagtacataaggttagccagcataatctcgagggtaaccgttgctgagtgaattccaggacacattcttcgtccagacccaaacggcaggtaatgaaaatcatgtcccttaaaatcaatgtttgaatccatgaatctctccggtaggaactcatctggcatgtcccagaatttagcatccctaccgagtgcccatgcattgacgaatacacgtattcctgtagggatcatgtagccgctgatactgcaatcttctctagacaggtgggggatgtagagaggagctggtgggtgcagccgtagtgtctccttgataacagcctttaaatagaccatgtcgacaatgttatcttcattgactacttcttgtcctttcggtatgaccctcctcacctcgtcctttagcttggctaggaggtgtggcttgcgcatgagctcaaccatggcagattctagaactaagtacgatgtgtccgtgcctgcttcaaacatgtcctacatatcgcataaataacataaattaatagtgtatggcggtttgtgtaatgtagcgtaatctgtacaacatgggaagtgtaaactcttgattctacatcaacagtagctaaatttaagttggcatgtagcagctagcactcaccacaagtatagctttgatgttgtccctggtgaagccatactcttcctgatggtagagcaagatgtcgatgaagtcactgtcttgttgctgatcatgatcgtggcggcgcaccaacctggtggcatggtcatcgatgagcttgtcgagcagctggtcccatcttctcctgaccctcattgccctgacgcagatgaccttgctgagcagcttcgtcctcgccaagctcgggaagtaatcctctaggttgaaccctcccaggagcgaggcgttggtgtcgatgagctcccggaagagcttgttccgcccttcctcccggaagaacttgccggacacggcgcggcagatgaggtcgttggcgaaggagtggaggagctcggtcatgtccaccggcgcgcccgccatcgccgccgcgccgcggagcttggcgatcaccagccgcacctcctcctcccgggcggggcggtaggcctgcaccttgtgggagttgagcaggtggacggtgaccgccttcctgaccttgcggaaatggtcgccgtaggggccgtagcacgagtcggtggcgccgtaggtgatgatgtcggggaccatggcgcgcggccgcgacgcgaaggcgaggtcgtgggtgcggaggacggcctcggcggcgcgcggcgaggagacgacgagggtggggacggagccgaggtggacgagcatgaggccgtcgcggccatgtttggcggcgaggtctcggagggagacatgtgggagggagccgacgaggtgcatgtggccgatcaccggcagcctcagcggcggcgaagggagcttgctcagaagaagctcgctgttgcgatctcctgccattgtcgttgctcgcgcaaagcggagaagcagcagcaggagcgcgacgggaaggagcaagaacacggctgctgcttgtgccctactagctgttaatggctcggtgttgttgagctccattgctaattgcttcatcgattgaggtgagccagagtgttaatctgcgctgtgattttatagccgatcgagccttggatgcctaattcatctatatcattcattagtacgtacttgcgtgtttgtgttgtctgtcttttccttgtattactttggactgccttatcttttcttatgtttatacttatcaggtaaaatttaaatttttaactttaaaattgaagttgattttgagattttttatcgaagtttattttttaatatttgcttttgcttttagatcgctaaaaacacgtatataaaagtttcttttcatttataaatatgtcatttcgcttattccgcaaataagtgaaacgatggctccgagagtattgatcacttatcaatagtatactcgctctccgttcccaattgatcaacatacaacatgatggttttacagaaaaaagagttaataactattttatactggagtactattgtcaggttatggataccacatacctaatagtagttgactaaatctcggcagggcccaccacataccatgtcctatacggaaacaacctgcggatatggagggagttccggataaagaaagacaaccagagttttacatggaaacgaccaggactactcggattgtatccatattagtttccctagttctacttggacaaggagatacctatgggtataaatacaaaaccccctaggaggagaggggacaagacaatcgacagacgatcgacatgatcaacatgatcaacacggtcaccatgatcgagacccatcacaatcaacaaccaccgcaatatacggaacaacagaagccaatacaagccaacatacgccaagacacgccgccggatatcgacttcagggataggcatggctatttccctatggtgtctccggataccgtcaggagagacgaaagcgctatctctgatctcgccggacacggattcgagaaggaaggctaccctgttgtcgactacgagtcagaccttcagaccgacatgtcgacaacagttagataggctacccacatattgtactggtgtgattatggtgaataaaagcaactccggctccggccaacaggatgtagggttattacctgacaactcaggggcacgaacctgtataaaaattctcgtctccatctcttttacctcagtctcgcgtatatcctagcaccgacgatccccatactatgcaaataccagaattgcgacatcaaacgtcgacaactatatatatccggatgttgcatgttagttgtaaataaattaaatagttgtgtgtatggatacatgtaccatgttcatttattttaatgcacggataatgaacatacatagagagtacaatcatatcaattaggaatatactatcctaataaaaatatttgccgatcatttggaacggtgggagtacgatcgatcaatggcgttcttatgtgacgtgtcacgtgagtgtgagtgcattcatgctaaaaacttggaaattaatcaagtgcatgtctctctcatgcgtatgaacacttgtgtacttggtctttttctcttttgtttcggtggccaatgtcttcaaatcttaatatatgattatatattttttattttcttagccgcctaatattatcgtatatatacctgcatatattatattttctaacagagattatcgctattaaaaatatgtcgaactcttctgtcgttctttgagtcaatacgaaatgatcaagagacaaattaagtcatgattatacatattaagcgccagtgacgaatccaggatgaaaatagaggtggtgctaatactcagcactgaaaatcatatttcctgaaaaatatgatcttaaaatccatgtttcattctgtaaaatcatgtttgtccagttgtattagaccctccaatgggtcataatatctgcctaattgtcttcaccggttaggcttggtataccatttagcaattaataaaccatttagcagatggagcactaatcacaccacagacctatacgcgagttgccttcttctctaaagctgcgggcccaaaatataccttctctaattgccttggtgtcctctgctagctttgagcttaccgggagaatacttgggggcggaaaatggagctggggcttgagccccaacaagccccaacggtgaatccacccctgttaagcgcacacatgtctaattaattttcgagtaagtacaatctgtaagttggcaaggccctgtgcatgctagctagtttcatttcaggcctcaatgctaggaatttttttaattaaaacgtggtaattaatatatatatattgagataagttacaaaacttgataaaaggatcaattgcgtctatatataacaattttggagaattacggacccattgcggaataagaaaaaaatatatttgtaaacgaaaagtaatttgtgaataaaacttttatgtacatgtccttagcgatttaaaagcaaatgctgaaaaataaactttgatgaaaaaacctcaaaatcaattccaaatttaaaattgaaaatttaaattttggctgataagcttaagaaaaaaaaagatgaggcccttaggctaccatgccacctaaatatacatgacgatgacgacctgcctacttggatatgttatcccttttgaaggtcaaaaaataatgtatattgacttgaacagatctccagattaaaacagagtcatttgattggtctctgtcccacgaggttggagtaaaagaatcgttttacgcaagaagtctgatcagcattactttctgaagaattacagtataatatactcctcctataccacattatattcatatgggaacaatccgtattctcaagtcttttgactttatttttattatagaaaaaattagctacgtttacaatactaaattagttttattaaatactatattaatttcatgctgggtcaggccaggcctgtctatgggctgcactaacgacccaaacacgacccaataagactcggccgtgctgggtcggctagaaggaacaaagtctatcgtgctcgttgttgcaataagtctatttgctccctcatctctttcgaccttgtcttatatggctagaataaatccatttcgcatccctcgtctcttttggccatgtcttatatgactaaagtaagtctatttttcgtccctcatttattttgcctccctaattattgaactgtactgggtcaggccagcccaccgtgccaagatagaggtccagacacgaccaaacatatgggtcggaccggcatgggctcgacatcagtcgggtcatgccgtatctgggccgagccaaaacctcgcgtcatgcatgggccgggccatcgggcccgagccttcatatatatattggtaactccaacaaaagagctcggccgaaagagacacctgtcgtcaccaggacataacttttctttaagtcgaaatcaaaatatgataaacgaacttagctaggagaatctcaattagttttccaaaaaaaaaaaagacaagttaattaggtccaatatagcactcactcagggataacgagtaatacatggacttaacatatagcattttacatatttgtttaattttttagagtagacatcttagtgagtgcacatttgccaagtgagaacgtgggcgtttggttcatggttacactttgctacactaattctgtggctgtcacagtttgttaggcatgtgtttggttcactgccacaatcatggcttgccatattttttcaatagcatctcccacatgttatagacttaattttcgtgccaattttgccacactttgtggctagcaacacttttatagctgccacaacttggctaatgttagttgtggcaaagtgtgaccgacaaccaaacacaccctaattcctttatgtctactctaagaacagctttttcacgtgtttgaaatatcaagaactatgaaaccggtgggattacaacttttacagcagaaagggaacacacgcagagcaatatcgatagagattgggatcaggacgagatgagtcgtcgataacgtcaataataaatgaatgggccagaaatcttcccgtgttttttggctggttacacaaagcaacggccatggagctcacacaccagtcagctatagtggcttctaacgcaaacaagcgaagcgtccgaagagacgcgacgcgtggcacagtactctagctagctaccgcctcccaaggaagaggagaaatcgaaggcatccaaccattcgtcatgcatctagcttccacaaactttcgatcgatttcactacaagaagaaccctagttagttagcaagtataattagctcactagctagtactagcagccatggttgttcaattgatgctcttcttccatgacaaattcatggctccaatggcagaggagccactgcccttcgtcctcatcatgatcatcatcttgctgctgctggtgcttcttcactactacctgtctgcatcaaccagaagatcatcggcggcgagcaagagcaacgatgatgtcctgccaccgtcgcctccgaggctgccggtgataggccacatgcacctcgtcggctccaaccctcacgtctccctccgcgacctcgccgagaagcacgccgccgacggcttcatgctcctccagctcggccaggtgcgcaacctcgtcgtctcgtccccgcgcgccgccgaggccgtcctccgggctcacgaccacgtgttcgcgtcgcggccgcgctccgccatcgccgacatcctcgcctatggctcctccaacatctccttctccccctacggcgactactggcgcaaggcgaggaagctcgtcgccgcccacttgctcagccccaagaaggtccagtcgctccgccgtggccgcgaggaggaggtgggcatcgccgtcgccaagctccacgaggcggcggccgcgggcgccgccgtcgacatgagggagctgctcggctccttcaccaacgacgtcctgtgccgcgccgtgtgcgggaagtcgtcgttccggcgagaaggccggaacaagctgttcatggagctcgccgccggcaacgctgatcagtacgctggcttcaacctggaagactacttcccgagcttggcgaaggtggatctgctgaggcgagtggtgagcgccgacaccaagaagctcaaagagaagtgggacagtgttcttggtgacatcgtaagcgagcatgaaaagaaatcgtcgctgcgtcgtgacgatcaagtacagatggatgatgaccgtgatgatgatcaggaggagcaagagtcagatttcgttgatattctgctcgatcgtcaacaggagtacaatctaaccaggcacaatatccatgccatattgatggtaattaatcacttatacatatgttcttctgaatttttctttcttttttactattaattctatcatctagattaatcgaaaattaggtaattgagttttgtacatgtgtttcttccaaacaacgttaatataatatatatattttgagttgacgaatctagctaatctttaatttctgtataggacatgtttgcagcggggacggacacttcatatatagcccttgaatttgctatgtccgagctcataagaaaaccacatctcatgaccaaactacaagatgaagttaggaagaacacaactacccaaatggtaagtgaagatgacttgaacaatatgccctacctaaaagccgtcgtaaaggagacacttcggttgcatccaccagttccgctcctcctcccgcgcctctccatggctcagtgcaatgccaatggttatacaatcccagccaacacacgtgtcatcatcaatgtttgggctcttggcagagatgctaaatgttgggagaattcagaagagttcatgccagagaggtttatggatagtggagacactatagataatgttgatttcaagggaaccgactttcagtttctcccatttggagctggacgaaggatttgtcctgggatgaattttgggatggcctctgttgagctcatgctatcaaaccttatgtattgctttgactgggagctcccggttggaatggacaaagatgatgtcgatatgacagatcagttcgcacttacaatggcgcgaaaagagaaactctacctcatcccgagatcacacgttatcaagatcacataacacaacatatggccaacatttcaatagccatgagttctgtatggtagccatagataccaagcaatagcgtagttatctgctataagatatatataatagtaccaaataaaatagagagtccattcgtctcttgagggggacaaatagaagtaaataacaagaagaaagtcaatatgttttaaataaagatgttgaatatatgctataatatagcagatgtcaatatgtacgtttgttaagaaatttatgttgaattaagtacaggtacatactctgtttaaatgcgcatggaagattcttttcggtcattatataaaaaaagattatttttggtaccttatatactgtaatctctcttcacctctatatcgttgcaacctgatggtgacagccgaaagaaagtggctctaaggtgtgaaaagaatagaaattaataagtaacagcaacaaattcataagaatttgatgaggttggtagccaatttcagtcacaaaacagtagtgtacataacgctgatattctggagcaagagtcagattttgttgatattctgctcgatcatcaacaagagtacaatctcaccagacacaatatccatgccatcttgatgttaatcacatatacacttctaaatttttctttctttttactattaattcactcatttagtttaatccaaaatcaggtaattgagttttctgttcatgctcaatgttgccaaggaaaaaaaaatagaaacatacaaagtattaaaatccatctcttatatggttttatagactgtaagagagaaataaattttgtaaacaacgttactattactttatcggatgaagaaataaccaaagtaaaagttatagatattgatgagctatacaactttgttgtttatgactttttcagttgaaatcacttagtatttgaaaatgttgtttgaagttgttataatttgaaattcaaattcaaatttcaaagtcatatagcaaaaagaccaaaacaaaagttgtagatgagttatacaactttgttgtggatgactttttcagttgaaatcatttagtatttaaaaatattgtttgaagttttcataattttaaattcaaattcaaattattgaaacaaagtcatatagcaaaatgaccaaaacaaaagttgtagatcttgataagttatataactttcttgttgacaattttttcatttaaaattatttactacccaaaaaattatttaaattgagaggagggaggcctaatagactttgcgtcgagggaggagcgaaagagctgggccggcggcccgaagagggaggagggaaaggggaagccagcccaaggagggagagagaggctgagagctgagggagggagagagtaacacttgggccgaaaaaggcccaattacagagataaggattttaattagttttctatttattttaataggttaaatgaatattatggtattaaaattatttattgagcttcgacaattcacagaaaatttcaaagaataatttagaccatgtataatattaaataatatttccggccatgatttttaaaggaaaaaattgtttccttattaattcacttgattaaattgcttctagaaatacatatataaatctatgacgtttgctttttcccctcatgacaaattaatattcgtcacaatctctcattgaaatactttatgacgatttgtagttggtattaatgacgaacatatttttttcgtcactaagccacccatctcatactaatcgtcataaaatggaatgtgctaatgacgaatagctccgatgtcacgagaaattcgtcacagaatgtcatatttcttgtagtgccaaaacagagttcctttcccatttccaattcttcttttacaatatcttaaaaaatatatgcttaatacaagaagaatttgatgaggttggtagccaatttcagtcacgtagcagtagtgtacaatgaccttatacatactcctttttgtttgcactggttttcctcgatccgccgtgcaaaatgaatcgaatcaaatcgcaggatgattgcggaggaaaatggaggaggtgacaaggacagacagagagaaagtgacatgacaagaggtggaacaagggaccaacgtgggcaaatgtattttttccatgtggcaaacttaaattttatcagcaaactaaactaacgcgtatcgcagtcacgaaatggctagtgacacttaagagacagtattatataatatgcatttgacaattctcattctatgcaggtgagtagttttcatctatatagatattcaaggaattgatggccacggcccacgggatgctcgatcttctgtcaggtgaagataactatcgatttggcagaaacttgactcatgatccggtttctgatcaacacgatccaaatcctgcaatcgcagtaccatgtctcttttggttatcaaccatgccgaaacccgatttacctcgccgagaaggctaatcgctacgagtgaatcgtagagcacaaccaagaataagagagacaacaactcaattgcactcttgtagatgaatgattaactaagaactcaaagttggggttacacaaaccgaactagcagcgatactgcgatggcagaaataatctaagcaaaattcaaccttaactcaatgacgactacagaatatataggttatagggtatatcttggacccttggacacgtccctattatactacatcataatacacggcccaacaatcccaaagacggtgacgcggaacccgaacatattctgagccgcctcccgcccgctcctggccgccgcctcggcggcagcagtgagcagagcgcctccagcgccccgtgcacttggtggggagtggaagagaggagagagagaggagtggtggggaggggaggggaggggaggagaggaaaggcagagagagaggagtgatcgagggagaacaaaaggggaaaggaaaagagaaggtgaaaaatttgaagtgaaggagagggaaaaaaaggaagagatattttcgcgtgcggtccactggagaggtccgcacgtaaaaatcgatttttccgtacgggtctcttaaggatccgcgtgaaaatagaaggctaattttttatagacgaacatgaaagaggtccgtataggaaaatgggagctccttgtgtaggaaaatttttttgtgtactagtgacaatgaatttaacgggaaagctgacaaaaagaatatatgtataataagggtatagaaatctgttttaaaattatttaacctggactatggtgtaaaagcaagttttttttttgacaattcaaaagagttaagagttccattgattcagaacaagtatatggtacggcacgggctttttttttaaaaaaaaagtatggtacgacacgtattgttaagtttcgcaacaaagcaagcctattgcactgcagggcacgacaagcaagctactagctagctagaatgctctactagatcgttagctagcagccggctgcgacgtcgactcgacaatattctagacaaattaatgagcatatatatatcaggaggatcatatctgtgccaagataatatattgaacacaactcatcaagtgacaggtctcacacaccaacctcttggagaagacactagagagattaggcagccatggctgtgatgctagtgccaattccactactactcttgcaccagcaccacaaccatgagcatgagcatccatcgccggtagctccacagccaacaatggcatcctactacactctcctgctggcgctcctgtgccctcttctcctcctactcatcaaactttgccgggcgaaaaccagggacgacgagctgtttgacaagctcccctcgccgccaggaaggctccctgtgattggccaccttcacctcattggctccctcccgtatgtctccttccgtgaacttgccatcaagcacggccctgacctaatgcttctccgcctcggcaccgtcccgactctcgtggtgtcatccgctcgtgcggcgcaggccatcttgcggacgaatgaccacgtgttcgcgtcacggacctactctgccgtcaccgacatcctcttctatggctcgtcagatgtagcattctctccctatggcgagtattggcggcaagtcaagaagattgccaccacacacctcctcaccaacaagaaggttcgctcctacagcagggcaagacaacaggaggtgcgcctggtaatggccaggatcaacgaggcagcggtggcacgcactactgtcgatctgagtgagttgctcaattggtttaccaatgacatagtgtgtcacgccgtgtctggtaagttcttccgtgaagagggtcaaaaccaaatgttttgggaactaattcaggccaactcattgctactcggtggtttcaatcttgaggattacttccccaatttggcgagggtaactactgttaggaggttgctttgcgccaaggcccataatgtcaacaagagatgggaccaactgctcgacaagctcatcgatgatcatgccaccaaacggtcctcctcggtgctagacctagacaatgaagagagtgatttcatcgatgtccttctctccattcagcatgaatacggtctcactagagacaacgtcaaggcaatcttggtgatcatgttcgagggcggcacggacacggcgtacatagagcttgaatacgccatggccgagttgattcggaagccccaactaatggccaagctacaggccgaggttaggagtgtggtaccaagagggcaggagatagttactgaagagcaactgggaagaatgccctactaaaggcagtgataaaggagatgcttcggctacacctcgcagggccacttctcgtaccctacctctctattgctgaatgtgatatcgagggctacacaataccctctggcacacgtgtcttcgtcaatgcatgggctctgtccagagaccctagcttttgggaaaatgctgaagagttcataccagagaggtttctcaatagcatagcacctgactacaatgggaacaattttcatttcttgccattcggtagtgggcggaggatatgcccgggcataaattttgctattgccaccatcgagatcatgctagcaaaccttgtttaccgttttgattgggagataccggcagatcaggcggcaaagggaggcatcgatatgaccgaggcgtttggactgaccgtgcaccgaaggagaagctcctccttgttcctcggctcacacaagattaaatagtcaatctatatatcttatctaagtagttgtggtgatctcatttttcatcgtgtaagtggtgtgcttgttcactggtatctatttatctataataagagaaaaaaaatggaaattcccctatatgtggagcgtgtggtcctggactggaggcatgcagattcgacgagtcagcggttcacatctatatagatagtatcctctagtgcgttgcacggatcttaaagcacttggatggtggatgagcccggacactatggtgtccctaacaaatttaatatatataatgcacatagtaccaatttaatacgtacgctaatttaattagcactaatctttcatgataaattaggaagctacatatatacatatatataggacttatgcaaaatccgtttttttttcatttaataggttgttacattacaccatctttatcgtacatagtactccctccgtcccataataagtacaattgtgagtttcagcgttcaattttgaccatccgtcttatttgaaatatttttatgattactatttattagatgataaaatataaataatactttatgcgtgacttaacttttaatttattttcataaattctttaaataagatggacggtcaaacgttgggtacgaaaacttatggctgcacttacagtgagacggagggagtatatcattaagtggaactgtcctggcccagttcgaaccagattaattatggattatcgattgccatgagcacactccttgatgaagcttcgaattagacttttttaaataaaattttaaactttataatacttattaatttatttatttgtaccctcgattaattaccacaaaatcagaataatccatcaagagcaccatagatcgggctaagcagctagacacaaaataacagttacgacatcaacatactacatcaacctcctatatatcatagaagttggcgccgtgaaaaaagtttatttagtataagcttttcaggtttctatttttctaaaataaatttttcgcaaggaacaaaaattgaaaaatccagccatcggtgctacgaacgggccaagagataaaagagcagatggcatgtcaatgtcagtatttcaatgcaaagcaagtttcatgttccttttatttttaaaacagaataagtttcagtacacccataacaaaatatatatatatatagtacattgtatcttccaaacaaaaccatactttaacagaggaggacgtcggtcattatttctttaacagagcatgtggggtaatcaactgcatgcaagaattattagtttattagcaccatccgtttaatggtaattgattggtggatcgcgcaatgtcaaatatcaatatgctatgttagtgtcgtcgtatcttccaaacaaaattactaatttatgtggtaatcgaccgcgtgcaagaattattagtttagcacaccatccgttgaatggtaaatgattggtcgatcgcgcaatgtcgaagatcaatatgccatgcatgccagtgtaatcgtatataggagtatcgatcttccaaacaaaagtatctcgatgcagtaatgatcgatgcacggcgcgcgttataaaagaagcaaggaccttccctactcaactcactcattcattcatcaaagttgaaggtagcttaattagctctagcgagctagctagcttgctctgtcttggaagctagctaggccactgatacgtagtagaacgtagcagcaatggcccaaatgctaggagcattattattgttccaagacagcctgatgagcaccatgacaaggatgtcatactctctcctgctccccatcttgtgccctcttatcctcctactcctcttccgttgctatgcctatgcaacaaggtccggcgggatgctcgacaagctcccctcgccgccgggtaggcttccacttatcgggcacatgcacctcatcggttttttcccacacatgtcactccgcgaccttgcgactgacctgatgctcctccaccttggcacggtgccgaccctagtggtatcatcctctcgtatggcgcaggtcatcttgcgcacgcacgatcgtgtgttcgcgtcacggtagcaatctgctataaccgacatccttttttagggtgcaacagatgtcgcattctcaccgtatggtgactattggcggcaaataaagaagattgtcacaacgaatctcttgaccatcaagaagatccgctcctatagccagacacggcaacaggaggtgcgtctggtaatggccaagatcgtcgaggaggcggcgacacatatggcaatagacttgactgagctgctcagctgctactccaacaacatggtgtgccatgctgtgtctggcatgtttttttgcgaagaaggccggaaccaactattcaaggagctgatctagatcaactcgtcgctccttggtggcttcaacattgaggattacttccctagcttggcaaggctacctgtcaggagactgctctatgccaaggcctatgatgtcaagaagagatgggaccagttgcttgacaaactcattgatgaccactctagcaagcatagatcctccttgcttgacaataatgatgtggagagtgatttcatcgatgttctactctctattcaacaagagtatggcctcactaaggataacatcaaagcaaacttggctatcatgttcgaggctggaacagatacatcattcatagagctagagtattccatggcagagctaatgtagaagccccagatgatagccaagctacaggctgaggtgaggggtgtggtatcaaaagggcaggacatcgttaccgaggagcatctaggtaggatgccctacctaaaggcggtgatcaaggagacactccgactacaccctgcagcgccacttcttgcgccccatgtctccgtggttgactgtaatgtcgagggctatactataccctcaggcactcgtgtcatcgtcaatgcatgggctattgccagggaccctagctattgggaaaatgccgaggagttcatgccagagaggttccttagcaacacaatggctgactacaatggaaataatttcaatttcttgccattcaggactggtcgaaggatatgcccaggtataaacttcgcgatcaccaccatcgagatcatgctagcaagccttgtgtatcgcttcgattggaagctattcacctcaaggatcgatatgacagagactttcggggcaactattcacctcaaggaaaagctcttccttgtcccacatctccctcaagataattagtcaacttatctcgatcttaagtctagtatatatattatcttacaatttgatatcttgatattgtatcgtaaccgcctctgtcaacaacttgtgtaagtagtgggcttgtacgatgtaactatttttatcttttccttctaaggagggctttgttgtaacttgtatgtataatgtatctataccactccacctactcataattttgcaaataacctcttgaacttctcaatattaaaaatcaatcagatctaaatggatagccacatataatgtcaaattaaggtgaaatattccctatagcaaaatgataggtacacatttctaaacaataaaaaagggtagattaatattgcctttctagctaataacttaatattgtatggtgcttaccttttgtcaacgtacatacttgtgtgagtgttgtaacatgtaaagcataaacatatactatatatatgaaaggtggaaccaatatttcaaatactcaaatttattggaatacttgcactgagcgctacagcccctccccttcaccgctgctgccaagcaccgccgtggatttgaggtgaggggaggagaatctgaggtgagggagagggaagggagagttgatgggtaaagagatagctctaagggagagggagaggtgaaggagaaagagagaacgagggagaaaccggtcacccttgactgattcgattgatttattttatatgattttcgcaggcggtcctattaggaggaacgcttgtaaaaatagacatgttttcatagccattttctcttaatgaaacacgtgtgaaaatatcgaaatattaattttcacaagtggtctgtaaccttaggaccacatgctgcatttttatataggtaggatttttttactgcctataaaataaagtggtgatgggttgatggtgtcgaaaatgattttttaaaatagttctacttacccaacatactcatgctgttgaaaaggaactccatatatttggttagattctagaaaacgttggccattccatcatcctattaccaccacacttcattatcgtgaagaaaatgaatgaagtcactagtaggtggtagcgatactaccttgaagtgagttttcctagtggacctaattaaattcctgcccatattccgcgattatcaaatggaaaaagtacaccaaaggtccctcaacttttcatcgggatacaaaatcgtcctccaaccacaaaaccagatatgcggggtcccttaattatgcaaaactagtcacaataggtccctcgacggttttgatcccggttttatcctacgtgactgctgagtcagcgtaagacctacatgggccccacatgtcagcctcctctttctttcccctcttctctcccttcctcttatcactctctctctcactcttctctctaggctcttggcaggcggcggggagggcggaggcgcgggagaagtcgacgacagggaagccggcggcggcatccttgacgcccacagttgtagacggcgatgcagttgtaagtatatctatctgattcaggaagcaatataaatttaagggggctgtatatatatatcatgtgacagaaaatcacacctcctattattcgaattttggaccattggatatgctttaagattcgtgcaaacacttaaccctatcttcttcttccgtccccccccctctgctcgagcattccgtccgatccaccgccaccatcgctaccgcccgatccactgccgccaccgccccaccacgccgccgcccgcctcgccggctggccggaaggagtcaacgacgccggcgaggcggccggcggcgcggcgggg

SEQ ID NO: 7848 - DNA, 34172 bp, Oryza sativa
aggttgtatcccagtcagcagcagattccacgtagcaaggatgagttgcttgtcagcattgagaggatgcgcaaggaggctgaggtgaagctctccatatttgaggatgcaaaatcagcgtttgatacgacagagatgggggggaggccggatcggaggtggagaggacgaggatggccactcttgctgctggcaaccaattcatagatgctaaaaggattctcaaagaccttgagcaggcgggcgaggttgcactatccctgatagagtccctcaagcacaaagctacatctgtggttggtgccaccactaagtcaatgttcatgggatgtggttcggtgccaggtaacgctaggagtcagaatcttgatgatgtgacttgttatagagtctcttttgatcaattttcttggttgattcttgttatagagcattaaccatatgcaactattttctgtttaattcaattccagctccggggggccaacaggatgacaacaacgctggtgaagatcagaagctagataatggtcatcttcatacccgtgcttctggacctacccatgctgttggacctaccgaccagcagtagaaccactagcaactctagtactatgttaatatccagctactggaagtagctattttgctgtaagccttttccatctgggactagactcagtataagactagctattaacctttatatgcacccatgttctattcaacatatcttttacgatattttgcagatctctagcacccttggttgctgtatttatgggaaagggttcccaaaaataaattagcttgaaagcaattaaagagtttgctaacgataacgatatgatgtgagatgtagttcctagggagatggagccatcaaagaatacgaactgttccggttgccagaaccgaccaagacaccttggcaaccagaacatttcgtcattttttgataactaaggaactttaaatatatgagttagggtaatcaagatatacatgtttagtattgtcttttaactttcttgccgtacaccagttatttaggaaatgtctcagcaaggtgagcccacgtcagcgagaactagtgggacaacatcgagccggaaccctaggatccagaataaaattcctaaggaaagatacacctgcatctcctcatttagttcctaggttatcaaaccatcacataatacgaagtgcatggggaattatgttggtttggtcggggtagtccatagatggaaccgaccaagacaccatagttctccatgcacttcgaaatctgtcattttttttttgataattaaggaacttaggggttaagtgcaattgtctatttatttttagtttgtaggttatcaaaccatcacagaaaataattatattgcacatctaataaaaattcaccttcaaaggatatcaatggaaaaacccatagaagcgcaacccacgggtgacaagggtaaggaaactcaggccgtcgtcgaggaagatatttgcacgcaagtagtcgcggaggaatcgtcgttgtcaagcttcagtgaagcagagagtggatcgtatcactcaccgagtgacccccatccttctcttgcaaggaagagaaagggcgggagcaacaatgaagaagttgactccgactacagccctcgcgaaccggtggtacgtaatatattatatatgtttagttccaatcctattaaggacatactatggattttaactgaagtcacgtgaaatgcaaatatagaagaatgctccacgttgctctaaaaggaaagcccaagtcgcacccgaagctgaagctgaaactagagctgtcatgctcatcacaacttcaagtaaaccaaagaaaagaaggggcgagcgagggaagaacatgttgaaagaagtcagcgtgctgaggcggatgtgagacaggggaacccctatcaccagaagactcatgttccaagtatagcaaccaatgtggggcagtagtcagggatatcgtggagatcacattgaaggattggaagaaagttcccgacaatagaaagaacagctgttggatgtcgctgcaaagcaagtttgaatattcgaagggacagacgatgataaagggaagcactattgttggtatttcttaatgactttactagaaatataattcccagcaatggcacagaaatattcatggtatattatggttacaaaattttgggctcatttggtcgtgtcaatttagtgttctcagctcacttgtccacaagttcgattctcgacaacgttcgattgattgatcgtctgttttgctgtcggttctcctccattttttactgtattctctgcaagaagttaggatccaagtgctagtggaaaatagtttattctaacataaatatgcattgcaagcataactagttctcctttattttagtaatattgatgggcgaaactgatcgataacgactgtcaacaactatgcgctgaagactatgggcaagctgtggcgaaattggaaaacagacctgaataggaaatatgtccagaagggactcacgccgtataaggactacgtaaggataatacaggcccagagggatgagttcgttgccctgaagacattggccgaagaaaaggagaagagccagaagatggctgaactagcaagaaggaatgaacatcctcatcatttgggatcgaccggttaccgtcaagcgatgaagaaatggaaaaaacaagatgaaaatatggagaaggcttggaaagaggttcctatgaaaaaacacaacccacgaagcaggaaatgggtgcgtgcaagaacaccggccttcaccccgaaggggttgtagtcttcaaggatcaaaagctccaggaggtatctgtcaagattaagaacatcgtcacgcagcaacaggccgggacattcttgccagatagagactgggacgagcccacatatgcgttgggcaaactgaagcacttaggctgtgtgcggggagtatcctcgaagactagctggaaggatggattcaaagatgatgctcatacctacaagaagcgtgatcgctataaggaagagagactgtcaggctagggcagcagctcgtgaggaatgtcgtagatattggagcgagaaagtgatgcactgtggtgcggtttcggagcccgacccgagctatccggtcgacgatgtaacgaaggatactccgtgtaagaaaacaccggttggaactaggaggttcataccgggccgtagatttcattgccaagacattccaaacgattatgccaaggtagagctccagacggtcaatgaggctcaccggatgcacgagatcgacattccaacacccgaggggattgtgtaccttgtagatgtcgtcgaccactttatactccggcacaagactaatattcaagtagggtcaacggatggaacagatcgagcactaaggttaccagtgtcaccgtctcgtccaccaagggaccaagaaccgagggatcctccagttgcatcacctccaagattagagcaagctgttggatcgccggaaatatcagagcctcctattacatcacctccaagatcagagcctcatgttgcatcacctccaagatcagatcctgcagatgcatcacctccaggatcagaagaacaatgagggcttttctagcaacaatcagagctagcaattcaagaagtgtctcccacacaacaattagagactgcacaatcagagcctaaaaagcaagcggagggtgaaattgaagaggtgcctgaacaggcaatgcccaatcaaccaaagccatcgcaactagagcaatcgcaaccagaggaacctaagggtgccaatgtgccagtgatggtaaggacgcacaagcacaaagaaaaaagtgcgacgaagaaaaaatatatgttaacgacattccgcggaagggacaaagatatcatagatgttgattttgataacaaaaaattaaaagggttcaaacatacgattatctcaactccccggatgtgccacatgagtttcagaatggcaaaccattcatgtacgactggcaaccaacagaaggaccgtggcaattaaaaaggtggcatgaatggtacatcagggcaagcaccatcaaaggcattacatcatttacagttgccgtgcaggagaacatcttctggagtgggccatgcctattccaagtccatttctccgatatgcattccctcttccgtcggaagaggctggacaccaatttgatcggcatctggtgtctgtaagtgcatgacttgaacgtgttaataaatcgttatatctatttgcgtagctgatttggtcatccattgttgacagaatgaattatgtggaagccgaagtgatgagaaagcctgtcggctacctaaacccgtgcaggataagtaagtcgaaccacacctacacgctagacgagaagaagctaccggcgcacattaaggcgatgactcccaaagagaggaaagaatacataggacaaaggcatcaggaaaagattctcaatgtggctacttgcgtagctatagtgcttgaatctatgcaggacaaggagtgcgtttatgccccatatgcctttgagtaagttttcatatccactacgagtatatacatataatcacggctcaactaacaatttcattttcagcaaccattggatagtatttcttctctatccaaagtacaatgaagtcatcatcttggaatctctcgacaaagatagcaatacatacccggaaatgctacgaattattgatatataaattataccaggaaatgctaagaattattgatctgtaagttatatattctcatgacgtgtttttatctttgaggaatctaaattaattatatcttcaaacagtgcatttaaaaggtattaccagaaaggcagacaatggaaaaactcaagagaacgcatactcatccgcaataagtggccggtaagtacatttggatgccaaacagtgctacttaattttcataaatgcatgtgtgtatccatttaataaactaatataccttataattgatgttgaaagtgtcacaagcaaccgatgggaccgtactaggcggatattacatctgtgagtacctaagggttaatgggagatattgcgcgaattacgacgaggtaagtacaaactgccaatacacttgttaaattaatcgctagcttgtattattgcgaataattgtcacgtcccaaaacgactctaaaatacatcctctaaattatgcctagaataattaaaatccgtgtgaaagcctccaacaattaaaatgtgcaaagttaaaagtcaaataaggcttggaggatttttgtatatttcctaaaagcctaaaatgcgtaaataaattttagtggaattttcagagcacaaataataattattaagaaataaacaaagttaaaatgattttataaaaagaaaaactctaaaaagtcccctttccctccctctccctcttgggccggctcggcccatctccctccccctccgtctcctctccccgcgcgcgcgccgctgacgggcgggcccgcccgccaacctcgctgacgggtggggcccacccgtcatccccttcctcccgccgctcccgccgcctcgcccgcgccctagcgccgccgccgccgcgaatcccgccgcctcccgccgtccccgcgtgcaataaagagggggaaatcactccccgtgatcccctctccctttccccccatttttccctctctctctcgcgttcaaacgggcggatttgcccccgcaaatttcgccggcgccattgatggcggccggacctcccgcgcctattccttccccgccggccactctctcccccttccaaccctatttaaaccctccccgcacctcctccgtccgtttccgcctctcgccgcccttcctcctcgccggaatcgagctcgcgccgtcgctctctctctccgccgtcgccgccgagctccggtccaccaccgtcgtcgccccaaaccacctcccacctcggcgccgcctccttcggcttcgctgcatgctcgccgacctcgtccacccctccgtttcgctcgtcgaccgccggagcgccgccgtccccgtcgacccgagccgctccgccgccttcctccgctccggctgccttttcgtcgtcgccgtcgacctagggtgagccgtggaccgccgcctcgtttccctctttccctcccctctctcggccgccgctccgatgtgcccatggccgccgccgacgaccataggggcgcgggcgcgccgcctcccgccggccgcgccgacgtggccgccttcgggcgcaccgagcggctgccgcgtggggcccggccgtcagccgcccgcgcccttgggtgcggctgacgcgtgggacccacggcgccggccggtgtgagcccgagtgcacccggtccaccgtggaccgtgaggctgccgcgtgggccccactcccgtggacccggtccgcgcgccccttcccctcggctgacgcaataaacccttttaaaattaaaatttaaatgaagaaattcgcaaatattcatttaaagagcatataaacttcaaatggccataacttggccatttgaactcggaattggaccgttcaagtctctaatttttccttaagaagtcaagaacccatttttgtgctttgttcctgcttgttatatggagtttattagagtaaaggccttttcttttccgttggttgtgtagacgctgcagcttcggaagatccgctcttcgtggaagttgaagccgacgtttgggaaagcgagcaaggcaagtcacatcatccttgaacatattgaatcccagtttataaaattatgttgatttaaattattgcattatcgctttatttaaattcccgcgttatcactgttttatctagccatgcctatttacctttgttatgaccttattattgttattgttattatttccttgttcaccctagaataaacaaaaccccaactagtggacactctactcatggtaccactagtatgattttaggtagatgcttcgctggttaattaggcaacattaggtggttttacaactctagactttgggatattcatatcacctggacactatggaatggttggattattgtggaattggattcacacctccccctctattcaaaatcctcaaaatggttttaggctgggctcggggtgcatggttttgatagtagcacctcggccatataaggaccggtcttcgggcctctgttgcaaagcactaccgtacttccacatgtctagtgggtaaggcttagtttgtggctcagtctggttataaacaaaagtacacagatggagatggacgaagtcgggggtcgatggacatctctaggacaaatgaaggctacacgagctgtggcccggtagtcgagatgtcatggcacagggccggtgtcctgctgctaggggctcagtcctgcctacctgtcccgggggttccggccgtaggtggggttgggtcggtactcttgtctatggctaggatgggttggaaactatgtcacgtcttccgtctgtataccgtggtggtatgtggcacgtggttacacgtgaggaagatgtgtcttgtgggtaaagatgtacacctctgatcagagtataatctattcgaatagccgcgccctcggttatgggcaagccgagcaatgtacccaagttagcgttttaattcttaaaacctgcttaacaactaaaatgtggaatggttggcctgggttggcttgggacgagctgggacccagggtcgggttgccagttcggtctgaatcatcgtaggccttgggttaaggcaggttcgtgtgggttcacggccttgattaataatattgtatagctctggaatcgtgtttacaaaatagctttgagcaactaagtgtcttttaatgctgtttactgcaaaccctaaccctttatattataacccccttgtactcccttgcatttatcctgcacttgtgggtgtgtcttgttgagtacggtggttgtacttagtcttgctcaattttttccaaacccagaagaggagcccctggaagatgaaggctttggtgtttagctcgtgcctgccgtcaagcgcctgtggtcgtcgccctagtcttccgctgtttcccgtttgtctttgtgtgtgctgggccttcgccgcccatgtaataaattaactatttacgcttccgcttgataaactctgaaatgtatcaacttttggtgtaccttgcctcttgggacaaggaataatacacgcacgtaaggaacgcccgttgggttaattccggtcgtgacaataatttccttaatttgtcgtgatctggatgcagcttccaaaatttcccaagtttgaaagagagctcgatgataaatccatggagaacatacaacgggacatgtgctacttcatccactatgagtgcgcacatcagcttgggaggtttttcgacaaggacggagttttggacctgccggagaacgaatccctatctaactagagcaggagtttaatatagctatggtttgtcatgatctggatgcagcttgtatatgtcatcggtaggttttgtaagacattcaaatatttgtatatgtcgtcgatcgaattttgtcaacgtacatatataggtgcttcgaaattatatatgtatattattctgcttcatactccacgtgttgctctaaaatacgtgaaagataacatactctatcgatagctcgattagttatatcatccacgtgtgactctgaaatacacgaacaaacaaaagaaaaaaaatataatattgtttcaatttgttttacaaaaatattacatcttcacaggtaggccacatgtcagaagtcggacggttcctatcttcgctgtcgggccacgtgtcctttcccagaaccctttgggcatttttcctagcgggccaagtgtcaaaaaaaatcaataagccactagcgaagaaatatcttcgctggcggctgtcctaagactaccacaagcgaatatatttctttgctagcggctggcctatgtcctccgctagcgaagaaatatcttcgttggcggccgtcctaagactaccgccagtgaagatatgtctttgctagaagctgtgccttagtcggccgccagcgaatatatttatttgctggcggtagataactgctagtgaagatctacatcttcactggtctttactttgtggcggctgcaatttctgccagcgaaaacccaaaatggcttccacgaaagatggtttcatcgtaatgacggattaattaggcttaataaattcatttcgcagtttcctagcggaatctgtaatttgttttgttattagactatgtttaatatttcaaatgtgtgtcgatatatccgatgtgacaaccaaacccaaaaattttccccaactaaacaaggcctaactcaattgttgaattatatatacattggtacacagatactagctaatggacaagtagatgtcagatatttctgtctctatttaatttagattaatgaatggatatttgattatagagatagaataaatatttttaaaaattacccgtatatatagtttaaaaaagtggtctattactagaaagatgctttttgattattttttttcacaacatataacaaatgattcgtttcaataatctgaattgggcccaagtcagttagctgtgtttatttcctgaaattggggagaagtttagggaaagttggtagtttggaaaaaaaagttaggagtttatgtgagtaggaaaattttggatgtgatgtgatgtgatggaaagttgggagttcgggggaagtttggtatgaactaaacagggccttaaggcttcatcgaaatgcagcattctcaatttatagtaatagcaaaaatatagaattgaagtgccatcgcacttcacaaccaatggattgaaaaagatacagaaaaacatcagtaatcactaatacgagaaagattttcgcgtgcggtcaaaaccggttttcgtgtgggtgggccgcccgcacgcacccaagggtctgcaaatatcgcaatttttgtgtgcgggtgcttatgtcacctacacggaaaaacaaaaatccaaaaaaaaaaaaatttcaaaaaaataaaaaccctagaatcggcgctgccgccgcacctcccggccgctgcctcctcctcctcctcctcctcctcctcgtcggccgaggacatcgctcccaccctcattgtcatcgctggccgaggacaatgctcccgtcctcgttgtcatcggtggcggcctccgcgccgcccgccgccggatcctcactccggccggcctccacgctgcctgctgctggatccgcgctcccctccggccacaccgccaccgacgcccctcccctccgccggatctggggagggaaggaaggggaggggaggggaggggagccggatcctgcgcgtggggagggcggccggctgccggatccgtgcgggggttggccgccgcccgctggatcccgcgcctccactgccgccgcgtggtggaggccgcgcgtgccgtcgcctacgcccaccgctgtcgccgtcgccgcgcgccgccgtcgcctacgtctaccaccgccgtcggtaggagaggagaggagtgaggagaggataggccgcgcggagaggagaggagaggcgccgcgcgtagagagaggagtgaggagaaaaagagatagatagactcattttattgtgggtaagagggaaaagagggagtgggtatttttgcgtgcggccctcttgataggtccacactgaaaatagactcattttcgtgtgcggtccatttaagaggactacactgaaaataggctcattttcgtgtgaggtcctcttaaatggaccgcatgcgaaaatgagcccatttcccagatgcgactagttatggtctgtctgcaatctaaatggtccctgtataggaaaatcgtttttagtggtgaatgattgtttggatggagcacagtaaaaacacataaatcacaagagatatatacgccaatgattttttcttcaagatgttggaccttatgtgaatatttatccaaaatacctattttttcagtcggttcaatagaatttcataggattttttcagtcctttaatacaaaggaccacataagaaaaaaaaatccatggaattgaatccctccaaaccttcaaaccctttgttgcaaaggatccattaaaatttgaagattgtacctttatgaaatggacaagcacttattggtgagaagtatccatcctcaaggaaattcagaatagtgtgtacggaataaaattgcaatatttggtagaatatgtggatttaatatatattattccaataaaataaaatacatgcaacatatcatcattcacaagctaggaagtaagcctgcacgtcctgatcacctcattttatttgtgcattaaataacattatccaacacacactaatattttttatcatatcatctcgatctttgttcgtgcgtgcatcacattagacaaattatttatttatagtagtagctagcacatgcatgcattaagccacaagatttgcagcgtgctataaaccggtgttggcggtggaagcaaagtggagcgagtagttaggaggtgggtaacgctgatgtctccggcgatggtaagctgtcgaagataaggaagactgtatggacaaggctactgctagcttgatgggggtggagagacaagaaggaaggaggtctggcgggcctcgctggctgctttcaacactggcaagactaggtgacaaaggaggtgggggatcggggtgaaggatggacggagaagtgttggccatagcgaggaatcgaagggtgacggagagatagcgaggaatcgaagggtgacggagagttaaagttcaggggttgtacgaatttcaaagcatatttaacggtctaaaaaacgtaagatgtgtggtgagattttcaatttgttaattaactttgcaatattgtttcttgattttcaatagtcaacagtgaccgatcaaatttgcattaggccattcccaatgagagtttcatactcattaaatagggtggcatgtcaccatttttttatgatgtggcagggaattaatgacgtgagagaaataagtttcatgtagatggaactatgtctacactgtttctaatacaatttatctcttgcatgcactacttatgaaacaacaaaaataacactatgtattgtacgaactattttaatataatgaattaaatgccttgttatttatgtggcactcttagaagcataaaaatgatacctcccacgtggtcttatttggctgatacttactctccaaaaacaaaatatattggtccaattgaactgatatcaaaatatcgttttcctcattcctcaagaataaggttctcaaagatacaagtcatgtcttagtaaaatgcaatgttcatttggtcttgttacagtacttaactcgatcatagaattatatagtggcgtgcataaattagctaacgtcgacaagtagacatgaaacatgtccgtctaattaaattagctagccatgtagcaacagaccagtttcgatcggcttacaatttgaagattgtgcctttacgaaatggacaagatagcacttgtcggtgacaagcatccatcctcgaggaaatccacaatagtatacacggaattaataaaattttggatttgggagaatatatatctggcgatgaaatatatatatatatatatatatttattccaatccaataaaacaaaatacatacaacatatcacccagaagaaagtaagcctgcccgtcctgatcacctcactttatttgtgcattacattacattatccaacacacacacacacacataccccaatcttttatcatatcatttccatctttatttgtgcatgcacgtcacatgacattacttactttatttgtgcacgtactagtagtagctcgtgcatgaatccagtgaagtgatcagtgatcaaagtgaaaatggatcaaggtctggttaattaccagccgtccatcacagaacctgatccaggagaccaggctcattaccagccgtccatccggtcttcttgtcccagtacctgttccagaccatgatgcccccatagttgggcagcttgttgatgaactgcagcacgtcgtagtagagatccttgtgcgacacgtagccgtccctgtcagcctccggcgacgcgacgacgccgacgaggacgcggctctgcgggtacgccgccatccacttctccagctcctccctcctcgacgcgcaccgcccgtcgccgaacaccttgacgtggatccgcgagaagagccccgtggacagcgccgcctgcagccgctggtccgggaacacgcacctcgccgtcgccgtcagcatcaccccgagcctccccttgtagtccttgttgtgcgcgtacagccgccgcgccagctcgtcgtagtgctccgtggcgccctggtcgatgaagaagtcgatgccgtcgacgacggcgtcgccgaaggggcgggcgacgccggggcggccgccgccgaggaaggcgttccagaggtagtcctcgaggtcgacggccgcctgggaggtcggcagggagtactcgccgccctggccgccgatggcgaggaggacgaggatgcccctggactggcagtgcttgatgtcggggccgacggcggagacggtgtggccggagatgtccagcttgtaggtgcccgggatgtagccgaaggcgctgaggaaggagatgatgacggtggtgtagaggccggtgtcgcacgcctcacggagggacccctcgagctggtccgtgttccggccccagaacacgacggtgtcgccggtgctctggccggcggcgaggctggacgagagcagtaggaccagcagcggggcaaggcgtcgggacgccattgatcttgactactatacactacgggtcttagctagatggagtagttagctacctatcgattgtgatgcggagaatggggaggggtgtgtatgggtatatatagggatgtcgcgcgtgttctcagctggatcgtcgatgtttggacgtctcttcctagcttctcgcgcgccgccggcgacgtggcagcttgcgtggcgatcagacgatgagcagggaaggaaaccagcttcaccaggaagcaggatgggtggggagtggggacagctagcgctgtcgcgcgcgtgcaactacagttcgaatcaatggaaattaagcatttccaagattactaccgccatattattttaatatattattttaacatggggaaaactgcaaaaacctctcctaagtcacttgaagtttgacattccaccctataagttattttgttgcaaatatccacccacctattcaattttgttgcaaaaaccactctagtaaacacatgtttaatcgaatcaacgtgtttttataaaataggagtcatcaatatgttctttaccaaaactatatacttctagagtattcttgacactttttttaatgagattccataaataaaattgttacgaaagcttaaacattgtcatactgagttttgctatatgcaataaggaaaataagcctgatgcaatcacttgacaagattgatttggctagcttagcctgtggtaaacctacatcagcaataacgaacttattcggttaagcacgtgcgcattgggtggtttttgtaataaaacttagtagaggatgggtatttgcaacaaaatgacttatggggtggaatgtcaaacttcaagtgacctatgggatggtttttgcaattttccctttaatattttacattgttgatttttaaatacttgtttcaccgttctttttatttaaaattacaaaattatgatttattttattgtgagttattttagaactaaaaatactttaagcatgatttatatcatacgtatttgcacaaaattttaaataagacaattgatccaacgtgtgttcaaaagttaacgacaacatcaatagacaccactactttactatacttataatttaacccttaacgctgactagtctagtatgatgaactatgtttttgttttttagacgaacggcgctaggcgatacaatgtttcatatttcatattgagatagtaaaacaaaaggtaattaaccatacaacatttaacagttcttttttcaaaaaaaaaatcaaatctagatataataaatttaaagtgtaattacattgtatatatataattggtcaaatcatacgtggccaattcgctagctaccactactacagaaaatgttataggcgtcggtttgaaaaccctcatgtgtcagtttggaagccgggaactattggtcagcaccaatgactcaagtcatcattggtgccatttgcttaactgacacctatgggtattatattataggtgctagttctccacacaaaccgacacctatagtggtttcggggacgacgtggatgccttatataggtgccggcacctataatagttctgatgcataaaaaatatatttcctagagtaccgaatattaatttcctgaaaacatgtatagaaatcacagaatataacaaaaatcacacacatcctccacatttacatcgacattcacatcctccacattattgttattgttattgtttttgttataattattgttagtagtagtagtactactactacatcgacatggtagtctatctagcctatgttttctgaacttgagagatttatctaatattatttttactaattcttttaaattattttcattgacggtcgttatctatatggttgtgcaatcatctatatggttgtgcaatcactttcgtaccagttgtgtggaattgatctgtggaggtttgtaaaatcccgatttttgctcaagtttaaaacctattttgaatacatattttaatttataaattttatctcttatttgaatgttggtttggttccattctagatctcaaatcaatcatccaaagtccatctaaaagatcctagaataatgagttccaaagtccatttacaattacaacaacatctctaaaaaaatcaatctctgaaattcctataaattctaaaacattatttttccagttggctaccttttcttttccctaggccaacttattcccctctatctctttctccccggtccagacacccctaccctcttccctctgcaggatggcccatcccttccccctcctcccttggtccaattgacccggcccagctagtggagttgagcttgccctagaaaggcagctcactcgcccgtgtgaccgcactgccatccctgtcgttgtggctggctgccaaccacctaaccacgtcgcacaacacagagccattgtgccccatccccgcattgcaccacgccacacagtgccatgccgtgtcactctgcgatagattgtggacgtgcctccccgcctggccacctccaccttcctcctcatcaaacccgccaaccatgcgggccccaagccgaggacctcctcgccgccctatatgccacactatcgcaggcatcatcacgcggtcccacgccgacgccgtccaagctatagccacatgacacctcacctcgccccgtctttattagccttgacgtccacgccgtgtcaacgcccctgcgcctagtccactgtctcgccttctcttgctccagctaccgcggccgtgcgttcaagatgaaggggtgagctcgtactgtcgttgtccatgctcccttgtgccatcatgcctccttcctttaccccgaagccatcgcagctcctgcatccactagccctggctataaaagcctctataccttgccgtcttcctcctttcgcccttcccgtcgccgctgccaacttcacacatcaccagctagcccaagatgctcctggacaagcgccttaggtgcgctctgagtcacgctgccatacccgctcattgctcggttgaacgccatcgatgcgccatcccttcctgagccagctagccaccagcaccgccaccacctcctggcaaggcaacttgccacctctgccatcccaactaggttggcaccgcgctcagccaccccgcaccggatctgcaaccgcctgctcgctggtcgccctgaacctagggctccatcagcggagctgctactgtcgcccccccctgtttggaaagccaccagagctaccactattgactttgcctcgatccgggccgcagtcgcgccaggttgagcaccgcccgtgtgaccgcctcctccccgctaccccagtagcgacctcctcgctccaactgctcagctccgccgtcctccgcccttgtcgcgcctggatctctctcgctcgggcagggagagtgtgagcactgaggagaggagtgttgaaatcgaaaagaagagaggagaaaagaaaaggagaagaggcaatgataggtgggatccatggtctctcatcatgctgtacacagtaattgttctcctaatcccctccaatgtctctatgacatatgggtccagtttttataatttctaaataaacttccttttaatccttgagttacttatgagtgggacccattgttcccatccgacgcgcgctcagtccaccgttccagagtcactaacacgtgggcccattcatggggtccaccaccaggtccataacggtagaccttgtccacttaccgttctctgtgaacaagtgtgcacatagtctgcatgagccgggtcaatggtcgtcgggccccacacgctgacccgtgaaccatgagccctgtccaccacttaagggcaagtactataagcccttaagcacttgcccctagatgccatgtagactcatttcctgatgtggaagagggaaggaaggagagagtgaaggagccacctctcatgcaaggggtgacctctacacacttcaataaaaaagtgagagcattaaagttattggggtttgtgtgctagaggtaacttattgtatagattacctcttaattaatagaaaggtgatagagatgaaattagaagtgacaaccacctctattataaaacttgtcctaacagcaccaggtgctcggttgaccatgcgcatgcggcggctcctcgaagcctatgaaagtggaccccacaaggtatatccctccagaatattcttttccataatagaaactcttttccctttgtgcaaaaaatcaattaaacttcgaatattaatatcttgaaaacattagctctgttttactccgttctactttcacaatttttctaacaatgagatctacctaatggcaaccttattttgcattgttgtagcaaacttagtagcttttgtgttgatttactctatctcacgctaccggaagataatctagaagctgttcttgacaaggaagaaccaccgcaggaccaaggcaagccacctttgaccatgtttcctcctatatgtgcaaaataatgttttgttgtaaatatgcatgcttaggtcacacgttaaactgtttggcctcggtttgtgagagcaaccaatggaactacctagtagtagcacttatatattgtagggtattggagtatcaatccttgatagcccaacaaatgatgcgttggcgtcttaccctatgggtatgatcgctgaggtagcttgcttatccctactgtgattgtattgccgcataggaagcatggatttccaaccaaataatattcaatacctgatgttctatgtttgtgtgtttgtgaaataaatctagattgtgaactttgatccggctggaggaggggagccggctgttgttggcggtggcgttggacggaggaggggccagaggggaagggggaggagagccggcggccggagggaggggccggtgggggagggcggcagtgggtcggggtggtggcagggggatttttttttatttggtgaggttgttttctcaggcgggtgggtgtagctcttgcgaggctgcgtaagatatagtggcccgcctgcgtaatcatctatttttgcaggcctttaagtataggcggggtggagctccatctggtaaaatctttttggcccatgagcataaatcatttttctagtagtgctacatagagccatgaccgaactgcccaccactatctccatgcagccgaaacactcatgggctcttgaacataaccgaggcaaaaaggttctagaaggagaggatgagagagaagaaaaattcattcgtcccttgcacagaatctgcatgccgccattcaagggcactgagcctagacactctgcatgcgagtttaggaaattacaggatctcctagctaggcgacacatccaaggaagaaggaagtcagaagcactatcgatgtccatccatggaattggatataattttcacctacaggatcccactagggagggagagaggcacatcgacaatgtccattgagagatcgtaatgcatcaaagtgtcggcatgctgcacccaccgccatcgctttgtattatggtaggatgtgctcatgagcttgccactagctgctacctgcacaactcaatgcagttgtcgcacggctaatcaggatgtcgaggccccaaatcctgcggtgcctcatcgccttgctgaaatctcgatcgtcgcatcacgccaccctgctagtctgctaccttggacgctggcctctgagctcccattgagcagatttggctagatctggcctcgatggtcaccgccgtgtttgatagtgcgcctacaagtatgtgtatagtttcctcttcactaaacaacaatcatggcataaaatataagatattattgttttattaattaaaattaaaaaggtctattatatattgtcttcagtattttctttatgacgcagagggtgtaaaagattgcaatcttgtgtcaatttttatacatgtccttatgctctcttcatcctcaaatataatactttttagtatgtacaaatcatttataaaaagggatgttaagaaataatagtacccgggataagtatttgaaagtagaaattgttcgatgagcctgacgtcatcatcttcaatcccactattctatttcattagttgtttgcaaacaattgtttggaccttaagcggttatcaccaccattttgtctcactgtatagccatccacagtgagttccatccctcctttcttccttttctttgagagcatctccaatagaattagactcttcaaatacccatatagccagtttttcaactgatttgggtagtcaaactaggtgctcaccctttgaatcgcaaggtttaacaaacggaggaataggaaaaacacatgattctaaccggaatcaaagtgtaaaatagagcattgcaaacaaaggaaaaaacacaggaatgcctaaaacgtttgattggactataggaaaaacgcaggaatcagatgagagagatagacttaaaggaaattttcctaagtttcctccaaaatctacatgcaatgtgtcatttcataagaatttcatcggatttggaaagcttcaatcctttgaatcaaagggccaaataagaaaaatttctatagtatttgaatcctatgaaatatctacataaatcctttgattcaaaggggccctattaaatatctctaaaatgaggacccatatgtcaactctaccaccccttgttcttcctcctctttctccccctctccctcttatcctgctggggaatggggccctatccatgagctcctccctgacccactccctctgttgtggcaatgatgtctgtgcacgccactgctccgcgggggagggaaaggaggtagtgacagaggatccgtgcgcgcgaggtaggctcatgggtgtgacggaggatatctgtgcgagcgaggggggggggaggtgttggcgggaggcgatggcaactgtggatccgtgcatgcgaggcgggctcgggagtgcggcggcggatccgagcgtgcaaggcaacagcgatggcggttccccaccttgccggcctgtccttctccacaaccattcatgtgcggcaggctcggccagtgagccgttgagcctccctccctctctcactatcctctcgccccgccgccgcatcctctctccctcgctaatgcccagccactgcaccctccctccctcgctgcttagatgcagagaatgcgtggaaatgagcatgccaggtgtggggtccataattggtgagccagtttggtcagtgaagggaggagttggcaagccatcaagctttgccatccagatagagatgctgttggagtgagattttttttgctagaatcactaaaatttggcttagagagttatgatagatggagctggatgagtactaggccttttcatctcacatagttttctttcttgaatatatatttttgttgttcaggaactactcgctgtcaaatttgttgtttttttctctaagctagtgtacatcaaatttaattatgcttatttgtacatgaattctatattatgaaatactcctagttgtattttggctttacaactatttcaatcacatgtaagcactaagcagcgggtgcatacgcacctgaccgggtataaaaaaatcttggaccgttttcatctactctccattaggaaaagatgacaattctaagagggcgtaggggaaattagtacgaaagacaaattacctatatgtctcatatttaggccctttttgtttagacttataaaccaacttataagtcaaaaagtctaaacctaaacaaacaagtagctttttcgtttggcttttttaatgccataagccactctaacactattaaaccaaaagctaggttggagaagctttttttggcttatatgaggtagatgtatgtctccacaactaaacgtaggacattaaattcactgacttataaatcatataagccaataagctgacttaaaagtctaagccaataagtctaagcctaaacaaagaggaccttaataaggacggttgaggataaaatatggaaaacaaataaatggaggtgattgtttaattgatgggataagtagtactttataattataattatagttcttttataaaatttgaatgctaattaactgcaatcttcttatgagtatattgtactgctgcagcaagcaaagctgtcggaggaagcaacatgatgccaacatgcacctgtataatcgagaattactgtccataatgcgacccgatatggacgggtcggagtctcagagatgatgtgtatcgaccacagagcttgttcagtcatgttagctctaccctggaagatactgatctgatcaacgtggacgtttggactaattgaattaaatggtgaaaaggacatgcaaatcacattcaagcatgtgttgagaaatactggatggaaaatgaatgatgacacatatatcacattcatatattataatatacggagtatatgcgacaaatagagattgttgcatccttcacgcatggccgcacaatgtgtgataatgttgataactcgatattatattattatttggagacaacccaactaatctgcgtggggtcgaagcttatgatctcttgcagaagtgtgcacgctcctgcatatatgctacctttgccttatccaccagctcatggcacattggcatcaggggtagtacggttccaagctcactaattcagcgaaatgttcctggcgcctgaaaagtatgtatacagacagctactgaaataccgttaaatttccgtcatatttttatgactttagatcaaatcaagcttcgtgtgttattcacaccttatcttaattatttactctttctgtttcaaactgctcattgttctaagtttatcttaagccaaacatgcctatctttcactctaaatttttagaaatgtagttttaacaatatgattgtaaatcgcatgataatctaaaaaatataaatcttagtaggatgttaactacatgtgtttgtagaaattaatggcaaaaaaaatgaaatatttaatttaatacaaactaaattgataagtaatttgaaacggtagagagtattagttctctccacctctcccatgatgaaaagcatgagccgcgttcttcgcttcagccgctagatcctccatctctcctctaccttccccatcgtctcgcctccataaggcgagcaatacaagagacccgcaccccaccactttcgtgcgttccacttccatctagatactctagatgtgccacttcaaaaagcattagcgactctgaatcatttggttctgcttgtgttgaaagatataataggtatcatttggatcatgctctcgataaatgtttgaccattattgttagttccacttgtggagatatattggaatgagactggcgtggaacatttccctcaaaagtctgacattgtttcatctctcgtacggaactgtcaaaactagaggaaaaaaatggttcaataatttaaacggtgaaacacaatcgaaccacacttcgaatcattttgttctaacatttgaaaaaaatgaaatgccataaatataccactccagtattttgattcaacacaaatgaacattaaaattgattgtctgaaacataaaaaaaaaagagtatattgcacccacggtataacaacttggcgggtgtgtgagatatagtgcaagaacttaagaattaaacgttcgagtgcaacaacttgacaagtgagttctagtataagaacttgacaatttagtttttggtgcatcaatttaactaagcatatgctaggtgagtttttctcacgatatcaatatgacattacatagcaatcctacggatattacctaataatattgaatttaatctttaagaattatactgcacatctaatttacatcaactacctttaagaatttttgttttcttcaccttccaaaatctcaaccgaaattaaatttctacatccagtttaattgactttcaaatattagttattcggataaaaatataaatatgcttatatacaaatcgacgctagtatatcgtcaaaataagtacttaaaaattgaatatgtataaaaaaagtgctctaaataattaagttgccgcgtaacttcttaacttattgtatcaaaatcgtatatatcttgcaagttgttgtatttatgcgatcacttatacagttcttgtactaaattacacctacttgccaagttgttacactggaacaatcatttcttaagttcttgaaccaaattacacctacctgccaagttgatgcaccgtgggtgcaatttactctaaaaaaatcataaaaaatctacttctttctgctcgatctgtcgctattggtgctataggtgggtccttgcccgagatcctatgggaccgtcgtaccacgccaccattgaggttgccaaggccaagctcatcatgctgccatcgaggatgagaggctatcactactatgagaaaggttttttcgggcggtcaaaaccagttttcgcgtgtgggtgggcggcccacacacaccaggggtctgcaaaaatcgctattttttttgcgtgtggcgcacccgcacggaaaaacaaaaatccaataaaataaaattaaaaaaaaattgaaaacctagaatccggcggcgccaccgctcccggccaccatgtcctcgtcgtcgtcgtcctcctcctcctcctcctcctcatcgtcgtcatcggccgaggacgccgctcttgcccttgtggtcatggacagcagcctccgcgcatcccgtcgccggatccgccctcccaccggcctctgcgcccccctccggccacgctgctaacgcccctcccctccggaggggagccggatcctgcgggggaaggtggctgacctccggatccgtgcggggacagctgccgccgccggatccgtgctggggttggccgccgctcgctggatcccgcgtgtcgtcgccgtgccgccgctgccgctgcgctgcctatgcctgtcgtggccgtcgggactcaatcaggaggagaggagaggagaggacggggaaaaagagatagagaggagagaggagaggagaaaaagaggagaggagagaagaaaaggagatggagaggagagaggagaggagacgaagaggggaaaatttaaagtgggtaggagggaaagagagagtgggtatttttgtgtgcggctctcttaatatgtccgcatgcaaaaaataggcttattttcgtgtgcggttcatttaagaggaccgcatggaaaaatcaaatttttagtgctgtcctcttaaatgaaccgcacgtgaaaatgagcttagtttctcatacgcgaccagttatggtccgcctacaatctaaataggaaaatcatttttgtagtagtgtattcttgtcataagtgagagaagtatagacaaatagggagagtggagagagtgacagttcgagaggtttgaagagaggataagatagaatcaaggttgagtggtggagaaatcgtgggatgaggggtgtgtccgatatttgacctcgcgtcaaacacttgatttataactttttcagatatactggaaacttaaccatcaaataggaatcaaaatatattaatatctttgtaaaattatggaaaatatttaatatattatatattcatgtagaactaatggttatgtacatcgaatttaaatttatggtttcatcatgtgatagattaaaccatagtcatatcggattttcccttaacatacttttaattttgatcgtacacattaattagagaaacaaagtgacaaatttttcatgaaaggtagccgtgcctgtgctattagtcgtttagaggctatttagattgtagctgaagtaaattttggtaagttggcaatattatcaaaattttggcaggatttcttatgtatttacttaagtttgccaataaactaaaactaaatgtaagcacttttatgacaacttgccaaaaaatgatatggttgaaaaataacatcaatatgaatagcccattaatttctcctttatctcaatttgaattctaattttgtgaagatagaggtcgcaacacccatacactgttaattatttcttttgtataaaagaaagttttataatcatttttttcaccaaatgaacatttatactctctttagataagtccaattcgaatatttactatgtcctgtcccaaaataaagtgcatttttagtatactactttttttccctgtaaaatgtactttatcgggcttattcatggatggagataatatatatttttagatgatactccacgttttatatgaaatacggtagaaatgatgaattaatataagttaagatattaaaaaatgatgtggtacattgagctctaaaacgaaaaaaatatagatgatgtatcatgtttatatttaacatataataattgttaatgatgtgatatattgtacgttaaatatggtaggatctgtagtagctactcggttgtactcccttcgtttcataatataaaattttttagcatcgtctacattcatatagatactatctagatttattagtatctgtgaaaaggaggaagtagtttagtatagatcaggagatacttgtgggtgtcaaaagagtttccccgtaatatttgtcccgtacgtgtatgctgtgccaatacaagtataggtacatgcatctgctccttctgggcggctagctagtgcctagtagtacgtgcaacgtgcggtggtgttggatcgatcgaatcgtgcagggggctgtgtgttggtgaaggaaggttggccgttggggaaaaagacagacgaacgagctgatcctgccgccgcgcgcgtagcgctgccgcacgcgcgttcgtcagccgtcggccgggggtaggtagatggtcaaatgccagcgccgatggatcggacaaaactagcataatcacgcgtgtgcgccataattagcaaggaaaagtaattaagtacgtgtgcaagattaattagataagatcagcacgacatcgaccaaatctagttagtcttatcacatcatgtcaaagcttaatcgatcaccatatatatagcttgaaaagcgcgatggtacaaacattttattcgtctagaggattaaatatccctcaaagataatatactcctcttaatttatccttgctttgcactaccatattttacttgtatcggtgctcgtcatcatcgtgatagaatacagtggtggatcaaggaatttaactttagagtgaatcagatctattaattgccaccgttgcagcttaaactaggtttattcctacgttttattttggaataggtgaattaacgtgtactttgcctcaattttagctagctttgttccatgtcactattgcctgtcatatctcatatgtttcctctgggtcaggctgctgaaaatggggacgaccccactaccctgctactcctccagaacatctgcaactctctattgccttttttttttaataatggaatagaaatccatcctagcccttgctcaaactagttacactcaaaacgagtgcaccatttatcgccttactctgattactcctctctagataagataatgccaatgatcactatgttaagatgccttcttcttcccctaaaccatgtttctcctcgatctccactataccttcgcgttagctcagtctctgcctttgcaattgcatcaccactgtctagctccaccgtgtttcatcgatctccgccttttgcttgtcctctttccttttctggacttacccattgcccccatagctcttcctccgcctagttgctccaaagctcagcctccacccaccggtgccattatgcgccttcattctcgccatagtcacactagtgcagacagtgttgaagaggattttgttatgggagctcgtcatcgagagatatttgatagcagctgttttttttatggtcgggctcacaggtaggtcattggtccaaactgttcaaactgagtaaaatggctagtctaagattaaaactttgacattgacaaagaaaagaacttctatttcaatgtgcaatttactctttttttttagatttattgattgaaggggccgggcaatagtactaatttaattaaaatttatttatatttgaactttttagtgctgatttttgcatcctactcgggaggccttggcttgccagagtatgaaatagggatagtccccaaaactgaagttatatgttttgatttttgcgtattggatgctctctgatacatgtcaggtatatgtttacttaaaaaatgacttttgaaacacaccctcttttttttttctaagccaaattgaaagaaggcccgtatataaaaagagttgaaagatacgggccctcttttaatttcaaaaatgtgaaatccattttcgcaagcgtctaagaggttcgtctaagaattttcgtacccgaccagctccatctcctttagggagaatctagcctatgttctctgaactttgagagatttatctattattagtttaactaattaattaattcttcaaagttatttggattgtcggtagttatctatatggttgttcaatcgctttcgtgccggtgaatctgtgaaggtttgtaacgtcctgattttggctcaagtttaaaacctattttgaatacaaattctattttttaaattttatctcttatttgaattttggtttggtgccattaaagatctcaaatcaatcattcaaagtccatctaaaacatcctaaaataattagagttcctaagcccatttacaattacaacaacacccctaaaaaattcaatatctgaaattcctataaattctgaaacattattatttcagtgggctaccgtttcttttccctagcccaactccttcccctctatctctttctctcccagtctagacacccctatcctcttccctgtgggggaggggcgccgccaccaggagcacagggacgaccgccggcttgaatccgccgctgctcctaaccaccgcgctgcgcctgctcccacccgtctcactattgccacccaccccagcgggcacctgcgagtgagagaagaggaggtgagagggatgagaggaaaggagatgataaggatgaaataatgagtagaagctcatttcaaaaagataatgagtggaaatgagagatggagagaggataaggatggaaaattttgaagcgttggaggaggagaggaggtaacttagactttaggcggatccttaagaggcccacctgtgaaaatcgattttcgcgtgcagtcctcttaaggagccgtatgcgaaaatagggattgatttttgcagacgcgatcagttatggtccatctgcaactaaaagagggtctcgtccaaaaaaatcatttctgtagtagtgcgcgccgcgcgcactactccactgtgcccaatccaccgtctcgccttctcgtgctccagctgcagcggtcgcccatcaaagatgaaaggtgtgagctcacactgctactgtccctattcccttttgccaccatgcctcctcccttcgtcccgaagccattgcagctcctgcatctacttgctgcggctataaaagccttcgcggtctgccatcttcctcctttcgcccttcccatcaccgctgccaccttcaaacatcatcagccagcccgaggcgcatcgacgagcatcttgggtgcacacggagccgcgccgttggactcgtgcattgctcgaccaaacaccatcggctgccgtcccttcccgagctagctcgccactagcaccgccaccaccccaaacaaccgtgctaccgcctcctggccaggcagctcgctacctccgccgttgttaacgatcaaatttggtaatccaaggatcggagatgaagaagaaatcgagacggagttcgagatggagatagtctcagaaacagagtgaggatcggctggagtccgaatcggctgcgatcaggatcagcagagtccgagttggacggggttagccgattgaaccgaattcggcagtatgacatggtacacgttgtcgggttaggttgatgtacttcatgaggattgccacgcatgggtagagtcctaagaaggcaattgtatctattaattaggatacaaaccagggtgccaccgcgctcggccaagcctaaccaatataagcgccgcatccacgaccttctgctcgccggtcgccctatacgtagggctccatctgcagagataccactgccgcccctatcgccgcctgtctggaaagccagtagagccatcaccactgtctttgcctcgatccaggctgccattgcgctaggtcgagcaccgctcgcgtggccgcctactccccaccgccctatcagtgacctccgcactccaactcctttgctccaccgccctccgtcgtcgccgtgcgtagctctctctcactcgggtggggagagtgtgaggactgaggagaggatgagaaattgaaaagaagagaggagaaaagaaaaggagaagaggcactggttaggtggaccccacggtccctaatcaagctttacaagtaattgttctcctaatcccgtccgatgtctctatgacatgtgggtctagtctttataatttctaaataaacttccttttaggcagtggcataattccatggttgagtatttgtcatggtttgtggatgcatggatggttgccaaacatgcaagtaattttggttggtatcttggttgggcttcccaaattaaaaatatggtgaagaattgttgcgacaggcaaataggaccagcaattttgacacttctataattgagattaacacacatgttcagaaacattcagcttatactcaagtgcatagcaaagctgaggtagttactgttaaacctgaaacaaaagagctaatgaaccctgaactccggtcctttgctctgcttgtcagcaacaagattgaggaaaatgattttgtcttgctgcttccgaaacatctcacttccttaagattgatagctaagattgcattgatcatgcaatgggatctagctgaaagcgaaggacaaatttataaagcttttgggacagtacaagtgtgcaatataaatcaagagtggagctttgcaagttcagaagtttatttgatatcgacttgcggacaagtcgaatttcaaggaaagaggattgttagaatccacgggctatacatgggccgattcagctgctactctaacaaaagcccagttatgcctatgagattaatacaaaaaggcagcagcagcaagcttctaggatcgatcgatcaatcaaccaaggcggcgaaatgcggcggtgtcctggtggctaggcttggcaccttggcgatcttcttcctccctatcttcctcctaccttcaaccctctactttagtttctagaaacttccataacattgtattactttgtttcctcctctccttttccccaaaaacactttgttccagttgtttatcatagcaatcgagttgagagatttaggtctctaacaatagcatgcctctatagtaacaatgaacttagaaaaaacaaatatggtggtcacagcccacttcatgttagaataattgggctaggcccaatttataatattaaatctcaaaggcccataataaatattgaggataataataccacctcaggatttaagcgagaaatatctcaacctaaatagggagttattggaggctccctattgaccagttgaggtgggggtcggaatgccacacgcgcgcgcgcgcgcgtcgggccgggccgtgggcgtgggcgtggcgtggctggcgtcttgcgtgcgtcacgtcacgtcgctatccttttgcagccactaacccacgttcccacgattccctccgcaacagcgcgtccacgttctttctcctgatagataaggaggccgcgagtccgatccgagtttgtcgcttctttcccggtgttagtttctccttctccgcgcctgagttgctctcgcttgcccacttctgatctcttgcgcgcacgagagattggaaggagcagtgcctccgaaaccacaccttcgcctgagatctgcaccgggtaggcaggtgatcaggtttttagggagtgcctcccgcgcacgacagctcatcgccatgtctggagttgccgccgccactgctggcggaggtggtgcgccgccgccgacaggagctagatctggatctggagctggtgcgccaggaggtgccgtgaacgacaacaacaacggaggcaattctgcctcaccatccagcggagggccattctcggggtataatcttctcctcctgctactgttgttagcgctatcgctatactatgtgcgctatgttcttgttcctgttctacatgatgcctctagcatgttatcgcgttactggtatgttcctgttcctgacatttatgatgcgcatagtatgctactggttatgttaagatcaccttacactgcttatgtcatgatcattgtttcaatttcttggattaaaatatgccgattaatgactatatttccaacaatccaaaaacctgataggtcattttcggttgttggctttgctgctgcactgaaaccacatgcttttgatggttcaaactataagagatggaaagcacgtgcactattgtggttgacagcgatgcagtgcttctatgtttcacggggcaaacgaagtgaaccacctctttctcctgaggaagaggctaagttcgaggcttcggattgcctgttccgtggagcattgatcagtgtactcgctgacaacatagtggacgtgtacatgcacatgccttctgggaaggacatgtgggatgcacttgaggccaagttcggagtttctgacgccggcagtgagctgtatgtcatggagcagttctatgactacaagatggtcgatgaccgttctgtagtagaacaagctcatgagattcagatgctggctaaggaacttgagaacaacaactatgagttgccggacaagtttgtggcgggtggcattattgccaaactaccacattcttggtcggactttgccacttctctaaagcacaagagacaagagttcagtgttcctgatctcattggctctttgggtgttgaggagaaggcgagggcaaaggacgtccggggcaaaaaggttgagggaggttctagtgccaatatggtacagaagaagaaccctcatgcatcccacaacaacaagaaagtcaagcctgatgtcaaacccaaggctgcaaccaattttaagaagaaaggcaagggaaaggcaaagggagactgctttgtgtgtggcaagtctgggcattgggctaaggactgtcctgagcgcaaagacaggaagtctgccaacatgatcattagcgagggcggaggaacatcggggtacggtaaaatattacctacagttctctctgtttttcattcacctgattggtgggtggatactggtgctaatattcatgtatgtgctgacatttttctgttttcttcttatcaggtcgggagaggttcctccttgttgatgggaaacaggtcgcttgcggctgttcatggtgttggtacggtcgatctgaagtttacttcgggaaagaccgtgcagctgaagaacgtgcatcatgtcccttcaataaagaagaatctagttagcggctctgtattgtgtagagaaggttttagacttgtgtttgagtccaataaatgtgtcgtatctaaatatgggacttttgttggaaaaggttatgacaacggaggcttgttccgcttttctttgaatgacatgtgtaataatcataatgctgtgaaccatattagcgagaatgatgagtctaatgtgtggcattcgcgactctgtcatgtgaatttcgattgtatgacgcgcttagctaacatgagtttaattccaaaattcactttggtcaaaggttccaagtgccatacttgtgttcaatcgaaacaacctcgcaagcctcacaaggcatctaaggcgaggaatttggcacctctagaacttgttcattccgatttgtgcgaaatgaacgg

SEQ ID NO: 7849 - DNA, 3572 bp, Oryza sativa
cttgaaaggaaaatcaaacggttgaggtctgatagaggtggggagtatttttccaatgagtttgcatccttttgcgaagagtttggaattattcatgagatgacgcctccctattcaccccaatcaaatggggtggccgaaagaaaaaaccgtactctaactgagatggtgaatgccatgttagatactgcggggctttccaaggaatggtggggtgaggcagttttgactgcgtgtcatgtcctgaataaaattccaatgaagcataaggaagtaacaccattcgaggaatgggaatggaagaaattaaatctctcatacctacgaacatggggctgtttggccaaggtaaatgtacctatagccaaaaagcggaaacttggaccaaaaactgttgattgtgtgtttcttggttatgctatccacagtgtgggttatagattcttaatagcaaactccggagtacccgacatgcatgctggtacaatttttgagtccagagatgctacattctttgagaatgaatttcctatgaaatatacacctagcacttctagtaaagaaactgtcatgccccatgagcactttgcaccgatagaacacaatgatcaaatgcctgaggaaaatcctgaggaggacaacattgtagatactcgcaagagtaagagacaaagggttgcaaaatcctttggagatgactacattgtatacctcgtggatgacaccccaagaaccgtagaagaggcatattcatctcctgacgctgactactggaaggaagcagtacgcagtgaaatggactcgattatgtctaatggtacttgggaagtcgttgagcgtccatatgggtgcaagcccataggatgcaaatgggttttcaagaaaaagcttaggcctgatggtacaatcgaaaagtacaaggcaaggcttgtggccaagagttatacccaaaaggaaggcgaggacttctttgacacatactcaccagttgctcgcttgaccacgattcgagtactacttgctctggcagcctctcatggtcttctcgtccatcagatggacgttaagacagctttcctaaacggagagctggaggaggagatctatatggatcaaccagacgggtatgtactagaaggtcaggagggaatggtgtgtaaactattgaaatccttgtatggcctcaagcaagcacctaagcaatggcatgagaagtttgacaccacgcttacatctgcaggctttgttgtgaacgaagctgacaaatgtgtatactatcgctatggtgggggagaaggggtgatcttgtgcttatatgtcgatgacatactgatctttgggaccagccttaatgtgattgaggaggtcaaagactatctgtccaagagttttgaaatgaaggatttgggagaggctgatgttattcttaacatcaaactataaagaggagatgagggtgggattacacttgtgcaatcccactatgtggacaaggttttgagtcgctttggatatagtgactgcaagccagctcctactccttatgatcccagcgtgctattaaggaaaaaccgaagaatagcaagggatcaactgagatactctcaaatcattggttcattgatgtacttggctagcgcaacgaggcctgacatctcatttgctgtaagcaagctgagccggtttgtctcaaatccgggagatgatcattggcaggctctggaaagagtaatgcgctatctaaagggcactatgagctatggaattcactataccgggtatccaaaagtactagaagggtatagtgactcaaactggatatctgatgctgatgagataaaagccacaagtggatatgcgttcacacttggaggtggcgctgtttcctggaagtcttgcaagcagaccatcttaacgaggtcaacaatggaagcagaacttacagcactagatactgcgacagttgaggccgagtggcttcgtgaactcctgatggatttgccggtggttgaaaaaccagtgccagctatcctaatgaactgcgataatcaaacagtgattattaaagtgaacagttcaaaggacaacatgaagtcatctagacacatcaagagaagactgaaatctgtcagaaagcagaaaaactccggagtgatagcattggactatgtccaaacagctagaaatctggcagatcagtttatcaaggggctaccacgtaatgtgatagacagtgcatcgagggaaatgggcttgatacccacctaaggttgcataatagtggaaacctgtccattgtgatcggagatcccgtgaatttggatggtgaaacaaactattgtgtgactgagagaagagacccttgaaaagggctcattttcatgatgtgcttctcttctttcctgcatggtaggatggcttatgtcttaatgtgatccgagtggcttttccaagcagagatgttgacctgcagaacatctcagaaggaacacacctatatgagttcgactgctagtcacagtctatgaggtttgggcgatcactagatactcatgaaaggcctggagtttgacttatatgctccaaacagaggggatgcgaacggcagcccagtgccagtcaaggttctgagtgaaacctgatcacacaaaacttacaattcaaggcatagtccattgttcagttgtggtctgatgtagctcatttcctaggtggaagttcaacttaacagtctccaccaaaaccctggtatatcaaacaggcacaacattgagaacatttcttatgagccttgaaatttggtggggattgttagaataattgggctaggcccaatttataatattaaatctcaaaggcccataataaatgttgaggataataataccacctcaggatttaagcgagaaatatctcaacctaaatagggagttattggaggctccctgttgaccagttgaggtgggggtcggaatgctacacgcgcgcgcgcgcgccgggccggggcgtgggcgtgggcgagggcgtggcgtggctggctggcggcgtgcgtgcgtgcgtcacgtcgctatccttttgcagccactaacccacgttcccacgattccctccgcaacagcgcgtccacgttttttctcctgatagataaggaggccgcgagtccgatccgagtttgtcgcttctttcccggtgttagtttctccttctccgcgcctgagttgctctcgcttccccgcttctgatctcttgcgcgcacgagagattggaaggagcagtgcctccgaaaccacaccttcgcctgagatctgcaccgggtaggcgggtgatcaggtttttggggagtgcctcccgcgcacgactgctcatcgccatgtctggagttgccgccgccactgctggcggaggtggtgcgccgccgccgacaggagctggatctggatccggagctggtgcgccaggaggtgccgtgaacgacaacaacaacggaggcaattctgcctcaccatccagcggagggccattctcggggtataatcttctcctcctgctactggtggtagcgctatcgctat

SEQ ID NO: 7850 - DNA, 3133 bp, Oryza sativa
tgattaactctgcttatcaattgtccctttttgtcctgttttcacttattattaactctgcttatcaattatctttatttccagtcaggagtctgacaagatttttaaatccttcttattacttagctgtagttgattagttgtactatagatgtgtatttcatatttgactgtatatttttacttgtatattttcatatttgacattcttcttgccttactcaggaagatggtatgattattatatacacatttttatttttttttgtaaatcaatttaccctttttttttgttctcttttgtagattgtcaaggagatgaaagaaaatataatgaccaattcatcttttgattttcaaaagcctccagtatggttcttctttatttttttcttatgttttgttttaaaaatttgtaatcttcaatttataacttttttcaaaaaaaatatttgtatttgattcttttttctttgtttaattgcttttaaaggttaagaagaagaaggcccatgctaacacagagtcttcattcacaagattctctgtgaaatatttttctgaagttgtgtcctctttgtctgattatcaaaaatccattatcaagaaatttgagtttgatttcttgctgatgttcaatagtagttatgtgcctatcaagtttgccacttggattgccaataaagttgatgtcaggacatcagagattattgtgaaggaaaaaattattctagtcatagttgaatcagttcatgatattcttgggcttcctttaggtggaataccttttagcaaagattatgaacgtggcaggcaatgcatcctttctatgtttggtcagtctgtattgccttcagttaaattttttggtgatctactgattcagcagaaagatttgtctgaagatcaaataatcacatcttttcttattgtcgccttggcttgtttcttatgccccaactcttctttgactccaagtgtgaagtatttgactattttcgaggatgtttctcgcttgaaatactttgattggtcaaaaatttacctatgattggttgatgacttatataaaaaagtttcagaagaacaccactttcggaggctgcttgttttattgggctgtaagttttatttcacttctttagttttttttgcaatgcatttatattttttttattttaggttttgtatcttgacaatgttgattttggctcaagaaatgttgaccaaagttgtcctcgtatttctgtttggaaagatgacatgatatcaacattctctgaattagacaaaattgatgagaacacttttggattaagacctctgaaagatttccaggacacttgctatttcaaggtatgtacttctgtcttgtaatgtattttttttcaatgaagtttgttgattgtttttatatttttttagcgtgattcaactcaatctagatcagtgataattcaagacaaacttgattcagctattggtagtatgcttccagattttctcaagcatgaaatctctgaaatgttgagttctcattgcttcagtcatcatttagttgacagtgaatcatgtgaagatttggttgtttctattttgtcgctgattgctaaagcaagtggaagtgatgctgtacaagatcagaatgaatctgatattttacattctcaagttaacactgaagctggcccaagtaattttcaacctgcaagtccaaaagacatacaatttgatgttcctcctataaattgtagtaagtttagtttgcttactcttatttcattccatttttcttataatttttttcaatattaattttttgtttttttatgattttttatatttataggctcccttcgctctgctcctaatattagaagtttaaggaatgatgaaccatttgataagtctgcattgaagtctattgaaaaggattgcccatcacttgatagaattgctggtatgtttatgaactgttttgtacttttaaactatatttctttttattaaatatgtactcttttttttcatttttataatagctttgtatggttcttctgtgaattgtgatgatggcaacaataatgagtcaatccacatcaacgatataactgtaagttttttttttaattttttttttacaatgttagactgattgaagttttttgttttagggaaatggcatgaattgtgatatatctgatccttccaataaatcaaatgttctattgtcatcaatgaaccgtggagatgtaatccttctttttatctatttttctcattttgatttgttttatttgtaccaacaaaatttttttctatattttattataggtggttattaatggttctggtaatggtattgctcctagttttgctgctagtaatgtactaactacttttcatttaattttctgtttgttcaatttttcattttaatttattatatgtctatgtattatcaggtcaacctgttgctactcctgatgttggttatcttaggaacataaacaatgatatgaatcaatctaatgcaggtgtttttttgcccattatcaattttaaaattaattcctattttttaaaagtttgtatttattagttcttttactttaataattttgctaggatcttctgttgctgcttttagtcttgtgaagaatgtggcaaacaagtttaggtccagattaactcagttaaattcaagagcagctatatttggtgaagataggccttcttttaggttgttagattctgatgatgatgtcagtgattgtgataaggacaacgaattaggtgtcaatgcattgatgcaacatgttctcaggtactacactattttttcctgttttaatttatatgtttaaaatagaattctttttgcattgatgcaacatcaatttttttgtaccacaacattatttttagttttgtagggctttatctattttcattctgttgaggacactccaattgagataattcgtgggtatgaaaatgttggtactaaagaaagaacaaattgtcaaaatcccaacaagaggttatttcaagatttaactgtaagtttaactcttagacattttcttaatgtattgtttaactcattcccattacatacagttcatgatgt

SEQ ID NO: 7851 - DNA, 10891 bp, Oryza sativa
ggctatcccatactagcacatgtggttgcactgtatacgaaatgaactgacattgagtgaagtccttaggtcggtttgggcacactctccccctatcggtacacaactaatcaccatatgtgcaccacttgaggcccaaacctaaaatccatgtttttccaccattttatttatcaaaatcacaagtattaaagttctgtccagattaattaaaaatttattttcatgtttgtaatgagcccataatgacaaggaagacaattctaagcatggctaagctttatatagtaacctagtgtcaccaaaagtcatatataaagtggtatagtcatattgttcctaaggttaggagtgagggatatggatatatgtggggtcaaggtgaatgcaaacaataggagtttgtccaacaagtttaacaaaattttaatttattagtgtacaatcgacatgcaagatttgcaaacattttcaataacctccaaaacataggttcaaagtgatcaaagagagggaggtgggacttgccttgaatcaggaaaatatcagcacctaaatcacttcttcaccgattaagcaatcatctatacaaagtacacgttatgcaattaaacaccgaaatatgcgaaaaatccaaaatgctctaaaatggatgatttgtgcacagcgaataggtactggtctaaaatgaatttaggtgaaagaatttctattttatctcatttcatttgagaattatgaattttagaagtttcatcggtatagcgtaggatttacttaggtactattgtgaaatgctgttataaggtgattcttattaagtttatgtttgctggggtgaagatatgtgttttctaagactaacacatttggtttcataatttttagagttaatatgaattctttatgtattttacaaattataacgtgttataggtgtatagtgttctataggttcatggctttagaggtttaggtctagaacttgcctcatctagctagtgatgtataaaatgagtattttagttaactaatctaaccttagttcataggcttatggtctttattatcatggttcatattttataaactaggggagctctagtccatgttagcaatttattatatcaacctagaaattattacataagctaagtgccttaagttttggtggatgggaatggaactatgcattcactggtctaacaagttttatttgggtttcattatagctagagtgtatttctatgtacatttatatatatacatattgctcaatcgatactatgtgattagctcctatcctataaatttaaagtttagagctataacctgtacagaaggttccatattttattttactatgttgaagcccactgtttgctggttctatagatatttggttcacttcatttagactaaagatgaattttctacaaattttacattttaaggttgctctatgatggttattacttacataagtaagtatataattttattttataacttggaagtatatgttttggtgattatacagaacttgggtttattcaaaaaggatctaagatgagttttatataaacttctaaagttcatcttatgccaaactagttattttaaagataatagttttagaggcatttgatgtaaagtgtttatatgttttattttaatttatttttagagaacatgttggtggatctgtagaaactaagtttgctctaaaatgagttgaaatgaattttgtatgcattttataaatttgtgcgtgctttatgtgtgatttaacttggataaattttagaggctaaatttgtactgtgagtgcaagtttttattccataacatcaaatttcccaatttggtgagttcacagaaatttgaatcatcttaaaatgagctatatttaattttatatggattttacaagttttagttactgttcttttataattccagattttgtttccaaggggtccactgtcagtgagagatcaatatacaaaaagatccctgaggtttctaagaatcaacccgcagacctaggctcatatgtcagtgaattgaaaagttgcacattaaaccttatagttgtttaaattctcgaaacaaggtccctgacttcttttctcacgcagagaggcagaacagccatggctgagctcgatctcaagcttgccagcggcaaacggtggctcgtttgagggtgcgaccaaaagacaaaatgaagatcatgctattgcgattccattcctcttcttttcttggtcagtggacatcggagtaacgccggcggcgagtccgagcggcggctgtgcttaggctgctactgcatgttgagttggtgctcaattctaagtgaatgaaatgcatgaatgcaatcctatgggctcaagggtgctcaccgaaccttgaacgaggcgccggaaagtctggacagcggcagcggagaagaagatggtccggcgacggtgtagagctccgggaagacggcaacggctcgatccactcatcgaattgacatgcatgtgttttcatggggttagtgaggtcccagggatggtgtatacgcgaagaatcggacaatggctcaccggaggaggcggaatcgacaatggcgacggcgaccggaggtggagaagacggtggacgatctccacactcgtagcaccattcttcaagattcttgaggggaaatggagaggaggttgaggtgaagctggtggcgtggtggctcgctccggcttgatctagattgatggcaacggcgacgatgtcgctgcggcggtgcgcagagcgcgctccagagctccggtgtgcacggcagcgttcccgccgattggctgcaccagagaggatgaaatcaaaaggagaaatattcggcatggtgaggagagtatggaacgcaagagaagaggaaacaaccgcggctcatcaacgattgcggccattgtcttcttcgtggccggcgatggagaaccagtggagaagagcagcgaggatgctctccctcggatggatcggcactggaatggtgggtgaagagtggcgacgcgtctgggagaggcagaaatggagctcggcgtttttagggcgtcgacacgtcgtggccacgcgtcgcgcggcgtccagagccggtcggcgctcgatctctccctctcagtgtttctcggtcggctagggaagttgcacagaggaagggcaagccggagggactgacaagggggcccaggtcgaagtaaactaggtggaagagagatgtgtaggcagagacatgggtgagcttggtttttggacgaatttccggaattattttctcctctaattttgtagcttcaatacttaatgtgttgatcagattaactagtgttgattttactggaggtaggtgtatgtacctagtttccattttctttggttgcactcaaaaattatggatagattactcacagaaattagaggaatatgggttctttggaaactagttcgaatttttaggagacctaaatagagaagataaattctggaaaatttatttttattcattataaatgacctagtatttgaataaattattttacttatacacttttatgcagttaaatgcacttttagacaaagtatggttttagccgattaagaactacagttaatctagtttttattagtttgactgatttatttgaggtaccaaatttagttattaaatcataccaaaattacagtgagttgcatgtgttgattagagcctacatgaattttcccatggttttatcttgcacgaattattttagataattcgcaagacttatgtcttatatatgtttccctttcctaaatgcatgtaaatgtttataaaagttatatttggactctcattaacctgaggtgatgttgatatgttagaattacaatttacattacacaggtcataagctccttacctattatgcacaagtttactttagtattaaattaagagaatgcttatagagatgattaagatagaatataccctatatgatataatttatttggtcacttccatgttcatgactagtcttcagatggatgaccaaaatagttttgtggggcttgacattggccttgttgatatattttaaggtgtatggtttctattttaacttcctctagctagcactaggccctaatggtttagttgtttatctagatcttagttaatattcatgagacctattatgaaatgcaaatcgaaaatccaaatgcaatccaaatccaaatgcatatgaaggactcaagtcaaacatgtctatgagagtatgcatgcttacacataaatttatatttttgtcctaggttagagatgcaaaggttttaatttgttttaaaattttatcatgcaagagttagatcaacttcacctaggtttaaaatggaaatttttggtttacaaaattgaagaactttcctttcaactagttttgatagaaattccttaatcctagaattcgggtatgttacaccaacatgctacctgatcggcatttttggcaacagccatgctatgcctcgcaccatccatccatcccaaaagagaagacacaaagacaatatcaaaatccgatagcaatagagctgaaaggcattgtcgctgccaaggaacccggcttgcttgtactccctatcacctatatagtccatggcaagctctctccatcctccattgtcaacgtcatcatctccatcctcttccttctccaaagaaaacaaagggcgtgccaccgaagtggaagaagtagagggcaagaagatgggggattgagcccagagcgacggcgatgtgggggaggtcgacataaatggtggttgcacggacattcaccagcatgagggggaagggggacagacgagcatgaggggaacaagggagagagagatatagacttggggggagggggggatgagctttacgaaggtccagaggataaggcaatgtgtgtgtggtggcctgatactctgatctgttgaatggatttcgtcattaatttatcccgttaggacaggacaccgttgcgtagattttctgttttttaatgtgcttgatttttttgcttcctaagcttttcttttgcagactgagttgatcgttgagccagagaagttcacacctcagagctgtttaaagcttcagacgattaacaaggaggaaaaactcgcaaaacaagatctggtatgtttctttttttttctctatattgttccttcttttcatgaattggtaggtttttgttgcattagctcacactaaaatgtcttagactatacatatttattgttttagtacatatgcacagagaatctctgacattagttcatttttttctatctcctagctcttcttcccaattgtttgggacgggcactaggtgttgttatgcatgaatattcttcatgaccagatcaattatttcgacccaaaatgcaatgactcaaaatggttccagtactctcagaacctggtaactatgtcagcacgttccattttattatgttcaattgtttcagcacaacatacatttgtatctcgcaactcattaactaatgttcctgcatttgtcaaagcatagtaactatgcatgttccatcttgttttctacaactttttcaacacaacatatattcttgttcgcaatccatgagctaatgtttcaacattttccttatgtaatgtagctgattaacttctccaaggttgcgcttgatgccaaaattgcaataaaagatataacaaagtttcagaaccactccaccacagtacccactacagtccaatgcgtaaattgcttttaaattacttgtttcaccttttttttcattatactgtttttcctatctcatcaccttgtgccatcacttatttttttctcctaggtttgattgtggctttttctgcatgagatacatgaacaattgggatggaacaaagatggactattttgatgacagtacgtcagtaccatgaacatctacaggaagatcatgacttacctgttagccaattcacatttggcgacaaccgacttcagacaactccctccaaagcagttagggattagtctggcctcccacctcctcaatttatccgataactttcgcataacttttgtctagtctttttgtttgatgatattttggttatcctatacatatgcaaggaatatttgtgttggccaaagcaagaaacaagggattatctatgatcactaaatacatgtgaagctagcttgatgcatgggccatgcaaatgtgtggatgtatcagtctggccaaccatatgactcatgtactcaactatatatgtgtgctaaatatatacatatgcatgaaccagccaacaagagagtggagttgcatatatatatatatatatatgtgcgattcatgtgcttgcgcttgtggtcgtttacttagcaaatacgtatacgtataatagatgatctttcatggacttaaagaagcagcaagctgggactagctctgggctgcatatgggctggtgccagtagttgcgctgctcgtgtgtatgtgcagccggatattcacgccaacgggagtgagctactgctgtggggataacgtcggatgactcattcttatctggatgattcaaatgaaggcaatccacagcaattgaacccagaggcatcgaatcgatctgacgcgcggtcgtagcggcgccagagaatgcgcgtctacccgttaggccaccctatgcctataaaacccatcgaaagcaagccaggccaaggggagaaacacacatccatccattgacgagcaacccttcatccgcattcattcatagcaatattcacacacattcctcacacattcaacgacacagccatcgagcaattcactcaccatcaacacacacatatgcagagatcgatatcaaaagcagctcttctattcctcatctgatcgatttgcacaagcggcgcagacgcagcctcatcggagtagccaggcgggaccagctcgacgggaggagacctcaccgacaacaagaggcagcatcagatcatgggcatcaacaacctctgtaccatgggtaatgatcctgtggctttcttattgatttttctttttcagttcatgcatgcatgagatggcgatggtgatgagatgctggagcactgctagttggcgcccgcacgccgtcgtcgagtttgccaagtctcatggaagtgtcatttgtgggaccaggaggcaagccgccgtttttctacgtcgtcatgaccggccgaatgacctcgtcgcgctacctcgccggagcatgttgtcacggcatcgtgaatgtcgtcgagtcgtgcccgactgaggaggtctcgtcggagtcgtcggaaacgtcgccaagtctcccgcgtctacatcaaccaaacacatcattgggcgatggagattgtcgcactgccctcggagccatggtgctgccctcgtcggagtcgccgtgccaatcatctgatcgacatcatccagtcgagtcgctggtgatgacactactcgttgctgtgatctcatcgccgacgtccgccggccatcttcggtggtgttaccatcttcctcacactcgtcgttgagccgcgtgacgagaatgccaatcgaagcgccgctagctgctcggtgcccgcatcgtcacgctggggttgctaagccgttcgtgatgctgtgaagccatcccttcatcacaccggagcaccatcgcttggtgcccgcacaccgtcgtcaagttcatctgcgatgctttcacctcgtcaagccagagtcatcgtgccgtccgtccgtgtctccttttatctatagtaacatgatgagatgccatctgtctacaacgcttccacttcgtcatggcgagatcgatgctgtccgtccatgatgcactctctcttcatcacgccaagatgagatgttgtccgtccgtgattctctccctcttcatcgagatcaatatgccgccgcttgtttgtgtattggagcgtcgctcgtctatatcaacatgaagaaagaatagtgccgtctgtgatgccaatgtaccgttcgtgttagatctacaccaaccaatgtcctcggctattccgccgatgaggcatttacttcttccaaggtcgccgttactatcggcacactcatagagccccttttgcaggctcgtcatcatatcaaccggatcaatagtagattcatcatccgaaggaggtgccaaagccacgtttgttcggttattgtctgcaccaacttcttcatcaacatcttcgttacaagtccctgttgtataagggacatgacgagtcaggaggtgcttagccatggatatccggctgccatctacaccaactgtcatcgtcaactctttgttactttgatcccatcaagtcaggaggtgcccagccatggatattcggctgttgtgtacaccaactgacttgaccaactcctcttccctttaacaccatcctgatgtcgttgctgatccaagcgacacgagatctatgcatgttgaagatcaatccatctactccaccacgttgctcaagactgatgaggcggagcgacgagggtgggcggagcctatatgaaggctacatcaccaacaccggcgcacggaccgatgaggccgcggatgcgttgccggcgcctagatatatatccacaatcttcaccaacattcatcgtgcatggagaacgtgaagcgaagacgacgagacgaccacatgcagcttaatcggaggtgctctgtaggcctaaacctgtggcagtaattaactaggagtctttcgagaccccaggaattagaagaccacttatccaagtttagatttgtccaacgacaggctatggagcgcacatacatatatacatatatattacattgggaatttgtatttatgatccttgagattaataaagcacatgttccctatgttttctgtttattttgtgtccttagttacactggcacgctctcgcatatcgttaccgtttgttatttttttttgtcctaaacacttttttgtgggaaagaacccaaattatgtgtgctcattttactttgaatggcattttttggaatgtacttatttattatggatggtagttggaaaagttgtgcacataaagagttttgagacttatccaatctgtccattctcctttgcacataaagagttttgagacttaaccaatctatccgcttcactgacatcgttagtcaaacacggaggtacaacagcaaagcacggtgccagccgcacgcaacaactgcctccatgacagtcaccacattctcaaccaggagcaaaccgttatttctctgccaatcactatttgtcaaggcatgcggtgttagtgtatctgtataagtggatgtatttaatacaaagattgattctctagttaattctgcatgtcaaaagataggagtcaatgcttaagacacctatacaatgttatggcaaggttttagattatgataaatcactgtcggagtaccctttacactgaacttaattattgagattcgttatcgagaaagagccggacagtgaatattatctatttaaaactgatgttaatttcctttatttatatatgtctataacattgtgttttgctgcatgccaatgacaatcgatcaaaaatgcaatgttagtgatggattattgtactgtactattccattacatccagatatttaagatgttggaatcattgcaccccatgatgcggtttttcttggatttcatcttctacaatattcaaaaggtgttgatgcatgttactagactgcatcgtgaagagttgagctttaatacaacttttattggccagaacaagatttttcttcatggccctacagtgtcatttgatgcaagcccatgtgctagggattatacaagtctttacactatatttcctgtaaggtttgggccaatgtatttactgcatttcgaatatctccttgaattcttaaggacatgtccttatggggtgaactctagagattaagcaatagttgtgtttgttacatatcatcctagtattgaatcatatgttgacaggatgaaacaactgatgattttacacaatttgctaaatgaacaccctagacatcatacggctaatgtagttgctctggaaggatatacttgtagatccaaggagttgtccagaactcaataacgttaccaaccgaacagggttccgtcaacatggttgaattccttgcatattgatgatgcaagaggttgtctgcattttgctaataactttttgaagcatgcaaaaaatatggttcatataattcttactacattattctttcactggtactgtgtttttctctaaatagtttcaagaagaacaaaacgaggtagcattttctctacacatggcaaactttttatcaacgatattacaaaggcttgctcgacttgctcaacgcaaccaaaacaagccatatatcattgacttgtaagtggatctcaagtcttttccaatcgagttcaatctcaaatctctcaatcaagttcaaaagatggagtgtgattatttctgtaggctttcaaactgaatgacggacgtaaggacgggaaattaggtgcaactatgctaacttgatcagaaattgacttatcagaatatcattatattcttcttaccatcattgcattcttctcttgatctgtaggaaacaatctggaggtatttcagttggaaagttgtgaatgaatgttcttgtatctgttgttgctagttgttctggcctcatggagatatgtatggtatcaatctggggacatcctctctatttctttgtccttgttgagacgatgaccaatgttgt

SEQ ID NO: 7852 - DNA, 70087 bp, Oryza sativa
ttgaccttgttacttgattttatttaccctgtctactaacttccgggcatttctacactgttttgacaattctttaatgattatgattagtatatcaagtattattcttactgtttattttaacttttcccatttatatatgttatttgctatcattgttcatttgataaagttttctactgatatgaattttttttaaagacgttcatgtgtaaaacatatcctttaattgcattttactgcatttgtgttacttcaatgcttcatctaattttattttttttaaattatcgttacagaattccccagatatccaatttcttggtgaatcaaaatttgctgactgttgtaagaaactttgttctaaatctgatgaaatttacaattcatccaataatttgtctacaagcacacaagatttcaattccactggtggcaagatacctatacatggccctaggagagttttaattcttgcaagacatgccacatatccatttgtgactgagatacgtcgatttccaataactgatgaagaaatctgttattacattgttttttgtcgtcttgctgatagttccaaatggcagaggtattaatctgatttttatttgtttcctattttttgttacatatgtttatatattttttaaaaaattttgtaattatatttttttcttcagttatgatgctgttgatatagatggtgtgaaggaaaaagtatcttagtttggtcattctctcaagaaaggtggttttgtctccacttttgttatgtcagttttttgtcgagtcttgtttcataatgatcatccctcaagatctaagaagaattactttttcccatctattgttgtaagttatttacttctttttatttttgttaaaatttgaaataaatatattcaatacattttttaaattttgtgatttaaatgtaggaaaaattgccatctaatatgtcttctacaagtgttatggagaaacttgaaaaatcttttgttggagctgggaaagctaggaaattacacttgtgtgatatggtaaggtgttttacttgatttgcttgttggtttttccctgttcatatcaacttttttttttgctcctgtccatgtattgctttgcatagctttctgtttttttattttatgtcccttaaatctaccttttatgctgtaatttgcatattcatgttcatcttcttttagattatactttaatgaattgcatagttaccttgattgatttatggcattttgcaaggaaatatgtgtcttttcgaaatttatgtttgtcaaactttcaagtcaaaaaatatatgaatattattattcatagtgtttatgcctgctgaactttctttatcattgcacatatgaagtttcatgtttattaaacttatagtttgtgatttttgcagcttcattttccagtcaacttcaatcatcattggtttctgtttgttgttgacatcaaggatagaatgcttgtaattttggattcattgcataatgagggtgatgagtattttcgacctattctgtctcagcttgtaagatcatatcatttctacttgtttattatttaattgttgcttaatttttgaggccatatatttctttttttgttattatattccttttttatgtttaatctaattaatttgtaccttgaaaatgtgaattcgtgatgtcgacctgtgactgtatatatgcatgtctgaatttttgatatttcttcaaattattcttttacatgatcatgatctttaatttttttcagttcttggtatgccatggtattagcttgccacttatatatttacttgctgaacatttcttgtgttgatctatgatgcatcatcaaacaatttttttgtttaactttttttttaatttttaaatttggtattcagatagccaatttacaaattgcttgggataaatttgtttgcgtacctatggattttcaaaggttccagattgtttttcctccagtacctcgtcaagatttcaggttataatctttattcttcatttttttattttagttatcttttttttgtttgatatttttaattgttctttttttctgcacatttttttgttcagctgtgattctagaatttatgtgatgaaattcaccgaactttggtcacctaggattatattatccactgtgctttcaaatgaaaacatcaagaatattcgtgtccaatatgccaatcaaatattctttcatccaaagaatagaatgctgcaaactgagattgaagatgttgttctcaattggtttgatcaagtaagttttgcaactaatatttttccctttttatcaaatttatttggtctatgtattattgtcacgcccggaaattcactagtaatttccgaacttatttgtgcatgaaatcctcgtccagaaatcagccgaggtacacaaattgacaatttaatatacagattcatcaaattaactaaaacgataaatacttacttaagaggcactaagtcctcaccaagaagaaaactgcagcggaaaataaaatctagcgaagctccggctccactcccacaggtagctcaactggggtataagccaaacgtcttctccttctgaattctttttcttcaactgaggttgattgattattgtaagaatgagcatatgacatactcaacaagccacacagcaaatatgcaagtgcacaaggataccaaaggatggcataatataggctcatttgcaaaagcagcgtttagcaaaatatttaagagaaataaaacagtagagtagttaatcagaaattttaatcaacactgaacagcacacccatgctgcacaggcccgaccatcctgaacaaccatacccggctgtacagatctaatctccaaaccaggagctaagcaaattattaccagttataacatcaataattattgtgagaggtgtgagactaatcacgaaaaacattgctcaacccgcccataaccgcgggcacggctattcgaatagttttactctggccagaggtgtaccactgtacccacaagacacagcctcaacatcatgtctaacatgcgtcgcgatactggaaagtacccgaatagaggctgtgacaataccctctgcacaacacaactcaccacagtgcaccattcctggatcataatcacccccttataaaacaaggcatggactccccagcgacccccgtgggcttatctccgccacttctcagtctggtgctccgcaatgaaccatgctatacaaaaggtaaagccgttgcccacgctggcttgtggttggcacggttaatgtttcacaacagtagctcgcgaaccggtccttaattgtcatgagcacgactctcaaaaccatgtgctcacaacccaccattattaagttttagttggcaagtaattaattaaccaatcacgattgaccatcgtgaactatcattaagccatcattaaataatagtgagtcataagttatcccaatagtgtgctaatgtttctaagcatggctaagcaatcatatctaatatctagctgaaccaatatatatagctcaactagtcaagttataataacccaaggtatcaaggaataaagtaatcaatgcaaacaggccataacaaaggaatagattcacaccacccagtgacattcgaaaataaatgcacagttgaaataaatagagaatttaaatatatgatcaacatgctcaaaggaatgtgtttaggatctgtgtgacttgccttgtaataatcggtcttcaattaatcttcttgaatactccggcgcactcgcgaaccttcgcaacgacggaaacgacaagctaacacgcaaaacgaagaaaaagactaataaaaaccaaataaacaatacatataaagtaaacaaacatgtagattataattttagatgaattatgagacttgaacggcctcattctgatttcatatgaatttattatgaattttacaagatttaattccaattaaacctattaaacggagactattccaaattaattaaatcatttacaaatgatttataacggagataaaagattaaagcaacctctggaaaagattggatcatatttggtagatgacatatattaaaaagaaataatatgccactgaaaagaggagaggatttatattgattttggacagttgagattaaccttgaccgaatcgactaagatcggatggcttggattgatctggcaagcgagcctcacgagataccgactcaacgagtcaactccacgtgacatgagatcacctaaatgatcaaccgaaaccggcgaacagaaccggcggctctgaacggctctaaactaaaggacgactcaacacggacgaatgaacgaagcacggggaacacctcgttcgaacgaacgagcgaacgactcaacaacggctgtggctaaaccagtcggctagacacgattcacggtaaagccctggtacgacaaacgataggccggtaggaacctagggttgcacctacggctacacaactcgactaaaagcagcggctaggtttaagcggcacacagctgcgacacggcggcactaagacaacttgactcggctaggcggcggctaggcggaaacacgcagctagggttagggtgacggcacagccggtagcgaccatgcacggctagagcagcagggctgcgagcaaaaacgcaaccggcacggctgcggctgtggcaaagcggcaaacagcggcagcggtagtgatgcatgatagcagcgcggtgacggactgcggctgcgctaagtctaggcctctagggcaacagcgcggcaaagcggcaagcagctgcagctaagcggctcagccggcacacgcgcagcagcggcacggcaagcagctgcggggcaacgcggcaaggcgcgacgcggtagcgactaagcagcggtggctaagaggctcggtagagcgacggcaaaccgcagccgcacggcgtgcagcagctacgacacagcgacgacgacacacacggagacgatgatgacgctagggccaaacaagattagattagatggaattaagaccctagggataaactacaccggtgaacgacataagagcggcggttgccggcgaaccacgatacaataatgcaaacggagggcaccgggaggtagagaaggtgacggcgattcttaccaacacttacacgatgacaggcagcgacggaagatggccggcgacgagctccgaagggcggcgaggtactgatcaacggtggcgacggcgtttcagcgacgggagacgacaactgaggggtggacgggcttcaccttgctcctgcgaacccaatggagtagacggcgaccgaaggcgacgacggacgacgacgaacagtgcggctggagacatggcgacgacggcggcgctctggttcacgacgacgggcaacctccggtgggatttggcgcaaaacaaccggtggccgaggtagctctcacccttgcgaagccgagggaggcgacggctcaaggcggcactgaccagaggggcggcgcggcgccgctggagatggtggcggcggtggagagagaagacaagcgtggggagagcgattccggcgaccgcggaggacgggacttgaggggataggtagaggacgacgagggggtcctttatataggcacgggagctcgggaaaaagcccacatcgaggggaaaaacttgggaaagtttaggatcctcgccggaaaaaggaaagattgatccgcgaaattggaaaggatttccatagaaacttttggggatttcttagggaaattgtagaggagattgagaggattccattcccgcaactaatttggaaagaggagcaacgaggaggccggatttggaaggaggagcggcacggttgcacaggctcgggacggctcggctctatccaggggttgaagacaacactgtagcgagagggaggataaacagacttctatgcgggctgagaggaagggagataataggagggaatgggctgaaagggcccaagactaggaagaagattttattgcttttccaaaaaaaataaccaatgagatgatctctcaattgttaaaaatacttccaatgctcaaataattccaagaaaaatcttgaatatacttggacactctaagtatttaaaaatattgaaaccagaccatttaatgattaattcattagttaaataattactgaaatgttctttgtattgttaaaattaggaattgagctccgaaaaaatccgagaaaatttcagagagtataattaatcatggagaatttaataaaaattaaattcagccatgatttatatttaggaaattttatttcccacatttaacttcacttgtaaattaaagaacatttaatataaattctattattaatttattaaataatttataaagcctgaaacaaaaatcaggatgtgacaattatttagtttaaaatttcatttttttttcttcctgtaggagaaatttcctcgtactcgtcagcctacttttacttcagcagctcagaaaaagttctgccagtgacattgaattcttaggatcttttgtagcaaattggacagctattagctgtagttaattctgagaagaacataatactttcgagactaaaatgttgagcatggttttctgtaatagaatttttgctacatttgatagctggttctgatccagtaacatagtatattacaattgtctgttacacaattttttcattctcattgtagcaattgtaactaatctttttttcccttgatctatctgttcatctttgcttcatcttcttgtcctcttctcaattgtttttctttcattgtcttgactagctgacctctttcctgaaaattgaaatttcatttttttatatgtcagcctctaatttttttcctgttcttaggtgaatgttttttgtttcttacttttgcttgacgattctccagtttgatcttctccctgtttctttcttgttccaggcttcctttgcttctcaatagtccctgacaatgttaaatccttataagtacatttttggtaacacataatatttttgtacaagtttaatttatttcaaagaaattgttttttcttacttgtcttggctgttttttgctgactttgcataatgtatgtgtcttccatcaatgggcatgtctctattgtatgatttgttcttccacatcgtgtgcaatgcctttttggaatctctttaagcttctctacaattgcttttgttctagctgatttttttgccttttgtatttgctaaattagggtcttcgatatcttcttgttcattcattgtttcttctgtttcttattccccattactctcttttgttgtactgccttgattattttgttgcagattttcaggtgcctgttcaatcaacaagtccaaatttccatccaacctgtccatctgatctagcatatacaggtaagtgtctttactctttgatgcttttgaagccatgtcagccattcttctagagaggacattgaacctaagaactgaactgttttcatcactagctggtttctctattcttgctatgcattttctctcctttttcttccacctttcaattatgtacttttcaggaattttgcttatttttagaaatagcatcactttcaggatatggctttgcacatatgcacacatagttctattgtgctaagtctgttatgatcacatattttctctgtctgaattcctgttttgttaggttttcagctgcatatacttcatatgttttcccatgttctataactgcaatttcttgattcagtgtttcctgcaactcatcttgaaattttttgaaaattctcaagttgtacatctctgaagcttgtagttcaatcttgtagcttgaccatagtgtcttaggcttctttgttctggactgatgatctttgcaaaattctgtatcaaagattgtgtcattgattatctcaaattctttaaggaaactcattacactgtgtgttgggcccacaccccttttgaaccttgcatttgtcacctcacttagtgctgtactgtgaataaatgggcaaaaatctaatttaaagtacaatggtatatagttttcccttgttctccacattgtctgtaggtatttgatgttttgcaaaccatacttttcaatcatttgaggccacaatgtttcaaactcaactcttgtcaagcagttgtgaacaatatcataaaattcattgtagagatctttatttttcttttctgaaaatgtgtttcctgtcctttctctccacttcttcataatatggaacaagcaattcgtgtgttttgtatccggaaatactttttctattgctgatttcattgccaagtcttggtcagttatgattgtctcaggatgttttcctcccatagctgttaggaatgcctcaaaaacccatttgaaagtttccatagtttcatctcctaaaaatgcacacgcaaaaatgcatatgctgccatgacctgtaaccccaacaaaaggagcaaatggtaggttgtacttgttagttttgtacatggtgtcgaaactaacaaattcaccatactcctcatatagttgagtggatctaccatcagtccaaaacatactcttcaccttattattctcatctagcaacaactcgtagtagaatcctgggttttcggcttctttgttaatagatactccatgagcttcatatcactgttttttgtttctgaattgattgatgttgtcacattgctgacatcttttttgttgtatagcagtgctgacaatcccccttggagaaatgacagtatgactatcatgcttcttgtaggtatgttgcactccttgagagttctgatcaacctcttttcttctactgtcatattcttgtgtgactttaggaattttgcttctctgtttgggcttagtgtgtgattgtgttctaggttcagtcttgatattttccaaatattctgtacctcttttattaccatcacacacttgtagtcagttctgtttatcacatttgtattcctcttttattaccatcacacacttgtagtcagttttctatttatcacatttgtattcctcttttattaccatcacacacttgtagtcagttctgtttatcacatttgtattcctttgttctgttgttttcttctttttcttcccatcttcctcatttttcccatatctgtagcactgatatgtataactagtaatctcaccattcattttcttgcttgttgtcttgtaatggtgtgtatttacaattgagaacccaactaggtatgcataaaagttgaagaatccatgagcctccttatctgatctgaactccattccaacttcaggtatgtgccttttgtcaattacttcattgatttcctattcattatccaagaaattgtttatgtcttcctcatttatgtcccctccagttgtgtggcttcttgaactgcttacttcattactagctgttatagtactttgttcacagttattttggactttttgtgcaccttctgtgtcatttctaacttctgttatttcttcattcacttgtccactgtttatctgaaaaaaatatatgaattgattagtatgaaattttagtaaactaatctattttgtaatctcaatgtcaatatatgaatcactcttgtttacctgtccattctcatttcttgaattttgttgtatatcctcttcgtttggatgctcattactctgcattgccattgtcgtcccattcacctgcaaatttcttatttgttatgtttcaattatactatcacatgtttttatgattttattttatgaatgtttgtcaaaagtaacgtacctgtcttttgaaatggttgtttttggattcatacaactcttttatatctctttctgatgatctctgcataatttttttaaattgtttgtcatttgtaagtaataatccggttagtgtatttatttcactgttcaaaatgttacctcactccatgtagtcatgttgttgttattgtatattgcatcaaattcttgatagatgcgttctgttgtagaaatctgttgttgataaaacccatcttgctgatctgtttcttgtggagaaaacctgcttgttgtcaaaatcatagaattctgcaatggcaaaatataaactgttagtaatgacttataaattttgacatttttgttcttcatttatggttgtaagttaagttctcacatcaaatgcgacgggtgtttgaagtagatttgtatatgcctctattccttcctgcacatttcattttagattgcaattagtttttctttcatttttctttttctagtacaattgaaatctgattaaaatatgcttacctcatttgtttgcatggtcactcttggactctgaattatttgttgcatgagattagtgtagctcatctttcctgcctccatctgtaaatttcccttgttttctgttatatcagaagtattggcattatttttataatattgtgaattttgtacttacaagtcttccatcttcattaagcaatgagtactggttgtatagtatttgtgctccatagcttgttgcatttggtgtttctgttcctcctctagcattttgtcctgattgaatattcttttttgtcaatctcctgcaattgatttgatcctgtaattgaataaataaataagcatcataaggttacagtacacaacaactatagttacagttgtaagttttgcaagttttgactgtaagtcatttttttttctgttaaaattttccttctcaataatataacctgatatttgtatgtctcttttgatttcttcaagcccagttttttgaaattttcttctcattgtctcccctgcatttattcccccttcttcactttcacgcttccttgtacctgcaaaaaaaaatacaatcagttacagttatattttataccacttacagtcagttacagttcaagtactgattaattacagtcgtaattttagtacttttgtattgtaatttataatagaatgttagtttttttagatattttcatcctgtcatcattcatttgttggggcatgcctggagaattaaatttgtttgatgtttttgtaagttcggacttttatgtgccccttagtttgattgctgccctagtcattttttatagctgcaagcagtgtttttcaaaataaattttattctattcttcgtagaatttaattgttacctgtatgttgcttgaaattggtgatttctgtatcaacttgtttctgaaagaatttttttctgactacattctccatctggctttaatcctgcattaatatttaaaaagcattacaatataatatctttgtaatttaaaattttgttgaccataaattacttaccagcaatttctttcattacttgaatctgtgcctgtatttttccttgtttattgatgtctttgtctttttgtgtctcattctttaaccctgcaaaaattaaggcaatgtagttacagtagaaacatgtaatgtgttgtccttactgaattctatattccatacaatccctgtatattcttcatcaattatcacatttacagtggtcttacagtacaattgtataccacttacagtgcagttaaagtggaattaggccatagttacatatgtaattttaggtgttatctactgtaatttttggttttgtgaagtttcctctacgagaattggggcgtatttagatatatctgttctagttccatatttattgcactatagttacagtccaatacattcttcatgaactacagttacagttgtaattttagcaagttttgactgtaagttgtagcaagttttgactgtaagttgtagcaagttttgactgtaagttgtttttttcttttaaactttaacttctgaatagtgctatttttaatatgacctgatgtgatgaatctttttgtctagcatagtatagtatttatgtaactattttgtccatgcagccaacctgaactggttcagcaaattttgttcctgcaacattcaaggaatatgcaccaaattagtatacatgttttttaaaatcatcttactagattgttaagtattagatatttatttacataggacatgcaccaaattttcataatctagtgttctttatgcaatcaactctttttgccaaatgatgataaataatttttgaattaagcaaatcaaatttttgcacgtcatcagacaagaaaattattcactatttgtgaaaaagatttattaaacttcttgtctgatgatgtgcaaagttttgaggtgtttttctttaatatttgatggcaaaagtttttatattattagtgttaatataaatgtgtttattaccttaagtaaatcttgattgtttgtttttgagcattacatgtgttcctatcatgtttgatgtaaaatctgtatatgcattactgtttgatggagaatttatgaaattttgaagttaacatattgaagttatcaaattttacaatgcaattgtactaaacttacagtgcacttacatgccgtatatattgtttttacaaatgtaatttaaggtacaaagcactgtaattttccaatttgaccatatgtgaatgtgaatttgatttggtgcggtgttgtttttagtttctgaacttctttttcatttttaatcccttgtgcaatcttagtattggagtattatttgtgtgttgatttcagttgatttgtgcctaaaataggtgttcatgtttttttttgcctggcatgtttgtagatatggattgagtttttttcatatggattgtgccctactccaattgttatgtgactcagttttaccgtggaatatgtcctaattcatgcttttgttctctttaattttagcttgcttcttactcaagggatctcaactatcctgtctattagccatcatgcaggttagttgtctctgacccatatcaccatgctaataactagtgtggttttctttttcttttttttctgaccaattgatatactattagtgatttacagtggtttgtgcacctagctacatggcatgatatactattagtgattcaaaactgagttgatgtgttcagttttagtgattccctcttagcacaatttggaatgggcatactaaggttattttactttttggtaaatttacagtgcatttgtactaaacttacagtgcacttacatgttatatctattgttcttacaaatgtaattttagtgcaaatgcactgtaattttttgcatacgggttggggccatgtatggtgctagcaaaatataactgtaagtagtcttatagtttcagttacagtacaattcattgacagttacagtgcagttacagtggaattggaccatagttccatatgtaattttagttgttatctagtggaagttttgagttgtcaagttaatatcctgcatgagaattggtatctgttcaattgttcaactgtatgagcattagatagatctgttctagttggtcaactgatggcagaagatgtggtgaaagttttagaggtttaaaatcagaaatgcaaaggtgaagggggaaggggtttcagggttgaaatttacctggtatgttttctcttgtttgcttgatcctcttgatctccatttttttggtgatagtctccttgttctctctttttttttccttctcatcgctgtccatggcgcccctgatctgctctgattgatctagaaccttgaaccttgtttgttgcgtgtgttttcctcttttccttttttgatagctttcttggattccaagttgatggttctgttgtaatgggctacgattttcaatgggctatgttgttgattttcttttctatctagggctcatttcttctattgggcttttttttgtcttttatggtttattttgattatgacgtttgggctagattacagcccatttgatttatatttcatttaattttttgttctattttataattgtttttttattatattttttcctgttcattggatgtagatctaatggtttaaaaaaatctgtgtgattttgggtgaaaaatcacccgttagatgtataggtagtcccatcctttatcaaaaatcgtcgttcgcttcaacttccaccgcgtgtcccatggggtattggcctccccaaaatcgtcggtctattgaggaagagtggaggggcatctataatgtatcgtcggtctattgaggaagagtggaggggcatctatatattttaggcggaattcttaagcaaccaccatcatccgaactatatatgataagataaatcgatcaccttgtttgggtttagcctgttataccttcttccaggtaggctgatgattcccgaaatggatatgtaaaaggccactatagaaaaaaaagtacggaagtgatttcttgacaaatttgttgagcggtttatatgtacttgtatgcatatactccctccgatttttaatatatgacgttgttgacatttgaacacatgtttgatcatttgttttattcaaaaattttatgcaaatgtttaatatataaatcatgcttaaactattttaagtgataaaacaacttacaacaaaataaattataataattacataattttttgaataagatcaatagttcaacatgcggcaaaaaaattaaatacattatctattaaaaaacggaggtagtatatcatcattattagctcacaaattgaaaaagtcattgtatgcaagcattcaagttctggtccttcatcctgcaaagatctctgtaagtccatattatgaattaatcgtccatagagggtaaattcccacggcaattaatctttataccttttaagataaagaaaactttattaatctcaaagctctttatttattttactcgaggtatcatcgtacctcgctttatttattgattacatacattacccaacacacaaatctttatagtatacacaatatgtttatttattattacatgactttatttgtggagtactccacaaaagcttttttattgatctcatagtaaggaattaacgggcttcaaatgtcgcgaccagttacgctcgcaggcgacccgtgaagccggtcttctcgtcgtagaacctgtcccagaccatgacgcctccgaagttgggcagcttgctgaagacgtactgcatcaatttcttgaggtcctctggcgagatgtaggcctccctgtccacctcccgcgaggccacgacgccgaccaggacacggctctgcgggtacatcttcgcccacttctggaacgactgtatccaggacgatgccgggcaccggccatcgctgaatttcttgacgtggatgcggtggaagagccccgtcgccagcgcctcatccagccggtggtccgggtactcgcaccgcgtcgtcgccgtcagcatcaccccgaccgtgccgcggtagtccttgttgtgcgcgtagagcagcttggctagcttgttgtagttctccctgccgccctggtcgatgaagaagtcgatgccgttgacgatggcgtcgccgaacgggcgatagacgccgttgcggtggccgccgaggtaggagtaccagaggtggtcattcagctcaacggccgcctgtggggtcgggagggaatactcgccgccttggccgccgatggcgaggaggatgagtatgcccttggattggcagtacttgatgtcggggccgacggcggagaccgggtggccggagatgtcgaccttgtagtacccgggcttgtagccaaaggcgctgaggaaggaaatgatgacggtggtgtagaggccggtatcgcaggcctccctgagggagccctcgtccttgttccgtccccaaaagatcacggtgtcgccggtgttctgggacgtcggcgacgcggcggcgaggccggcgaacagtagtactactgccaaggagagaagtgccgcgtggcgtcggagcgccattgatcgaatcttagctagcttgcctgcctcgagaaatgaaatgatcgagcgagctaggtgtgaaggatagggaggtgcatgcatggatatataaagcgataggtaggatagatggacagtgcgcgcgtcgtcgatcgctggatggacgcgttgtcttatgttgtgtgcgcgcggcgcccgccgcgtgggcatgcagggatatatccgataatccgaagacaattcgcgcttcacgtaccaccagcaccagaaggttgctaagctggtgcgctacagctagcgtgcgttaagtaagaaaccacgcacgcgaaacagcagaattaaccaaggttcgtcggattatcatgctgaagaaaattaacgaagcaggctgcctagctaaaaatgaagatgctgggcaaagtttgaccgtaaattaacgtacgtgttgaatatatatataacagtccagctagcgaccaattactttgttgatacaaatgtttacttctctagcactctggcaacttaaatatacgtcgtgtgttagatgcagcctgttttgatgaatgatacgagaccaacgccgtgaattcaaggttctgctgccacgtatcaatgggcactgtctcgtaaatgtactgagaccacttattttatcgtaatatactggccacaagtttggtgttgtgtacttctgtaactctcataacatgtttaaagtatatacggggtcaaggtctacggtgcctaccctaaaatccttcaccaaacttagactgttccatgggctttttattcaccgctattgttcgtttgggcccattcatcggatcttgttttgagaactccattcatcggctttattattgcgggttctaccttttgcatcatttctcggttttaatgcctttctccgtgcaataatcgggccttattaacctttttttatgaacagatgtatacatctacgtatcattttcttacgtaaatatgtatgtaacatcctaatcaacacttaaattagcaagattatccttgttttattctgtttgtcttggttcgtacgcaccccgacaagtttatatatattaaaatatgtgttttacaagtttatctactagagatacaaatagaacttttcttaagttccccttctaaaatacaacaacaggattatcagtgaaattttcagagcaaagaagtaagtaataattagaattcagttatcggaattaaataaaatatttttgctatcttttcccctcggtcatgggccgcggtccgccttgcctccccacgcgtgctcgcctcctccgctcgctgacccatggccgtggcccagccgagcctatgcccctctctctctcttcagacaccaacaggtggaccacctgtcggatcaatatctctcctccggccggcgaaatcgaagggagcaaccgcacccagtgccctctccacccacttccccactccttgcccttcctgcaatcgccgccccacttcttgcaagccgcgcccctaaaaatgggcggagattcgattttcaaatctctctgcctctctctctctctccttccccacatcggcgccgttttcgcctcacatgggtcaagtccaaactccctggccctataaaaacaacccccgagatcccctcctccttttccctcatttgatgccctctccggtgccctcttattgccctcacgacgtcgcaccccacgccgctaccttttccaccaactacggccgcctctagctgctactagggtcactgccgctccacgccgtcaccaccaccgtgctcgccaagcttgccctctccccggccgtcgctttgcgccgctgaaacctgcttctcctcggtcgtcggtgagacctccatcttcaccaaactccgaccggcaatgctcgctgccgtggtacctatctgtctaatctctctcctctccttccctagatcatgctatagccccttccgccccttgccactatcgccgtcatcccttcacaccagtcatcatccttcaccggtgaggaatccctcctctctcctcccattttccttcctcttctttgccgcaccatcgccactcgtgcacgcctccgcatcccggcagctgccgccggtggtcacttgcgctgcctcctcccggttgggatggctggccggccaccgcttctccacagacgtccgatctgcttcggagcagatcggggctgttcgttcggccacccacgtggctaccatgtcagcgccacgtgtacgccacgtggtgcgcccgtccctggcccgatggacttggttcaccgtgcgccgcccgacttgcaccactgaccggtggagcccgactatcgtgctggcctccctcccttgagacatcaacccataagctttaatgcacaataattcgttaaggtgttttctattaatcgtaaaaacacagtgactattctaaatttcataactaattcatccgagctccgtttaagtccattcaaattatagtaaattcataagaatgcctagaatccactaaaaatagtgttgtttcatgtttcagtaatcttattgttggtatttcttaacggcattactagaaatataattcccagcaatggcgcagaaatactcctagtatattatggttacagagttcatccgcaagtacatggatataccattgtagcatttcacctgagagtattccaagggtatcgtatttatttaatcccatgggaagatcatggtagagagaacctgactaataatttatatgttacttgtaataatcatagtctaagtaggggttaatataattcaagggtagagtgacacacaagtagggagctactcattctcatactaaaatatctaaactaagtggaaaaaaaagagaaagagaatctattcctatacttctagtatacatagtctacatacatcctagttatctgatgtactagctaataccctctatccgatgtcctcctggtacttcgagaagccacccctgactgccgagttccttacgacagcccgtcatgaccatacaaccgaggctaaatacggaggagtaccctccccaggaaattaacttaggactatatccacgcacggagaaatacccgtactaagttgtcaccatcagcggcccacctctcatccgcagcatataaccccaaataatgataccctgtaatctagacaccacgtctaaactaccagatactactctaatatcatcttcatgacatagagtaattgcataagcaaacattatacccgcaccaaagcatctcccaaataagctagaagtataatcagtataacatgaacataatgtaaagttggcattcatatacttggaaagtattccaataccataaatgtataaagaagagtattctaataatagtacaaagcttacaaaagagaagagaagagctactagagccatacccgaactcttccgaaggcttccggactccgatttctactctattcctattccactagcttgataacactaaactaaacttgagagaatatgagaaagctttgcttgaggtgtgtgtgtggagtgatgatgacagctcctttatagcctcccaatgacggttgtgatggttggaaaggtcggtaatacccaccaaccatcattggggagccatctcagtcgtccaggagaaacctggatcgaacgacgctgcgggggcttcagccgaaccatgggtcaggccaacctggcccaaaattggcaggtggcctcttccgttgctctcctacgcagacttgtaaattttggcccaattaattctaagttcttggcccattcatgcataagtatgagtcacgacatcgttcgattgatttatcatttgatttgatgtcgattctcctccactttatggttattctctacaaaaggttagtgaaccaaatactagtggaatattattattctaacatggatatgcattgcaagcataactagttctcctctattttggtaatattgacggtcgaaactgatcgctaacgaccatctacacttatattctattttacttatatgctttgtttgtcgcgtagattccggcagttccgacgctctggtttactttgaagttgttgcggagttcccagtagcaccggagcaaggcaagtcatgcattacatttgatcatattgtgtatatttcataaatatctcgctttctatttaatattgcgatgttttataatgtcatgtgggatggttcctgttactctgctttatatcgcttaccttgtgccattgttaacctgggaattaatatgattagatggttggttaggaaaatgcttggccatgcttagatcaactagctcactatggggtatcacatagaacttctatcctgttttaatgatgataattatggagatgtaccaccatgttattaattcaactaaaacatatcaaatgggttgtgggcgcatggttttgataaacgcgcccatggcatgtaaggaccggttcacaggaaaccctgtaagaattaccgtgctctccacaagccaatgtgggcaacggctaggcttgtagtatagctctttcctatataactttcctaggtaagggtgggcgtgatggagttgggtcgggccccggttttaaggtttgattggcttatggatataccgcggcacaagagggggctgcctacccctgttttaagggtaggggcgaaacttgcgaaggggttatgcgaagggtcctattacagtccctgtccggtatgtcacggtggcatgccagcacacgaaaatgtattgtggggctatgtcttgtgggtacaattgtgatgccttgcttgtggttgtgggcaaacaaccagattaatattgcttaatggaactggtatagtttaggtggatggttgggcatgtcgcaacgtggtttagcattggatagtgatgattaatattgattagtttacttcaacaatttttactactttcaactactactttaaatacctgctttatgcaaaagaacacctagcctcctttgtaattacttgcatcataccctctcttctggtatgacttgttgagtacagtgggtagtacacaatcttgctctgttcccccacattagagttgaagtgcttcctggatggaggttactcaggggagtaggctttgtcactaccattaaagatgcctatggtgtggagtcgtcgcgctgctagtatcagttatcctatgtttagctagctttatctttccactgcatttgtaatacttttatgatattttgtaagacgtggatctgtatgcaaattttgttgtctgtgtaccttgtccagtgctggacaggggttttaatgcacatttttcttgggaattctggtttgtgaatttctgggcatgacagaggtggaggagcgtggaggtaggagaggtggcggtacgcaacggcagcatggcgtgccttggaggtggtggaaggggggagagtaggagagccaagggggcgaggtgagtgttggtatttcttacgattacagatagaatccgcaagcgcacggatatactgatgtattacttcccctatggagtattccaatggtatcgaattcaagggaacgtgtgtgattaattcttcctccggttcatccaaggacaccaagcaaaaaaaatagggactggcaacctactgttcctagatgatttcctagtgagaaatagtgtctagggaaagcttaattttaatcctaacacaatacttcaggcactggcaacctactgttcctagatatcgctctactatatacccggatatggaggacttaagtgctcttgagggttgtcaccacctctatacctacctcaaacgtactatgggatatgcaacattactggataataattacctaaacaccacgtctaagcaattaatatctattttagtgtttataactcatcaaagcaatcactatagtttagttgattatagtgaacaataatcccatatgctaattaggaactaaccaagaggtaattctcacaagataaatctaaattactcaggaagataatcctatggtattagagtaataaacagaataaaataaacaggagaggattaccgacagctccggaattcctccgacttcttctactctactatcttcctaattctagtatacaaataatacaatagagcctcttgtaattcagctcaagcttggaagtgcgtgtgagagtgaaggagtgaagcttcttaaatagggtaggtatgacggttattgaaaggggaattgtccgaaatgccccgcaaccccatcaggagcacatctggaccgtccttgccaaaccccaggatcaacagtgttgatcaggcccatctggccctcagtttcggcctatggactcctcctattctgccttattcattcctgcgagttttaggctgattcgttgatattttgatgaagtctacagcccaccttttgcatggatatactccttccttactttagtctgattttcctcccaactttggtggtttatgtcctatattggatattcaccaacactcgtggcatatgttagaaataatccctatcactatgttggatgttttattatctgtactttatacagatgttggtggtatatattttgcacttcacagccaccaacagtgagtggaggagcgagaagggaggagaggcggcaagtgaaggagaagcggcgaggccgaggagcgcggaggcgaggcgagggagccagggtttggtgggccatggttgtgggtggtgtgaaattttaatagcgtaattttttttgtggttaattagttaccaccaacaaaaaccaattttcactggagggctcttaggaggcctgccttataaaatagagctatcttttaaggtggcctcctaagagctcgccagcgaaaatcagttatcgctagcagctcatgacatggaatctgccaatacatttttacaagcgtttgtttcattggtccgtcagtaaaaataaaaggggaacaccacaaaaatcgttttagtagttaattcaaagtattttaatttatttccattttccttctttgtatgaattttacaataagtctactaaatttctaattcaatattgaagcttttatgtttttatagaattgcaaatttcatatcaaattaaggaaacattgatgctttccttgttactgtataataatttcctttgatagaatttatatagcaataaatggtgttgtgcaagtcagccttcgccttttatattttagtcctcaaattctgtagatctatatatagatccaaaatttacactaaacacccttaaaatcagaaactattataaaatagcacctttgaccaaatccaaaatcccccacttcacctcaccactggcgactctccttcctcctctcgttgccggtggctcatcacctcctccgacgagatggtgaccacccacagcatcctcctttggttagctctcttcattctcctcccagctgctcactcatccctcgcggctagtgagcttcgggctggtccgacggtgagctcgtaacggacctggcgacgtcagcgtcccactcctctcccctatctggtctcccctcctcgagttagcgagcttctccggtggaaatcgagcgatgcgacagcgggtcgaagcggcaacaaactcagcaccgtgtgcgcgtggatggccatgagctcggggcggatctggcgacatcagcacctcctcctcgccagcatgggaaaggagctcaatgcaaagctggcggcgtcgacagcgatggtgcaggcgacgagctcagggcagatctagcagctcagcatcgatggtgcctcctcctcgccggcgggggagactggagacgggttctgcacctgccgctaccaacgtcgcttcctcgccagtgctggcgttgccctgtcgtcctcatcgatgccggcaagcccctcccctctccggcagtgtcttcctctctctccccccactcttcgagttccactctctgcgcgcttttttctgacaaaactgatgagactctttgtacctggagaggacgcgactatgtgagaaccccatgaaaacatggtccccaccctcttctctcctccacgcaagccattcgcctatgtggattgacgaggccaaacgccatgtagttacattgtgaaggccctaacaaaaactataaagaaaaaatatatatttgtcggaattttgtttttatttttatggtgaaaacataacaaattttctagatgagactttgcatatatgtgtaatgcaattttcagatttttttggtaaaatttattatttaatatttatggagcgtgaacaagtttgtgtgtataagacacaatcttttagtatggaaggttttgtgtgttttatgttacggaagtacggaaccaagactgcaagttcttattgagaaaggaagaaaggaggatgcaaaacgtccccacaaatacccccgccgaccggtttcctcctcccctgccaagcaacgccatgtcgctccacagcctcaaagaaaccctccagtcttcctccttttcacagccccaatccgagtcccaaccccgatcacctcctcctctcctcgccaggaggcccccaaaaacgtccctctcgcagcagctcctccgccttgatgcctcctcctcctcttcctccttttccgtctcgccgccaccgccccctcgcacttccccgacctcggatgcggcggcggatgatgcgccgccgctgccagaggaggaggacgaggtcccctgcatccgcccccgcgcttcccttccgccagcggcctccctcgactcccgcgggccctacgaaccgcttgctctctcgccgcccggagagcgccccgtcgtccaggtaaaatctatgctgccgcctccctcttggctactactgttcgatgttccggtccacagttcttggcgagtggcgactggtcaggttctcgcaccgtgataggttctgaccaatgttttgcacctgccatggctttttttttttgggtgattgatagcatgttgaataataggaggagagattacagcataacctgatgattatattgagcctcagggctggggcaggtgtgtatagtacaagagataaggaagacataatacaaatcaatcatatcctaatatccctttaactaccatataacagatgtggcttccctttccctcctaatatcccttccctctgttcactttagtccctccttcaacagaattttactcactttagcctctcttttatttttagttagagcaattttttagttattacaagcacattcactttgctgtgctttcctctgttttgtttggtacaggtaccctcctcgataaattgcaggctacttgtgcatcagagggatggtgtaagattcttatacaatctgtatagaaacaaccatggcggtgtgcttggagatgacatgtgaggtttggaagttattttgttacagtataagtacactgctaaataacttgtactcttgtatgatataatctcctgattgtggctgaactgaaatgaaactatacaatatccaaaacaatacatatctctttctatccatgtgaaaacattgtggttgataggtttgtgggcttaaatcgtcaaattcaatgaaacttggtaatattactcacaaccaggagattatatcatacaagggatttttttcttaaaaagattttgtaagtgacttattactattgctttattaaagtctaaactccgacatgataactagtttttttttaagtttatttaaagttttacaaaactgtgacagggaaattgtagttagtttgaaaagtatcttaaaattatagtctttaaaagataatacatgtattgcatatgtcctgatgttcctaaacttctatgtaataaccatgcacatagtttgcatggtttatattattttgtgaaaaattaataactaaaccattcccactgtatgtagctttaatccgttggcggtttacttcgtggtcttattctgttcttatcatcaatttatatacatagtttgctcatattctgcatgatgggtaagcatgtggatgattgacaggtacttgcaccggcatcacataagcataccctgtaggtctgttgggaaaaaaaatctcagggtcgatagcaagcttgagcattttatttttggggagcttttttctactcacctattattaaatctcaaaccgaaaacataataatgagatttttcaacacaacatttaaatttgatggacttctgagttctgactcccttgtttctcatgtttttttttctgatttaggggtttgggaaagactatccaaacaattgctttcttatcagctgttattggaaaagataatgaccacggtgatcaattagtggaaggaagaaagattgcccctatactcatcctctgccccacatcagtaattcgaaactgggaaaatgaatttgcagagtgggcaagatgttctgttgctgtctatcatggcccaaatcgtgacctggttcttcaaaaggttgaaactcaaagactagagatagttattaccagttttgacacttttaggattcatggcaagattttgtgtggcatctcgtgggaccttgtggttgttgatgaggcacaccggctgaagaatgaaaaatcaaagttatatacagcttgcttggaaattactactcgaaagcggtttggtctcacaggaaccataatgcaaaataaaataatggaattatttaatctgtttgactggattgtacctggttgcttgggggatcgagaacactttcgagtatattatgacgagcctttaaaacatggccagaggttcagtgctcctgagagatttgtacaagttgctgataagcgcaagaagcaccttgtttcagttcttagcaaatttctgttgagaagaacaaaggaagagaccattgggcatctcatgcttggaaaggaggataatattgttttctgcagaatgagtgacgttcaaaagcgcgtttacagaagaatgctgcaacagcctgacgtgcaaatccttataaacaaggatctcccatgtagctgtggaagtcctttgactcaggtggaatgctgcaagagaactgaaccacatggcattatctggtcttatcttcacagagacaatccagagggttgttctctgtgccccttctgtcttgttcttccttgccttgggaagcttcagcaggttatttcatattcttaaaatattttggaaagatttatgtttttttaataattccccactaattttccatagatcagtaaccatctggagctgataaagccaaacctgaaagacgaaattgagaagcagaagaaagatgctgagcttgcagctgctgtctttgacacagatattgaattagttggtggaggtgctaaaagtgaaaacttcatgggtctcagtgatgcagaacattgtggaaagatgcgtgcgttggaaagactattgtcattatggactctgcagggtgacaaaattcttcttttcagctattcagtcaggtgagtggttatccccaatgtgtccaatgcttcagtaagcatgaagattaaagcaagaataacatatctcacaagtcagaaaatttctttgttttaaaccatatttgatgttgaacaaaaagctcttattgatgtaagaccttggaattgattgttactaaatgttcataaaatatcattacttactgtagtgggtataatttctcacaagcccatcatgctccagtttttgctgaagttgtggtttatatacctttgacagtatagagcgttaaatcattgaatagatgtaaacttccttctacttgcctttctttaaatacacttttagggaatgtgattagacaggttacactgaacacaaactaaacctatttatttagacctgaaagtaagttaaaacaaaacttgcttgtatcgaatagcttatttttctcttaagcatctatcttagttcttgttcactgcgtttgcttcttggaacgtttcttgacagtacttgcgatttagatatgctgcttgatgttatatcttctgcatgtgtaatcacttgttcatgcataaattgacaaccaggatgcttgacatactagagaaatttcttatacggaagggttactgcttttctcgctttgatggaacgactcccatgaatgcacgccaattactaattgatgagttcaatagatgcccaagcaaacaggtaacttcctgttgatgtgcatttcagtactcgctgccaaaagaactttttagattagcatcgtcaaatggtgaattgcttttctacaggttttccttatatctacacgggcaggaaatttaggtgtcaacctggtcagtgctaatcgtgtggtgatttttgacccaagttggaaccctgcgcaagacttgcaagcgcaagacaggtcatttcgatttggacagaggcggcatgtcactgtatttcgcctacttggtgctggttcccttgaagagcttatttattctcgacaaatatataagcaacagctttccaatattgcggtctctggaaaaatagaaaaacgttactttgaaggagtgcaggtaatgttgtaaaactaatgcattttgatgaaattggattgattgtttcaattacttgaagggtggtacaattgtggaccatcctaatatgattcccttttcctgttctaaaatcatttccctgaattacctagtcatttaggtccttatattttttccatttcccaaaatacgtgtttctcccgtgcttgtatttggactgattattacaatcataacattcatattttattcagaaaattattgtatttcgaccatttgattatgcagtttaatatactcaccagagaatttagagtttgtaagttgatgcaaactacctggatgatgtattgttaacaaacaagcgtagacattgtgtaatccacatgatactgatattaatatttgttgttaagagtagcaatttagcagaatcaaacacgtgacacatgaactgccttgcactattcctacattgttgcatacatcaccatatgttaatgtacttcctattttggttcctagcttagcagtcataggcataagagaatggttgcactcataatacacatacagcacttaaggtagattcattattttctgttgcagtgtcctatggcacctgaatagtaaaatgatgtgtcactacatgtattaaatctagggcaatgctgccttttttaactagatagttttctcaccttacctcatgactttccaaattctgtgttaacatgaatacttttttttagaataaggcatctatcaattcactagattacatttcgacagttcagaagtcatgaagttatgcgtcactctcttgaagtttcttagtcatttaccagcacatatacctttcacgttttaagaataatcacacttggctttggtgctttgtttatataaattgtataattatatgattttaggatgacaaaaaatttcaaggtgagctctttgggatatgcaatctgtttcgcgacttgtctgataagcttttcaccagtgagatcattgaaatgcatggagaacatgggaagggtaatacagctgaaacaataggaattcgagaaatagttgatacaaatatatttggtacgcaagatcaaatgaaatcctcaatgacagcaatacataacgagaacaagaatttgtaccattgtggtaagttctactgtcagtctgaatatttctaatttaattttcttgattttggaccttaaatgctttatgaaaagtttcaatttcaaaatgaccaataatatactattactattactattatgggaaactgaataatatactagtggctgaatagttaattgttagattaaattttaatttcaaatactgactctaaatattttgcattgttgtgcattcaatttttgtaacattcatatgtttgtatcgatttatttagccctgctgttcatcctattctagtttatgttcactgtctgccctaagttctcttcatacattttgaagaaaagtttatgtcccatatcccatagagctcaaatgacactaacatttgtagattgatatggttttgcaacattatatatctataatcctatgaacagaaaaatatctggtctgtgaaatgcaatatagaataacttacgttctgaataaaatagaggaaattagtaattatatttgtatcaatctcatcttacaagaatattgaaaatcattcccccccccccaccaccaccaactctactttcttaaggaaaaaaagtgtgggggtaaaagggttcacatgaaactatcagttctctaactttaggatgtgtattgacaggggggcctgacctataataagaataaagtttcagttctatgaaaaaaaaaataaaacaatcaattattattgcatatttctgaaatgttcagttaaatttacagcaaacggatagttctgacaaaacagtagcagtttgaaatttagtctaaaataaataaacacttggtcaagtatgcaagtctttgacatcttgatctatgtaggattctgttattagttgctacgtttactgtttccagtaaaaactgatttgtcaattgcaaaaaactcatattgactaagattgaaacccgaaagttgcttgctaagttgtctaccagaatatctcccctctgtctacgtattggtgcattgattttttcttgtaacaaattctgttccctacaaacaggaatagtttatgctcaccgaaatgaagatgttgtaaacacgaggacaaatgaagcaagcaactgtgcagaagataaaactgtcccaaggcacttagaggagctgcaaagtaagaagaatgaaacaatgcatacaattaaggcaaaatcttactcactggtgcagaaaaagaaggaattcagccgaattgcatctttcatgggtatgaacgaccttgagtttagtaagtggttgctgtctgtctcgcctttgcaacgacatgaagtattggaccgctacaggaatgcaaagtaagccatagggagtatggataatgcttccctcatatagatagccctttcctgctccaccgatgttttccttctattctcctgttctgccccatccactctttctctggcttggcacaggctatcagaaggggaggaacatttcatgttcagatcatcttatttccttcttttctttttcttcatttattgcatttgtaaggtaagatcagacccatagtggtttgtcttttgggtttgacataaatcgctgtttctcctgctggttctctggatttgggcgcttgtatctttgttggtcggctgagtaaagcttttagagttaccacggagttctgagtgcatctcaaacagaaagaagctgtgctggttagtggttacaatgtacaaatgatacgagcatagcaggtcatgtatcatgcatgcaaataattcacccgttatccgacttttcccgagacataatattgtagctgatcgccagcggcacaccaaggtctggcgttgtggcaatgttgtaacagagagtgcaggctgttaatacatcccttgattatgcatctagctcacgacctcacgttactcatcagtatttttcacctcaaattttttatgggactattcgccctgcacatggacgcgcttgcaagacaacttgttcataagatgttccttcttggtacaaccttcgttctaaactataacaacttttagccctttaaaatttatcctaaaatataaatttttttaacttatattattttctcaaccaatcataacctttcatcatttaaattcttcgctttctcttttttttaaccaattacaatattcttttaaataatttaaataatttgatctacttttttaataccagtgtttaaacctaaaatctcttatattctacaatgaaggtactacttatatactaataaaaagattgcgaagattctacctgtaccatccatttgatcttataattcgattgaatatccatgctagaacaagtgaaaacaaatacattaatcaaattgattcatgtaatcggcgaatccaagggtatagaatggatgtgactatacagctactggtagctgatttgtctctaaaccagctaccactccatctattagagatactatccacatacttcaaatacaattttctcttaaactactcattcgatctatgatccgattataccgttgtgttcgtaacaattaaatctttataacaagatcccacataattatattttgatgaaaaatgataaattacttttataatatatctaaattacttttagatttcactaaattactttctagacatatgaaagtaaattcaataaaggctaaaagtaatttacatatattatagaaataactcgtaacaaaaagaaaaagaaagtaactttaatgaataccctttttcattggacgtgactacatagctaaaaataaaaggaaaaaaaacaatcgatgattaaacagatttatagagttatttttaaccatacaaaagttacttccaattaacattgaagttacttttaaaaattgttaaacttacgtgtgttgatatatgctgattaaattttatttctagataaagttatgtttttatctctacaacgaatttacttataatgtcgtgacaaagttacttccgttttgttttaagttacttttataatatatgttaattacttttagtctctattgaatttacttttatatatctaagaagtaatttattcaaatctaaaagtaacttatatatatatatgataaaagtaacttacatatataataaaaataatttataaatataaatattttttcatcgtaatataatcatgtaaaatcttgttgtgaagatttaattgtaacgaacacaataatgtaatcggattgtagatcggataagtaatttgagagaaaactttgtttgaagaagaaaataacatacatgtgatgtagtagacttctaaaaaaaaatgcatgcatgtagtaagctacagttgatttctccgcgcgttccgacgttgctggttaaggcaaaaacgagaggcctctccgaatagattttatggtatagaatagttattctattcccccctctctcccaagggccaaacccaccttccctcctttctaagggttcaaaacccacctgccatctcagtcaaaggtcggtcaaagcatccccacgtcggtcaaatcctggtcaaatcacctactaactccccccaccgcccacctcttctcagctcttatctcgcaaaacggtgcaataacacgacagaccactgtgcagtaacactttgtcttacgtacagtaacaatattcaaatttagttaaaatataatcatgacgggtctacttttaataagcacttttttcctagcatcatggtgcaaacaattaaaaaaatcatacatcacgtgagagatattgttcttcaaagcttgacttttttggaatttgactctctacaagtaagtagtactatagcattattattactcgtcactactatctgttgtgcgttattacaatcccatcacgatattactgtaagtctatacctaattaaaaaatacgcaaggcttccactaaaaaatttcatccatattccttttttcctttttctttcttctttcttttccgttttcttccatccgtccatcttcccttttttttttattttctgttttcttccatccgtcttttttgcgccggtttttctttttccctactctaattaattgcaaaaatcgattccccactacttcatcattttccccatgattttctctttcaacgctgttttaattcaacggatttaatctatatttaaaagtcaccgtttttgtcatgggttttgtggattcgctctgatttttataaaaacggaaagaacagatcgattgtataaaagcagtcaaccaattttgtaagatcgagaaagattcgatcggaattgatgggaggaccgtttctggcattgtatggacatgagatgttttcaccattttccggaggttgaagacggtagtcagctatgcgagctgtaactacaactcctcttgtgggttcggtcaaatagaagcaggctatgggttaagttaaagtgaagcaggccaagcaaggggaggtggcaagaaaggaacaagggaataaccttttggtctgaaaacaaagagtaaatgtatagtgagcttttggtccaaaaccaaagagtaaaatgtatagcgatctgaaaatatttttatccgttgcaacacacgggtattttttttctagtatatagaaaagatcataagttttgtaataacaatgcgtcttactgcaatttttgtatagtgttactccataaacatgtggtaacgtgtacctgccatacagtaacacttccacttgtgcagtaacaagtatatttagcatgtgaatctatatttttttattcctggtttactacaatttcaccacgatattattaccaaaggtgtagtaacgttctatatgttctacattaacaaagtgttttagtacatttcttggatagtgttactgcataaacatgcggtaaggtgtaactgtcatgtgataacgtgtatctgccgtgcagtaacacatttatttttgtgcagtaacaagtatatggttagcatctgagacttttaacccaaatatttttgtttcaattcctgatttactgcaattcactacaatattactgtcaaaattgcagtaacgtcatatacatgcagtaacactatattggagtgatgagaccggttttattgagaagagaggggaagaactgtttctttgaggaggagagtgcgtagatgcattttgaagtttaaccctccacatacagtaacactatagcatcatagtggaaactgttttaaaaaacaatacatatcttgtgagatattgtttttcaaatattggtattttaaactttaaccctccacatgcaataatagaatgtgtagtttgtagtagcaagggcatatacatgcagtaacatggttttaccaaatgtataaaattattcaaaacactcctacatcaatcagacctcgctcaaagccacctacagactttacctatagctcacctattcgattttcatattgtaaaaatgacatagtaaaactacaattaccgtgcagtaacatggctacttggaagtggtaacatgtacctatcatatagtaacacttctacttttgtgcagtaacaactatatatggttagcatgtgaggctttaacctatatatttttgttttattttctagtttattcgtagatttcactagtggtagagagatgaaggctggggcaagaagaaaggagagagagggaaaaacactactacgaaaatcatctttcgtggcggccattttagattttccctggcagaaattgcagcggccacaaagcaaaggccagagaaaatatcaatcttcgctagcggttatcagtcgcccgcaaaaattgattttcactggcggctgtgttataccggccgccagtgataattaattttgagacaaaaaacaaccatatgtagctgtcctccagccgccagcaaaaacccctctccctctccagcctccagcatcccaaatccacatccccaaatctcaaatccataacaattcaaatccacatcaaatccaatcatccaaccttaagagaacactacatcaatttctcacttcattctcaacaaacaaacattaatacatgcatgtatgaaacatcaatacaaacataaaatggagaaattcatcaaaatcgctgtcgcccgcctgccatcgccgtcgcggcggccgccgccccctccctccggctagatctgggagagggagagggaagggaggaggagaccctccggtcgtcgtcaccagtcgccgtggttgtcgtcgtcgtcatggcccagcccatcgtcgtggtggtggtggtggtcgccgtcgtcgtcgtggcccggcctgtcgttgtcgtggtatgacggcggcggatccggcctctccgcggcccggcggcggcggataccacctccctgcggctcggcggcggcggatccggcctccccgcccgcacccgagagccatcgccctgccgcgcctgagcgccaccgcccaccgcgcccgagagccgccgccccgccgcgcccgagcgccgtcgctaggtccgcctgtcgtcgctgccgcggcggccgccgccgcctccctctggctagatctgggagagggagagggactgagggaggggatgggaggggaggggagagaggtgaggtttagatgagaaagagatagagaggagagatgaatgcagtgggtgggtgggtgaaattgcttttaaatgcgtgggtgggtgatgctgtgaaggaatcgatctgtgagctgtgcttttcgctggcagatccgttttttcgctggtggatctctttagtagccgctagcgaaaacgcttatttttgatggtggacatttaagaggtccgcctaaaaaaatatagtatttttatggcggacctcttaatatggtcgctggcggccagtgaccccccaccccccgattttctacgctggcgattttttcttgtagccgccatgaaaaatattttccaaacgctatgaaaaatcatttttctagtagtgaaagagacatacacattcaactagagcgagaggtgttactcacatagatggggatgcaagtcatagttaatacatgacttgagagttattctaataagatgtgattataaacaattggacaaaccattgtacatagttgatgctgttactatacgctatgtatttagttactactccctccgtcccaaaatataataacttttagctctcagaatttatccaaaatataactatttctccattaacattctctttccaaccaatcacaaccctccacgtggcacgtgtgcgacttagagaagtcgcgcgtacacgctaattagcaaaaccgagcaacactagcccttggatcaacgggtaatgggcgaaggtgcaaaaaaaacttgatgtaacattaaaaaaatcgttaagataaaggaagttttatttatctcaaagctctttattatttcacccgaggtaccgtacctcgctttatttattgattacatacattacccaacatacaaatctttatagcagacacaatatatgtttattttcattacatgactttatttgtgtagtacacaagtactgcacacaaagcttttattgatccaatattaaggaattaatggtcttcaaatgtcacgaccagtcacacactcacaggtgagccgtgaagccggtcttcttgtcgtagaacctgtcccaaaccatgacgcctccgaagttgggctgcttgttgatgaactgcagcaggttgttgagggcctccggcggcatgtaggcgtccttgtccacgtccggcgaggccacgacgccgatcaggacacggctctgcgggtacgtctttgcccacttctcgaacgactgcctcctggaccatgccgggcaccggccgtcgctgaacatcttgacgtggatgcggtggaagagccccgtcgccagcgcctcgtccagccggtggtccgggtagccgcaccgcgtcgtcgccgtcaccatcacgccgaccgtggcgcggtagtccttgttgtggtcgtagagcatcttggccagctcgttgtagtgctccctcgcgccctggtcgatgaagaagtcgatgccgttcacgttggcgtcgccgaacgggcggtagacgccattgcggcggccgccgaggtaggagtaccagaggtggtcgtgcagatcgacggccgcctgggaggacgggagggagtactcgccgccctggccgccgatggcgaggaggatgagtttacccttggactggcagtacttgatgtcggggccgacggcggagacctggtggccggagatgtcgagcttgtaggtgcccgggatgtagccgaaggcgctgaggaaggagatgatgacggtggtatagcggccggcgtcgcaggcctccctgagggagccctcgtccttgttccggccccagatgatcacggtgtcgccggtgttctgggacgtcgccgacacggcggcgaggccggcggacagtagtactgccaaggagagaagtgccgcgaggcgtcgaagcgccattgttgatatgttggtcgaatcgatcttacgatggagctactgatcgaggtgtgaaggatacgaacgtggatgcatggatatatatagcgatcgatcgcgctcgctggacggacatacgtgtcgtcttatgttgtgtgcgcgcggcgggcgccgtgggcatgcaggcataagtccaaagataacgacgaagctagctaggccttcaccttcacgcttcaccaccagtagctggtgtgttacagctagcgtgcgcaagtaagaaaccacgagtgcgaaacaacagaaattaaccccgtttcgtccctctcagtttatcatgcagaagagataacaaagccggtgcttagcaaaaaggaagatgctgggataaacttaatttgaccgtgaacgtgttgttgaattaatataacagcccagcacgccaccaattactttattgctgtaatgtttacttctctagcgttctggctacttagaaaatgtatgtcatgtcagatgttgcctgttttgatgagcccaaacccggaactgtgatgagggttgggtgaattgaaggttctcttgcccagggtttccaattttggtaaagaccgaaaatatggcaatttcagtggtcacaggaatttcaataatttcagaaaaaatggtgggttttttcacaaaattatttaaaattttaaataaattttagttgaatttaaataaatgttgatcgaattcaaaaaattgtaaaaaaacaaaaaattgcggacgagatatttgcccggggttccgaaatttcaaaccctactgctgaccatgcatgagtgggcactgataataaatatttacttgaaaccccttcttattttatcatgctatatatactatccacataggttgtggtgttgcatggctctcaagactgtttaaactgtacacgtggattgggcctacggtgcctagtgtcaaacctgggtttgaccccaaatcgtatatgtatgccgtgctagttacacgatcaattgctagcacatacattcaaccttgatactagagttcatacatcatcaaagtacagtacataggagtccaaacttaagtaaataaatgatctagactttaacaattacatcatgggtcatccgccgaatacaagacaatataagagagtaaaacacagcgaaaacataatataaaggcaccaaaacccagcaagtgtgtctctgccctcacacaacaactgaccgttaagtcctagtaagcaccaacatcattgtctccaaaacctgttgtatagaagtacccgattgccaggtcctcctcaatctctaaaaaaaaagaagtcacacaagcgtgtgtgagtacaatacgtactccgcaagacttttagtgtatccaatggtaatccgtaataatgcaaggataacaaggaatggttcaccgagttgtccatgaccatggccacgactatccgaatagatttaaactctgcagaatgtgcacaactgcaccgagatgacacgttaaacctgagctaccatacagaaggctcgttccaatatgacgaagccttttcactagctagcagaggagtgccctccaaggcccgaggctcaaacgttgtgcaggtaaaccttgaacacaatatcgtcaaaggcaccgacaagtatggacaataaccataccggcattaatccaatgtcaacaacaatgacctacaactacaacagacgggtctattgcttggaaccaataattctcttagctagggacttcctatgagccacacgtgatttgcgctagtgtctcagatcaatttggacacagttttccaccaagataataaagattttaccctctgttcatttccataattttgcaaacatttttttctcgaaagcccaataatccgattaaaactagcactaccgatataagccagctaagcatattctacacgactatcctcccagcacatgaacccaattctcagtgataacgtaggtgacaatgaatcatgatactcaagtaacaaagacaaggtatatgcagcaattggcaagctacccatgcataatagttttgcaatgaatacaatttatatatttgaaatatatgagcaattgatcaagggggagcttgccttggtcctggacctcctggtattcctttggtaccacctcagcaggatcgacaacatcgttgtcttcacgaataccgaacgaatgcaataaatacaatggcaaaatttaatagtacaggtaatccaaatatttttgcagagtatgaaagtgcgtgatttcaggaaaaagaatcgcttgaatccgagtttgtatgacggagaaacggctaaaggaagtcttctctgccctaaaatcgaagataaatgaaaaacatcgttttcgctcaaccgagctgctgaaacggctggaaacattctaccgacctaacaggtcatctattaaacattttcttggttctaggggcgtttttatggcgcaaaacctacatatgggttaatgtgaacctattgaaaaacttcagtagttgcaaatgtctcggtccaaaaacaacatcttcatacgagcgaactacacaactcgctaaggatgttaacgatgaccggcgtaaacgtgaagtcatggcagcgactctactcacggtttcagcacgttctaacagtagtgaggccaacctagcatggatggggccgatgggatgttcatggttagctcaaacaagtgtgcacctatggtgttcggtaaaatgccaaggttaagtacggcatgcctacctctgtcctctcattctctagtgcacggctggtgaagacgggcacatggaggctcttggggtactacatgcaaggtactggggttctaacttgtgtggtcttactcctttgagcctcggccatgcatgtagctacagtggtggcacttgggcggctggacaaacgacgacatcgctggtcatggcaaggaaaacacatgcataaacaggagctcagcggttgaggctatcggcaaggtgacggcagatggaagaagttgtcctgtggtggaactcagggcgtcggggactaaaaccaagcatgggaatgaacttagcagggtatatagatgctcccatggggaggaattgggttggaacttactgaggtgaaagttcccaaatcaagtgcatggaggcattcggtcagccccaagagaagaagatcgggcagcagcaagttctaccatggaggaggaggaaaatggattaaggtggggggaggaacacatggtaaagctgcttggatgtcgagatactcaccagggacagagtttagcgcttgttaggtcatggcggcaccgggccagcgttggagaacacgatgcactgcatttgtgctcagcgtcaactgagtgcaaaaacggaatcagtgggtgaagggacgcgaggtgacatggctgggatgagatgatactcaccgatggtattggaacggtggaggtgtgcttgccgctaccacacgtggcacctcgcccagcgaaccaagggacaatcacttgggtcctttggcttcctaagaacaagggcgagttcgggagttaggaggacatggtcttggttaaggaggaagccaaggaagggaggggagagagcgggtgcttgcttaggctgtgttcttccctcaactttcccaactcacctccctcgtgttctacgtgcacgcttttgaaatggctaaacggtgcgtttttttgcaaaaggtttttatacgaaagttgctttaaaaaacatattaatatatttttcaaaaaaattaataaatacttaattaatcataagaaaaggcgttgctccgttttgcgtgcgcaggaggtgagttcctaacctcacctcctgatcacagccttactcccttggcctcgagatggcgtgggcaccggcaagcctgcgacagataaatgggatagggcagggtgttgcagaggctggcaaagggcttctcacgaggtcccgaggtaggcggcctttctctcgtccacattcgagtcaaagacgaggcattcttgggacttgggagcaagaaatcatgggcggcaaaggacagattggccgctgccgcctgccgcgcgtgcaatgcgattgggaggcgtggtggagcactatgatggcgtggcagggcgttggggaggagctgtgacgtggcgtggggtctccagggcagtctagtgggtcgtggctaagctgaaactcacggtcatgcgcgagggctagcctggctcacgcttccagcgcggcaaaaaatggctcgtgtttggctgggttgtgggtcccgaattagaggtggggagtggagaccaacataagaagtatgtcccatggagttgcctatcttaccaaataaactagttgaaaccccacgcattgctgcgagattttgtatcaatacttgggagaaatgaaaataccatattaaaagagaaagaatgatatgatggttgatacttacaaatattgagcaaacacttgttagtaaaacttcagccgaaccaatatagtcgaaaaataaaatagggcatgcaacattaggaactgaattgcagcgtcttcgttattctccaaaagaaatagtcatatagttatttaatcctaaaaaaatgttgcatatttacttcgttaagtgttgtgcttgttctgaactcctttttaagtaccgtacataacataatcttgctaccaactgcaatgattacttgattagtgaaaggagcattgacgacttcataaataaaagtatgagcagatagttccagaccatagaggtaacggatattgtgtaattagcagatcatattcaactctgacatgaaaaacatatacaattgtgtttccaacataagaatgtgaaattaccctaaaactctgaaatgtcacttagtctatgtttggacactctcattggctgaacatgtagctgaatatttcccatcagagcttgtatttgaaaaaagaaaaaactaaagaatacatcataattaatgtcatggaggttagatgaaagtagaagaaaagaacttgagaaaagaacaaaatgaagataaagtcctcaagccatacctaaaattgggggaagacatctacaaccaggaatcggccgcaggacgaagaaatcgatttgcagaaacacaaaattgtcatagacctcaagccataccaaaaattggggaaagatgtctatggccaggaatcagccacaggatgaagaaattgatttgcagaaacacaaaaatgtcatctccttctatgagaatcctttgcttcgaaggtaatccaatggtatgacaattttatccgctgctatgtcaatcctcaggttttcccataagtacaggagccaatatcctagatagcactaataagaatgggtcaaacaatataagcttttcatgagaaactaaagcaatagacaatgcattatggaattaccgcaatagctgttctttttctaagttagcagaaacaattcatcaaaaactcccaccttgttcgtgcgagagcaaattcataggctatgctcaataaataaacagaagcaaatacatatagaattggtaaacaaactgaaataaaatcgttgaaccataaactttagttacgtgaagtatactaaactttcatacttcgattctagccatctggctctagcctttgttgataaattggaggagctcagagacttgaccttggctgagtggaattttagactctttatgaaaagtaaggttcttttgctccttaagtttaaacaagtctattggcaaaaaaggtgcactataaggtgggcaaagtttggtggtgaaaatacaaaattctttcatgctgcggcaactgaaagatatcgcagaaatttaattatgcagctaaagtctgatgatggaagggtgctttctgatcatgcagaaaaggcagaaattatttttcaaacctttcagcaaaggatgggagtttcttcttctccagtcatgcacttcagtttggcagatctcatttctgctgctcctgatcttcagtcattgtctcttggctttacaaccatggaaattgatgaagttgtcaacaaaatgccaattgatagatctccaaggcctgatggattcaatggttgcttcattaaggcctgttggcctataattaaacaggacttctataatctttgtgctcaattttgtgagggttctctggtgcttgagagtattaatagatcctttataactctagtccctaagaagtcttctccagaaaaggtaaatgacttcaggccaatttctttacagagtgtggctctaaaacttcttactaaggtgctggctgataggctacaatctgtcatcattgaattgatccaccaaaaccaatatggtttcattaaggctagaaatattcaggactgtttggcttggtcttttgaatatctgcatcagtgccagcattctaagagggaaatagttcttttaaaattggattttgagaaagcttttgatactattgaacattcggttatattggacatcatgaggcagaaaggctttgatcctaaatggataagctggatttctcatattttttcttcagcctcttcttcagttatcctaaatggtgttcttggcaaatccttctattgcaaaaggggtgtaagacagggtgatccactttcacccttattatttgttcttggagctgacttgttacaatctatagtcaataaagcttgttctcagggagttcttacaatgccaatcccaacacctggtaatgaatttctgattgtccagtatgcagatgatactcttatttttttgactgcttcccaaaaagagcttttctgtctcaaggcaattttgaacacttttgcctcttcaactggccttaagattaactatagtaagtcatgcatgattcctctgaatgtagatttggaaaaggttgatcatctctcaaaattgtttggttgctctattggtaagtaaccttttacttatctgggtcttcctcttggaaccacaagaccaagagttattgattttgctcctctaattgatagagtagcgagaagactctcagcaaccactgctttgttatctcatggggacaaattgaccattgtgaatgaagttctttcctcccttcccacttactacatgtgctctctttcactttcaaagacagtcatagaaagtattgatagagctaggagacattgcccgtggaggggatctggtattaattctagtaagaagtctttggttctctgggaaagagtttgtcagccgaaagatagaggtggtttgggtgtaatagaccttagattgcaaaataatgcccttctcttgaagaatctgcataagttctataatagatatcctgttccctaggtcagtttgatttggaatacttactacactgcagaacctcctcatgctgttactcctaaaggatctttttggtggagggatgttttgcaatttgtggaaatttttagaggcatctcggcctgtactgtgcaagatggaaaatcttgtttgttttgggaagatttgtggaacaataaagtcagggcattggtttatcccagaatatattcttttgccaggaattcaaatctctcagttctgatgttctctacttctgatctaccttagctctttgccttgccactttcagagcaagcttttcaagaatatttagcaatgtcagctgcagataccttggagcatcttaatgataagtgatcgctggacatatgtttggggcaacggtattttttcttcacagaaaatttatgccatgaatttttctcatgtccatgtgcctgtttatattaaatggatttggaagagtagttgtactatgaaagtcaaggtgtttggttggctcctcttgattgatcggttaaatacttatgacatgttagacagaaggcattgctcccctcaaaatgcttccttgctctgtgtactttgttcaacaggatcaagggaaacaactctccacttatttttccagtgtccttttagtactcaatgttgggcgcaatttggtgtggtttggaatctttctttaagctttggtgaaatgttggtcacggccagaaattcatataactctacccattttgttgagaaggtgctttatgctgcttggaacatttggaagcagaggaatagtttaatttttgaaaacattgttccctctgttccctcttggagagttctctttaggaatgatctctcccttttagttcatagagtcaaaaattctgagagagatacattgttatagtggttaaatttgttgtaattttttcccccttattaatataaaatcttaacggtgggggcttcccctaccgtggttctttcaaagaaaaaatcaacgaatatggttcacggattggatgagttcagaggatggtggaaggtatttgtggtctgttatgaatgctgaagggatgttaagaggctcataaagggatgctatgagacttgtgaaagctccttgtggcttaattaattgtgttagttttcctgtaatttctcaagtagaaatagaaaggagaggaaatggattggggcaaggtgatgagatggcaatatgtgccatcaataatcaatcctatgttgagaaaataaatcgatgatgtggcttcttctaagcacaactaatggtcttaactttctagaaagaagggatagtattaggtcaacaggtcaacgataagagacaatgagtggaggagagaaaggtctccagttgggtgaacagtgccctaaattttccaatttcgactgagggtttgaatggttagatgggtaaacttgcttcaatccaaacataacttggaggcaaggctagtagtaaggtatggaatatttaggaatttatccagaatttttggacaatattgaaaactcagagtcggttatggcagtgggaaccatttagagcaatcgtacaaacattattttgctcagctgggattttttatgcacgaaataattcatgcagtgcagtgcacatgaaaaacatttttacgaaccaaagaacaaaagtggattgttacaaaacctacaccctcataccatggcggaccggccaccaagatgatgcccatgtaacatagacatcgtcagagtgcgagtatggtcctagccgcttcacttttgcccacatgaccaaatagaggggaaacccgaccaaacccaactatataataaacttgtggcatccgcatatctctgtgatataaccatatatcacattccatcatcctcatggctcgagaacgctaggtgagtcctcatgggttcacggcttgagaacgctggggtcataacgtcaatgccgagacatgccactgagccccacgtccagcctcctccttttagcctaccatcgtgccagcgtgaaccccaacttaccctagttctattccaagcagacccaagaggagaccacttctaggtcaccgcgaacacactactacaaaaataatttttccgtgcggtcaaaaaggattttcgcgtgagatatggaacacctgcacgcgaaaatcgggttttcgcgtgcgggtgctttatgtggcccgcacggaaaaacaaaaataaaaaaaatcaaaaaaaagaaaaccctaaatgaaaccctaaatctggcggcgccgctcctggccgccgtctcctcctcgtcgtcgtcggcggggccggctgccgccgtagctcgtcgttgtcatagctgtcgccgccactcgtctcgtcgtcgtcgtcgacgtcgcgcaggagaaggcgggagaggggcaccgccactggatctaggcggtagagaggcgccgcgccacagggagagcatggggacgaccgtcgtccgcctccgctccatccaccttcacaattatatttgttactttttgttacaacttatagaagttaaattttaacttgcatattcgtagagtgatatatttcatattaatctatcttgtcaatttatttcaattttttatggctttttatataatatgcataaaacgatgggatatcctttcaagggatgaatactctttccgaggtaagaaaccacatcatccacgaaatccggaaaatatacaaattggaattacaaattacaatcaccaccagttagtaattcactgtacgtgagatctgcacatactgacctcactttatttgtacattgttcaacatattacacatttaacatatcatattcatcttggtaatatatgtttagcttaataaggaattagaacacgtcaccgttgatgtagccggtcttcttgtcccagtacctgttccagaccatgatgcctccgtagttggggagcttgttgatgaactgcagcacatcgaagtagagatccttgtgcgacatgtaggcgtccctgtccgcctccggcgaagccacaatgctgacgtagatccggctgtccgggtacgccgccgcccacttctccagcgactctctccggccccaggtgcaccgcccgtcgttgaacagcttcacgtggatgcggctgaagagccccgtcgccagcgccgcctgctgccgctggtccgggaacacgcaccgcgccgtcgccgtcagcatcacgccgccattgctgtggccgtggagcagcctggccagctcgtcgtagtgctccgtcgcgccctggtcgatgaagaagtcgatgccgttgacgacggcgtcgccgaatgggcgggcgacgccgctgcggccgccgccgaggaaggcgttccagaggtagtcgtccaggtcggcggcggcctgggaggacgggaggtagtactcgccgccctgcccgccgatggcgaggaggactgtcttgcccttggactggcagtacttgatgtcgccgccgacggggacgacggggtggccggagaggtcgagcttgtagctgccgcggccgaacgcgctgaggaaggagatgatgacggtgttgtagaggccggtgtcgcaggcctcacggagggagccctcggccttgttccggccccagaacaccacggtgtcgccgatgctgctgctctgctgcgccgtcgccggagcggcggcgaggcaggaggagagcagcagcagcacggccaggggtgcaagagcagccaggcatcgcggcgccattgatcgatcttacgcttaattggctttgcaaacctctcgagattacacgacggagctagccgcgatggatgattgatgcgaggtgtattgcatggatatatatagggagatgggtattatggtatgtgcacgcgcgtcggcgcggacgtattgtgttgtgttgggtgcgcgccgtcggcggcgtggcgtgcaggcatggatgcgtcaatgcgtggcgatacatccaacgacaacgacgaattaccttttcaccttcaccgtacaactggccgtgctatacgtacagcgccattagcatgcacgcgatgctagctatatgctggagacctggagtacgacagtacgtacgggtagctagaacgcgttagcaagcacgcgattgcacgtgcgtcaagtaagaaaccacgagcgcgaaacaatggaattaaccaattaactgttcgtcggattatcacgctgaagtcctgaagataacgatgctggtatgtttagaaagagaaagatatacttgacacaaactttgtcaaactactttgtttgttacgatttttactttactttacttctctagcatatattccggccggctaccttgaaaataaatataccaagtcgtgttcggcgtcgtctgttttgaagagactggaagtaacaagggctagcggggtacggtgaattcaattaatggttctgcgagcaaccgttcaccaattagttcttgtatctttaaaaaaggttctttgtctcctcaataattatagggccggggatccaaaaatcaggcattgttttatcactttagagaaatataatattgcatcacgttcttaaatgtttaaacttacttttattttttttaaaacaatgtaacattaaaaatatattgactacagtatcaattactagtacatgatacattgagaaacatagaaaaattaataaagttaaaattttgaatatgcaacacaatcaaattaaaattaaattcttcttacacgtgaaactttgaatttcaatggcattagaaatatgtataatagtgtgacatcttgttataaaaatttaattgttcaatcaagattgtgattaatagatttatattgctaatgatcataatcacaaacttcgcgaatattgataagctttaattaatatctcagtgcatcggcctacattcaggatcaacatatataattgtcgaaagacacattgaaatggaagctctcgaacctatttcgaagtaagtttaggatgaggtttctgatccggttggtgtttcgacatatcaactcaggtttgcctacctctctagttgcagagagaggagaggggcttctatctttttaggtctctgaaaagctagttgacatgagatccaatcaaggaggtagtactttaatttgcctgagttcctctagatccaactaatcggtattacagtactcccgcgggttgttcaccatgcgttccatagcatttacctatttgcctttgtgtttttgcgcctctagaagcttcatcgttttttcacagtcaaagttcaagaaataaggtttctgatcagcaaaaagaatactttcaatcttatactatctcggtttggtttgatctatcaagatttacatatactactagcataatgcttgtgcattgcaacggattataaataacatttattgacataaactaaatcctaaaccatatatcacaattgggcataaatgatgaaggaaatataataatcgaaataacaatatgaaactacaaataactttggccagaatgataattcaatatcagtaaaattatataactaaatcctgttttttcttttagctataaataattcaacacagagaaaaattataagttaaaacaatttttaatatattaaatagtgctaaaactaatactgtaaatgtgaaaacaattgaaattagctagaatttttttaaaaaaacttattttagcccatagatgaaaatccgatgcaataattctgaactggtaccgtttcttcgtcatatatttgaaatttatagttatgttcatttatatggtctatattatgtgtgtggtccaggagcatggttgggctggaccaggaaggaatagtacccaactggctctgcttatcgtcttccctagctgaaggcaagaaacaaaagagggaagatgggtgtcggtgctttggcgaccaaacggcggtgaataagatggtaggatatgtcatacgatatgactcgcccatagatggtggaggtgggcaaccaaaaaaaaacagagcagtagaaacgcagcaggcaacgacgtgatcctgatagagagagaaacaatggcaacgagttctggtggtgaacatgaccggatgagtgcgtcaaaacacgttccttacgagggggttccattttccttgaacgcgcaggaagaacaaaagatggaaaaacaatactaacactgttcattatcttccctagctgaaacaagaaacaaacgaggagggaagatgggcgccaatgctcctatgactaaatggtggtgaggaaggtggttggacgtgtcccacaatgtgactcgtccatagatggtggcacttggtaatgaaaaaaaccagaacaatgggaacgtggccaacaatgacgtggtcctggtagagagagaaatggcaacaacgagctctaatggttaacaccaccgggtgagtgcatcaaaatgtgtttccaaacgaggaggttctgttttccttgaacgtgcgggaggagggagcgtagtggagaagaggggcgctaggaggaggggtgccaagaaggagaggggctgcagggggaggtcacgagggagagatttggggcgcctagagggagggatcacaagggagagttgtggggcgctggaaaagagccggaggggcgcgggaaagagggaggagtcgtgcgaggaggaaggagtgcggccatgcgggatggggaggtggatggacgaaaaatagtcggaagccttacgtattttataattattaggtatagatatagatatattacatctaaactccgaccaatgtctctttaatccttcatattcatatctatcggttatatatccgatcgatccaaaattccatcggtatcggttggacacagaatactatatcacccctgtggtcgattggccccgtgatctaatcttctcgtttttaccttgttagttgcaagatcaaactaactagcatgttcctaacccgattttgataggacctatactagagtgaagcaaatatcttaggccttcgtgtgtgcgacaaattttgcgtcaatgaatctcagagcatattcaacggtacgtatatgggtgtattatgcaaccgcttgcacaaaacttgctattagcagaatgcattatgcagtcatgaacttggctttaggactgcataattgcatttattatgaagtaaaactagtgttattccggttattctgcttatgtgctgatgcttcgatgatccttcggtgattttacctagttttctgatgattgttttaaaatttacatcaatattgttattctgcttgtgtgctgagtcccatatgattatttggttttttccccagttttctggtgctttgttttaaaaattgcaacaaattcggtcaagatttgtccgatatttctgaaattcgtccatttcagttgtgccgaaatttttatgcaattgaatcccagaacttgtagaaaagttcaatctttaggagacagggagtagaggttagggagtatgtattggttgggcgatcagaatcgaaccagaatccaatgccgatcttccaaaatattgggttctatagttactactattttggattccgatcgtaattcccagtccgtctggctatatggctattggcttgtagtagtacctaccgactacgatgatccgatccggtatttgatcaatctcctcctccctcacactgtatctatataaataaattgctagggttggggaattactaccgagaagcaaagtgcgtgcattccatcaagacgcccaaagacgcaacgcagtaaggaaaagaaaagaaaacaaagagaaatcatgtcggcggcggcggcgagattgagagcggtgtttggttcaatggcggcggcgcgtcctctcgtccgccgtcggctttcttgtcgcccttttacctcctcattagcgcctcccaactaccaccaacaagactgctagtatgagcaaaccaactaccaccaacaagactgctagtatgagcaaaccacatgccatcgccaccaccagaccaacaacaacaacgccgcacgcggctgaaaaccaatctgacatgacttgtcgtcaacaagctggtgattcctcctcctgctcatgctcaaggtacgtgcgtgtaatcctcctcctcatctatatatattactccagtacatattgtttacacccatataggtttcctccgagtgggccggtctgaccgccggttgagggccggtcagatcggtggtgtgtggccggtctgaccggcagggtccgagtctgactgtgtttcgtcgggtttcgagatttccttactcgggaaggcatgtttcgggttttctttggtttctatcccgagttggacgtagaggaaggcatgtagagggtaataccaacccctatataagggacatggccggttccattgtaactaaccaatctataatcaatcaatcgaatcgtttttcatattgcttttagttttctcttagtctgtccatctttgtcggtttgcgccgtaaaccgtccgccgccgctgcgagagtgcgacacctctttgtaggtttgtcctgaaaaccttccgttttgcccacgagacgggtagctatctagaaatcggctctgctagccggtttagttatcaaaacccatctaggtttagctttttgctagatcgagatagttggcgactctaggatcaccgtaaggcataaggtgctatgatcgtgcttgtcaacttgtcacaaaagttgacaacacgatttttggtgactccactggggagatccgttcagcgtcaactcaacttcgacttcgccatgacgaagcagtcgtcatcaaaggtagaggtggagcctatcaatgtgataccaattacattggatgacttcgaggaggaagatcgcaagtccatagaggagtacattaaggagatcacataggaggcgttgatgagggcgtgcactaggactcgtcaaggcgtgatcatcaaacccgggccacgtcctaagctcactcccgatttggtaagcaatgaagaggtaacacaatctatccaacaacaagttgtatctacaaaagattcatccatgattatttttaaaaataagttagatgcaactattaaaggtcgatttgataagtttttaagaactaaattcggccctctcatggccgattttatgttaaaagataaagcctctaccagtgctagccaagttcctatagatcaaacaagtagtggaaccgatggagcggcgcagacagccggtccgatcgggcctgatggccagtcagaccgcgacttcgccgtcggtccgaccagccaaacggccggtcagaccgggtattatcacggcggtcagaccgggactcaggccggtctgaccgcgcctctggacgttggtcagaccgggccctggactggtcagaccggcgcaattattccgattcaggggatatatccaatgactaatgctagttatttgtatcatcttagaacatttgatcctcctatatctactgctgcaactaatccccaagttcccccacatgttcctaatgcttataatgatgttgctaatgggtatcctcccgatactaggtaaggccaatataatcatattgcgccgcaaacacatcctattaggccaccaaatccaccaccaaatcaacataggcctaataatgtggaggaaataattagtgggattattagggataaattcgggattgaagctaggaatcgtgctaaggtttaccaaaagccgtatcctgactattatgataatgtgccattccctcgtggttatagagttcccgaatttgccaagtttagtggtgaagatattaggaccacatgagagcatgtaggtcaatttttagcgcaatgtggtgaggctaatagtgatacttttaaattgcgcttattttctttgtctttgtccggtaccgcttttacatggtttacttctttaccggcaaattatattcatacttggactcaattagaacaaagatttcatgattatttctatactggagaaactgagcttaggttatgtgatttgacatcggttaagcaaaaatataatgagcctgtcattgattatattaagagatttagggatgttagaaaccgatgttatagcttgaatataactgatagagatttggctggtcttgcttttaatggtttaatttctcatcttagagaaagattagatgaccaacaatttcttgatgttagtcaacttatgcaaaaggctctggctcaggaaagccgggttaaggataataaaaaaattgttagaccatataagaaaaagcctaatattaatttgattgattaccctgaggctagtgatagttaagatgagggtaatcatgatatgtatattgctgagtggtcatggactaactaaaataagccttttgtttgttctaatctaatgccaactcctcgtaaagatcggcaaagtgagattaaatatagttttgatgtggccaagtgtgataagattttttattattttttataagacaaacaaattagattacctaaagaccatatcataccatctcaagaagaattgaaacgtcgagcttattgtaaatggcatgattcccactctcattctactaatgattgcaatgtgtttcgacgacaggttcaatcagccataaatgaaggacgattgaagttcaccgatggttccaagatgaagcttgatcatgatccttttccggtgaatacaattaatttcaatgagaagaaggtgttgattcggccggagcaagccgaatctactaagggaaaaggagtgatcattggcgaatcgaggccgaagatgatagtgccaaagaagccggaggttggtgtttggaaggaaaataagagtgaagcttcaacttctaaagctcctaggaagaccaaaatgacccttgatatgcttttggagaagtatgaaaagcaaagtggtgagagaactcgcaacaaagggaaaagaccaagatcacctcctaggaagcgatttggtcactcaccaagacggtcgcattcacctccatatcatcattcacaagacatgtcatggggtccttatccaatgctgccgccgggttatctttatccttattacatgccatggggggcagcactgccaatgttcaaccatatgcctccaatgtaattcaaccaagggtgcggaggaccaaggaggccaatccatgagtgtttgtcttcaccaaacaatggccagttttatggtaagaaccgggccagtgaagaaaagagggaagggaagcgtattaaggtggaggcaaggacgtcgaaagtgattaccatcaaagtggggtctcatgatgtgccaataccttctggagatgaagttggagagtcttcaagcaacaaaaccgaagccggtaccagctcatcgcactcggccggtctgaccaggccctctggccggtctgacctcagccatacggccggtctgaccgggccatctggccggtctgaccgccgaccgaatgacggtctgaccgatgcctcaagccggtctgaccgccgacctaatgtcggtctgaccgatgcctcagaccggcgcatctggccggtctgaccggtggtctacgtccggtctgaccgggctccagcgccggtttgacaggaggttcacaaggagtaaagtgggggcttcatcgtcatcaagtaaactcaatagggggcactacttacctcctggaacagagccgaaacctaggtggatgcctaaggatttgacggctactcaaaggagaaggttgcaacgtcttcgggcccaagaaataagagagaaaaaggccgaagagcaaagagataaaaggttcaatgagttgtaaccaccaccggtatggaggcgtaaatccatagagaaggaagaaccggttgttgtagaggagaaggaagaacaatcagttgttaaagatgagtcatctccaaaagaagacatggatatcaacatggtatgtatgttgcctatggagttttgtgctatggatgaagccgaggttgctcaattttcactaggtcctaaagatgcggtttttgagaagcccgatgagtcaaaccgtcatatgaaacctctctatctcaaaggtcatattaatgggaagccggtctctaggatcctagtggatggaggtaccgccgtgaatttgatgccgtactcgttgtttaaaaagttggggcggggagatgatgagttgaagaagaccaacatgattctcaatggcttcaatggtgaaccaacggaggcgaagggtatcttttcggtggagcttaccatgggaaacaagatgctaccaaccgctttcttcatcgtcgatgtgcaaggtaattacaatgttattttgggtcgttgttggatccatgccaattgttgtgtgccttctaccttgcatcaatgtttaatttaatgggacggcgatgatgttgagattgttcaagcggatacatcggccgaggttgcaatggccgatgctacttttgagtggcgtcatgggaatattcaatgcttatcggggatggatctttctaggtatgatttcattagtatttccgatggcaaatttgtacctatctctgtaaagccggctagtttagcacggctaggccatgtcaatttgtacaatgagtagagaagctaatctagagttgttacaaaagagggtacaagaatatcggtctacaaagaacgatattggtgaaactattaaagattttgatgaagtggagaagcttggacaggggtttacatcggccgatccattagaggaagtagacataggtgatggaactaaaccaaggccgacttttgtaaacaaaaatatgagagccgattataaggttaagataatcgagttacttaaagagtatgttgattgctttgcattggagtaacatgagatgccgggtcttagccgtgagcttgttgagcgtctgcttccaattaaaccgggttttaggccttataagcaaccacctcgtcgttttaatcctttactctatgaccgagtcaaagaggagattgatcggttgttgaaggcggggttcattaggccataccgttatgcggagtgggtttctagcattgtcccggtggaaaagaaggggagtggtaagattagagtttgcatagactttagagatttaaataaagctactcccaaagatgaatatcctatgcctatagccgacatgatgatcaatgatgcctcgggtcataaggtgattagctttttagatggtaatgccggttacaatcaaatttttatggcggaggaggatatgtacaaaacggcttttaggtgcccaggatttgttggtttgtttgagtgggttgttatgacttttgggttgaagaacgcctgtcacatcctgattttcgttttaggatttataaattatttaataaattattattagaatttatattaaatgttcattaatttacaagtgaagttaaatgtgggaaataaaatttcctaaatataaagcatggatggatttaatttttattaaattatccatggttaattatattctctggaattttctcagatttttcggagctcaactcttaattttaatcatacaaagaacatttcagtaattatccacatattaaagtaatcattaaatgttctaattataattttgttaaatactttgagtgttcaagtattttcaggatttttcttaaaactatttgagcattggaagtatttttaacaactcaaagatcatttcagtgattattttaattggaaaaagttgttaaatcttctcctaagccgttgggctgatttcagcccaacatctctctccctcgcgtgcgtgctgtgcagcccaagtcggcccagccgagctccccatgtctttctttctttcctttgtttttcagccagcccaagacgaaagtgtaatttgcttccccgtttactgttcatcttcaagcttggacagaagcccgagctgccgtcctgtgctctagccgacgccgattcctccaccaaatcagccgcatcccgtgctccgtttgcaaaattagttgaggggaaatattcctcttatcctcctctatcttttcccccaaaaatcggactttatcccgaagaaatcaacgcggaatcgaattcgttttcgagtttatctctctaactaaccctcggtttttccggcttcgattcctctcggttggagtctgatctcttcaatccaagcctataaatagcatcccctagtcgtcctctttcgtttgccccatctcccgagctctctcgtcgcccgtagagccgccgccgctagcatcgtcgccgctgccgtccgtcgccgccgtcgggtgcgcacggaggagaggaaccccgtccgccccttcgcagccgccgaagaccaccggagcaccatcgccgccgtcaagccgaaccgtgccgccattgaacctcgtcgccggccgtcgttcgtcgttgtccgtcgttgttctttgcaccggtgagttcgcgtcgtcgtcctctacgcgtaggtgtcctcggatagcccaaccgagccctcttttgccggtggtcgtgtcaactgtgccatggccggcgatgatgacgtcagcgatgacgtcataaatccctttttctaggttttctttattagatgaaaatcgattaaacttcataaattcataactaaatcatcgtaactcggatttgagtggttcaagttgctaattcatctaaaatcgagatcttcagttaaaaatatccacatgtactatttatgcttgtttttgtactgttttgttgattttgttcttttgctttagtttccgacatttcggaggagagcgttttcgttgaggaaggttcggaagcgtttggggaagctcaaggcaagtcacacagatcctaaacacaatcctttgagcatgttgatcctatatttaaattctctatttatttcaactgtttattaattttcgaatgtcaccgggtggtgtgaacctattcctttgttatggccaatttgcattgaatgccctattccttgataccttgggtaataaattgactagcttgaaccttgaaccttatgtattggtttggttcagctaaatgttatatatataattgcttagccatgcttagaaacattagctcactaatgggatgaatcatatatactacattattatttatggttatatttaatgatagctcacgatggttaatcgtgttatgataattaattagtaattaaaatatgattaatggtgggttgtgagcacatggttttgaaggtcgtgctcatgacaattaaagaccggttcgcgagctactgttgtgaaacattaaccgtaccaaccacaagccaacgtgggcaacggctttaccttttgtatagcattgttcattacggggtgccagacggagaagcggtgagaagtccgtggggatcgctggggagtccatgcctctggttatatttatagagagggtgattatgatccaggaatggtgcactgtggtgagttgtgttgtgcagggggtattgtcacagcctctattcgggtactttctagtatcgcaacgcatggtagacatgatgttgaggctgtgtcttgtgggtacagtggtacacctctggccagagtaaaactattcgaatagccgtgccagcggttatgagcgagttgagcaatgtttttcgtgattagtctcacacctctcacaaataattattgatgcaataactggtaataatttgtttagctcctggtttggagttagatctgtacagccgggtatggttgttcaggatggttgggcctgagcagcatgggtgtgctgttcagtgttgattaaaatttctgattaattactctactgttttacttttaaatctttgtaaatgctgcttttgcaaatgagcctatattatgccatcctttggtatccttgtgcacttgcatatttgctgtgtggcttattgagtatgtcatatgctcaccttgcaataatcaatcaacctcagttgaagagaaaggatccaggagtagacgtttggcttataccccagttgagctgcctgtgggagtggagctgaagccatcgctagaccgttaattccgctgctgtttttcttttcttttgtaagtatgtaacgttattattatgatggatttgtatattaaattgtcagtttgtgtacctcggctgattcctggacgaggattttatgtataaattagtttggaaattactagtaaatttccgggcgtgacaacgccggtgcaacatatcaaagggcaatgaatttgatcttccatgatttgctagggattatcttagatatctatattgatgatattgttgtcaaatcggatggtatggagggacatatagcctatttgaggttagcctttgagaggatgcgccggtatggtttgaagatgaacccacttaaatgtgcttttggtgtgtcggcggggaagttcttaggattcatggtgcatgagagaggagttgagattgatcctaagaagatagaaaaaattcgtgatttcaaatcaccgacatgcaaaaaggaagttcaaaagttgctaggaaaggtgaattatttgagaagatttatttctaatctagcgggtaaaatcgatgcttttgttcctatacttcgcttgagaaaggaagccgattttacttggggagcaaaacagcaagaggcgtttgaagggttgaaaaggtatttgtctactccacctgttgtgcgggtgcctaaagccagaaagccttttcggttatatattgcctccgaagacaaagtcattggtgccgttttgacgcaagaggaagatggcaaggagtatatttttacatatttgagccgccgtcttttggatgccgaaacaaggtatgtctttatagagagactttgtctatgcttgtaccaaattgaggcattatttgttatctagtacatgcatagttgcttgtcaagccgatgttattaaacacatgttgcaaaggccaattctaagtgggagaattggcaaatgggcatatgctttgatagaatatgatttggcttatgaaaaatttaaatctatgagaggctaaattgtatgtaattttatagtagaccatcatgtggatattgcttatgagggagaagtttgtattgttgaagttataccttggaatatttattttgatggttcctcttgcaaagaaggtcaaggcataggggtagtttcgttttcgcctaatggaatgtgttatgaagcatcggttcgcttggaatattattgtacaaataatcaagccgaatacaatgctttgttattcggcttacaagtcatggagatggttggagctaagcacgtggaagcttttggtgattcggaattggtggtgcaacaagtcgccggaatttataaatgcttggacggatcactaaataggtacctcgattcatgcttggatattattgccaattttgataattttgctattagacatattgctaggcatgataattctagagcaaatgatttggcacaacaagcatctggctataatgtgaagaagggattatttctggtattggaagatgtcacgaccggaattaacccaacgagcattccatacgttcgtatattattccttgtcccaggaggcaaggtacaccaaaagttgatacaattcagagtttaacaagcggaagcgtaaatagttaatttattacatgggcgacgaaggcccagcatacacgaagataaacggaaaactgcgaaagactagggcgatgaccacaggcacttgacggcaagcacgagctagacaccaaagccttcatcctccaggaactcttcttctgagttggggaaaaattgagcaagattgagtacaaccaccatactcaacaagacacacccatgaatgcagaataaatgcaaaggagtacaagggagttataataaaggggttagggtttgcagtaaacagcatttaaaagacttttagttgctctaggctatgttgtaaagacgatcctagagctacacaatgttattattcaaggccgtgaacccacacgaacctgccttaacccaaggcctacgatgatttagaccgaactggcaaccagacccaggtcccatctcgtcccaagccaacccaggccaaccattccacattttagttgttaggcatgttttaagaattaaaacactaacttgggtacattgctaggcttgcccataaccgagggcgcggctattcgaatagattgtactctgatcagaggtgtacaactttacccacaagacacgtcttccttacgtgtaaccacgtgccacataccaccatggcatacgggcggaagacgtgacatagttcccaacccatcctagccatagacaagagtaccgacccaaccctgcctacggccggaacccccgagacaggtaggcaggattgagccccaagcaacaggacatgggccctgtgccatgacatctcgactaccgggccacggctcgtgtagccttcatttgtcctagagatgtccatcgagctccgacttcgtccgtctccatccgtgtacttttgcccatgaccagactgagccacaaactaagtcttacccactagacatgtggaagtacggcagtgctttgcaacagaggcccgaagaccggtccttatagtggccaaggtgatactatcaaaaccatgcacctcgagcccagcctaaaaccagtttgagggttttgaataggggggggggaagtgtgtgtccaattccacataatccaaccattccataatgtccaaatgatatgagcattcccaaagtctaaggttataaaaccacctaatgttgcctaataagttagcgaagcagctagctaaattcatactagtggaaccatgaatagggtaccaactagttggggttttgtttatcctagggtgaacaaggtaataataataatagcaataataataaggtcataacaaaggtaaataggcatggctaaataagacagtgataacgcgggaatttaaataaagcgataatgcagtaatttaaaccaaaataattttataaactgggattcgatatgttcaagaatgatgtgacttgcctttctcgctttcccaaaagtctgttttaacctctacgtagagcggatcttccgaagctgcagcgtctacacgaccaatggaaagaaaaaggcttttactctaataaaatccatataacaagcagaaacaaagcacaaaaagggttcttgacttcttaaggaaaaattagagacttgaacggtccaattctgagttcaaacggccaagttatagcctgaagtttatatgctcttttaagtgaatatttgcgaatttcttcatttaaattttaattaaaaaatagggtttattgcgtcagccgaggggagggggcgcgcggaccgggtccacgggagtggtgggccccacgcggcagcccctcggtccacggtggaccgggtgcacccgcggctcaccagccggcgccgtgggccccactcgtcagccgcacccgagggcacgggcggctgacggccgggccccacgcggcggccacacggcgctcccggaggcggccacgtcggcgcggctggcgggaggcggcgcccgcgccctgtggtcgctggcggcggccataggcgcggcggagcggcggccgagagaagagaagggaaggggaaaggaggcggcggtccacggctcaccgcggggcgacggcggcgacggaggaggtggccggagtggagggaggcggtggcgcggctcgggttgacggggacagcggcgtccggcggtcggcgagctcggcgaggcggtagacgggatcggcggcggtgtggcgaagccggaggagacgacgccgaggcgggggacggtcccggcgagcggataggcccggccggaggtcgacggcgacggcgaagagagaggatgacagtgcgagctcgattccggcggggagatagggcggcgagtgtcggaaacggacgagggaggcgcggggagggtttatatagggttgggagtaaaaaggccggccggcggggaaggaaaccggcgcggggttcccggtcggcatcaatggcgccggcgagatttgcgggagcaaatcttgccatttgaacgtgggagagagaggggaaaatagggggaatgggagagggaatcacggggaatatttccccccacttaattgcacgcgggaacggtaaggagcggcgggattcgcggcggcggtggtgctaggtgcaggcggagcggcgggaggaaggggatgacgggtgggccccacccgtcagcgagggtggtgggcgggcccgcccgtcagcggcgcgcatgcggggagagagggggaggccgagtggcccggggagaggagagagagggggagggagttgggccggatttggcccagagagagggaaggagggttttagggtttttctttttataaaaccttttcaactttgtttatttcttgataattattatttgtgctctgaaaattccactaaaatttatttacacattttagtcttttaggaaatatacaaaaatcctccaagccttatttgacttttaacatggcacattttaatttttggaggctttcactaggattttaattattctaggcataatttaaaggatatattttagggtcgttttgggacgtgacagaagagccggtgcttaattttaaatctttgtgcgaaattggcaaaattggagaccagggccggtctgaccggcattgcacggccggtctgaccggtgaccaggggcggtctgaccggccacatgccgccggtctgaccggtgaccccgaacggtctggccggccttgtatggccggtctgaccggttttgggcagagcgctggggggcatgccataatcaatttagaggccaaattaactgtgaattcgaacatttgtgcccaggaaacagaggaggattggaggattcatttgattcgatatttgaaagatcccacacttaaggttgatcggaaaattcggtggcaagcgttcaaatatccattgcttgatgaagatgtatatcgccgaaatatagatggtgtcttgttgaagtgcctagatgaagatcagtctaaagtggctatggcagaggtacatgaaggaatttgtggaactcatcaatcagcccacaagatgaattggttgcttaggagagcggggttctattggccaaggatgattgagaattgcttcaaatactataggagatgtgaagcttgtcaacggttcggcaatgttcaattggcgcccgccgccgtgttaaaccctataatcaaaccatggccgttccgaggttgggctttggattttattggtcaaatttattcttcgtcatcaaaggggcataggttcgtgctagttgctacgaattacttcaccaagtgggccgaagccgtgcctctcaagaacatgactcatacggaggtaattgactttattttgaagcatattatccatagattcgatattccgcaaacattaactacggatcaaggtgcttcttttacgtctaaggaagtaaagagttttgccgaatcttatggtattaaattgttgagttcttctccttactacgctcaggctaatggacaagccgagtcgagtaataaaacattgttgaagctagtgaaaaagaagattgaggaacacccaaagaggtggcatgaggtgctttctgaagcattgtgggctcataggatatctaaacatggtgctactaaagtcactccttttgagttggtttatggtcaagaagtcgttttaccggttgaggtaaatcttggttctcttcgttatatcaagcaagatgatttgtcaagtgaagattaaaagatgttgatgggagacaaccttgatgaggtcatcgacaagcgcttgaaggctttggaagagatagagaaagagaagaagagggtggccaaggcgtataacaaaagggtgaaagcaaagttgtttcaagttggagacttggtttggaagacaattttgcctttgggtactcgatccagggagttcggtaagtggtctcctagttgggaaggtccttatcgagtatgcggtattgttcgagggaacgcatattttttggagacacttcgaggggagcgtttttagcgagcaatcaacgggaaatacttgaagaaatacttcccgagcgtttggcaagacgcttaggaggtactacggccggtaattgagttatcgtcctaagaccaaaaacatgttctatgtttttagattcacgttgttcatcaaaaaggcagggtgtttacacccaaatttggcacctaggattaaaataggaaatattgccaaaatttggaagtctaccggtttcctccgagtgggccggtctgaccgccttgtgttgggcggtcagaccgccggttgagggccggtcagattggcgttgtgtggccggtctgaccggcaggtctgagtccgactctgtttcgtcgggtttcgaggtttccttgctcgggaaggcatgtttcgggtttcctttgatttctaccccgagttggacgtggaggagggcctgtagagggcaagaccaacccctatataagggacatggccggttcattgtaaaaaaccaagctacaatcaatcaatcgaatcgttttttcatattgcttttagttttctcttagtttgtccatctttgtcggtttgcgccgtaaaccgtccgccgccgctgcgagagtgcgacatctctttgtaggtttgtcctgaaaaccttccgttctgcccacgagacgggtagctatctagaaaacggctccgctagtcggtttagttatcaaaacccatctaggtttagctttttgctagatcgaggtggttgacgactctaggatcaccgcaaggcataaggtgctacgatcgtgcttgtcaactcgtcacaaaagttgccaacacatatttgtttgtagattatatatatatatatattatatatatatatatatatatatatatatatatatagagagagagagagagaaagagagagagagacacacacacacgcgcgtcttaaggttttcgccgaccgcttcgcatgcttcaccgctggatggtccgtttttgctttaggcctaacttgctactatattaatgaaatgcgtaaagatatcgattccattcagtccatgctggatgaactcgactgatatagtgttagctatccatagttccataccatacccacacccttagtactagaaattaaccaaccgtttggttaatttctagtaatttaacgtggcatctgccagccgagcataacccatcggacataacaacgcttgctgttgtgtttttgtttactcatgtgcttgcttgtcggatactttgcatttcaattttctcttcttccaacagtccctaaatgtttgggactcattgccagccaccatgtactactagggcgcaaattatgaattatgtatttctactatgatgaggacgaacctctgctcaccaagctttagttgaatcatcagatatatcagttcaacttccaaacttaactttttagaaacagttataatctggctgtttgtacgaaattcaggaatactgtctccaccccaccccaggacatcacccttaaacactaccattggattgctctaaacatcacatttctgagcgataaaattaggagctctgctattcaattaagtaggagaagggataaacatcacattttgcacacgaccaatatccatctgaaacagttttcagtgcaacacgtacagtccaatcacaaataagtgacattcttttgaaaatagaacgtgggatgctaagagaaacttagcacctactcattgatagagaagaataacagcgagaaaacccatgcaccagacggggcgcgaacgtaggatggtccaggccatcccataagtgatactagtatatttgtttgaagatattccatattctgggggattcaacaacaaattctatattttgttgtgatgttaactcatgtccattcaatagaaggcaggggttaaaagaaaatcaccctgctcttctattctgctgtata

SEQ ID NO: 7853 - DNA, 56697 bp, Oryza sativa
agcgtgataccatcccgccataaagcaacacataccaacctgcaacatcggtcattcgtctcaacaaggacaaagaaacatagagaatgtccccagattgacaccatacatgcctccatgaggctagagcaactagaaaccacatatacaaggacgttcattcacaacttttcaactgaaacacctccagatttcttcctacagttcaagagaagaatgcgaggatggtatgaggaatatattgatagtttgaaaagtcaatttctgatcaagttagcatagctgtacctaatttcctattcttacatctgtcattcggtttaaaagcctacataaataatctcacttcaccttttgaacttcactgagaaatatttgagattgaaattgactgggaaatattttgaatccacttacaagtcaatgatatatagcatgtgttagttccgtggagcaagtcaagcaagcctttgtaatatcattggcaagtagtttgtcatgtgtagacagaatattgtcttgatttgttcttctaggaactgtttaggggaaaacacaattttagacttaaatatattttcaccagtgaaagaataatgaagtaagtactatacgaaccatgtttcttgcatgttttaaaaaagttattagcaaaatgcagacaaccccttagatttcaatgtatatcctcccaacgcaactacattagccgtatgatgtctagagtgtgtatgtagcacattatctaaaattattagttgtttcattctgtcaacatatgattcaacactaggatggtatgtaacaaaggcaactatttactaatctctagagttcatcccaaggacacatccttaaaaatttgaaagagatgctcgaaatgcaatgggtacaccggtccaaaccttgtagagaatataatgtaaatacctgtataatccctacatacagacctgcattaaatgacactgtagagacgtttactacagtaaatgcatcatgatgaaaaataatgttttggctagtaaaagccccattatagcacaacccttcacgatgtagtccagcaacatgcatcaacagcttctgaatattgtaggaggcaaaatataagaaagaccacgtcttggggtacaatgattccaacatcttaacgatctagatgtaatggaacagtatggtacaataatctgtcattaacattgatttttttttatcgaatgtcattcacctacagcaaaacacaatgttacaacgttatagacacgtataaataaagaaaattaacatcagttttaaatagataatactcactgtccgactctttctcggtaacgtatttcaatagttgagtttcgatgtaaagtatactccgacaatgatttatcatagtcaacagtgcataggtgtcttgagttttgactcctatcttttgacaagcaaaattgactagagaatcaacctttgtattatatttatatccacttgcacagatacactaacaccgcatgccttgacaaatagtgattgtagcccctgtaaaaaaatggcaaaagagcataaacaccagtatataacaacaaagaacgaatgagagattgaataaatcttgttaatacgatgaagtgcatcaataaaaaaaaagtggcgtacacattactctaagttgtttacatgttataatcatgtacagagattagtttcaatattgttaaaaattgaaaatctaagataattatgtatatacacattactaagatgaagtgcagcagtgcattcaaagaagtggagcacacattactctaagatgtttatagattataatcatgtatacatattagtttcatcatttctctctagattaaaaattaaaaatccaagataattgtggttagcttcagaaagaaaggaattacgtcatactgctttgtaactaaaccgtcagcccaaaaagtagacaaatttatgcatgacttgagaattagaggggatcttttttacctagacttgagcaagtaagaagatggcgcaggcacattttgcttcacatggacttccttcacctcctcctgcgtgttcctgtagttaagacaacccaaaggacagaatccgcaaaagagcataaagagtagcaaatagcaacaaagaacgaatgcaagcatgattccctcccaatgcgaagggctgcaccatcttcacccaaaattttgttagtaagacaaaaccctctataattgccaatgcattaagaaagaaaaagaaaagaagtagcagcatgtttgcattacacatgggaatagcatagtccattctcggtcgcatccaaaggcagatggcgagggaggtatattcgaacaagaaaggaagaagataggtatattatgggagggagcccttagtagatctaaggagacacacacagcagaaccaacaaacaccacggatgacgtgtacaagaaaaggtaccttcttcttgcatagcgtagagttgccggagaactccatccatacgagagctaacattgctacagccttactagctggcatacaacttggcgcgtgcgcttccgtccccctctccatcgccagctgagatttattctcacacccctacagtgttttcaggtgcttaaagtgacatgctcgcttgggggaaacgggagtagaagcacagctgcattccacactgccaccttaatctttaaagttgtcatgatttttataataaaggaattgtacccttgttaagttgcactagatgaatctgagagttcaaattagtttatttcatccctgaatgttcctttctccttttttttgtggatggctacttgcaatgctatacttatatttgacgcttccgcaatgcttatgttttagaggagttgctgtcaaaatttctccttcttcattaaatgtatttctatttagtagcatcccggtgtctttgtagtttctggggtgttacacatcacctcctacgtgttcctctgcggtcaagacaaagacaacccaaagaaaagaatcgacaaaagatcaaacaacggtagatagcaagcaagaatgaatgcgagattgatcacatcctgcaagtaaggcgaagtgcaacaatgcatcaaaaaacaagttgcatgtctgcacacttcaatcggagcccattctcggatgcgaagcgcatcctaaggcctggcggcgatgcacgcaatcactgtcttttggcgcaatttcattttcaaatcagacatagatttgctcttttttattctatgtgtgtggggtcaaattttcatttgattcttttttattttgtgtgaagtcctagacgacaacatcacctatgcacctgatttttcttttccagatttccaaattactttctagatgtgtattgtaacacttgagcggtgctctaggagggagcagtatccgtgatacattcttgtatgatggattgagtacgtgatacgtttgaggtttaggttgtgatggggaaatatgaagtgagaattctaacatagagtagatataagggtgcacacacggcagaacgaagaaacaccacggatgacagcgtaaaagaagaggtaccttcttcttgcacagagtagagtcgcccgagaacacatccatgcgggagtcggtgtcactgcagccttagcagctagcgggctcgtcaagtcaaagcagccactgctcaacgtcgagcttgcctttgcagccatcgccgccgcatccatgcagcccttggtagcttggtccacgtcgttgcggcaacaagcgcatgcgcttctgtccccctaaagcacatgtctaccgcaacaacaacatctttgtcaatgatgacacaaatgatgctcgcgttcagtggatcaagaacaccaattcgcagtgtgttccacagacctcctcatcccttcacctcgcagattcgaccaagcaccacctgatgctctagcgtccagctgctgccatcgtcgttaagggcaaatgagctgagcacgaaaggatccttctaaaacaactcgatgtagcgcaacctaccctcgctgaccaccaggcgccggtgcataccctgctcttgtattatatttgtgctgggctctaggcacacactgttcctcgggagctcaaaaaaaacgagctccagccggtcgttgaacgggtcggtggagacgatgtaccatgtcagatcgagccaccacagctatccaacgaactccaccgcctcgatgtacatgtttatctgccatgggagcgggagcggggatggtttgcaagaggaaccgccgcatgttgaaggctccactgttactgtcctcgcagagcacggtgacgacatagctgtcaggcggcccgtggccggcatcggagcaggtgaagaggctagtgttgcggcacccggggaacatggtgctccgcttggtgccttcgatgtccgggaggcggaacagctcgccggtgagcgggttgcagacggattgcatgtattctggttctgggtcaccgaggtggcttccgcgagtggcgccggtggcggcgacatgcttggagaggccgctttcccaagtagcacgggctatgaggtcggagacgacagaggccgggacgcgggcatccatgtagatgaggtggaggccattgccgcttgtgcgtagaccttgccgcttacgaaccccatggtgtcgcttgttggtggcctagctcacaagatcacgcactcacttattgtttacacactatagaaagagtctaacagatgaacataagaactctcacgcacaagcgctagatgtacgcacaagcaatattttgtggcgctgcgcaccagcgcgcagctaatgcactgtctattctccacaaacaatataactaaacggaatgcttacatgcttaattagccacacaataataaaacaataacttagccacgattggccgcacgacgcggccgagcattctcgtggctaagtacccactcactaacttatcgacatgcaagccacaattgcttgcatgcagatcaccactaacatatgcatgcatgctagctgatccacacttcacgccataactctcacttcacttgacttggccactcctccaaggcaacttgcactagctgcatgtaatcacttgcatgcagatcatagctatcactgatccaactaactcgcacatacacctatcaacttattctttctgacacacacatgattgagtacagctcgactacatgcactcacacgacaagaacacttaatcaacaagattaaacccaacaatcacctcctaatctagtttttattatcacctcctcgttcgtcatcacaccaatgttggctcatcatccgcgtcaactgtggcaagaaaagccatgtccttcttcggcttaggacactcatcagcgaaatgcccatactcttgacaattgtagcaatgaacttttgccttgtcgaatttgccgtggtacttcctcttgtcaccaccactgctgctgccggaaccacctccactcctcctctctttagcaaccttggcctcccactcagcacgcatcagtcgtggctcggcatatgcggcgaacagctgctgctccccctctttgtcacgacgcagcccctgtgaagagtcctcgaatgcccgcaggtgcccaattgtctttgtcaccatcatctctgacacatccccccattgctcaatggtgcttatgagggattaggacttctcgggaacagaatgtaggagcttctccacgacggtggtctcctccactttcacgccaagagagtgaatctcgttcatgatcgtggtaacctttaaagcaaaatcattaattttctcagaattacccattttcataccatcaagctcgctcttaagggtttgtactcaggccttcttgatactctcttcacccatgttcatcaacttgagggcgtctcacgctgccttcgccgtctccttctcaaatatggtcatcaccacggcctccggcatagcttgtacaatggcggtgagagccatttggtccatcttctcatcggccgtgttgccctccacagcagcccacacgccttgtgcgcgcatgaaaattttcattttcactgcccaaacgccgtagttgttctcctcgagcatggggtaacatagcgtcaacctgttgacgaccaaatttggtaagatatgaaccaggttcgacattggaatcgaagcggattcggtagaaagatagattcgaagaacaaagcatgcatcggctgcgaaggcatcggctggagtcttgtcacagcctgattttccgtttcaagatttataaattatttaataaattattaatagaatttatattagatgttgattaatttacaagtgaagttaaatgtaggaaataaaatttcctaaacataaagcatggctggatttaatttttattaaattctccatgattaactatactctctgaaattttctcggatttttcagagctcaattcctaattttaataatacaaagaacaattcagtaattagttaatcaataaattaatcattaaatggtctggttttaatattgttaaatactttgagtgtccaagtatgttgaagatttttcttggaattatttgagcattggaagtatttttaacaattcaaagatcatctcatgggttaatttatttggaaaagtaataataatcctcttcctagtcttgggcccttttcagcccattccctccttctctctcccttcctctcagcccgcagaaaagtctgtttttcttccctctcgctacagtgttgtcttcaacccctggacagagccgactgtctccagcccgtgcacagtttccgccgatctcctcccaccaaatccgacctccctgttgctcctttttccaaattagttgtgggaatggaatcctcacaatctcctcttcattttccccgagaaatccccaaaagtttctatggaaatcctttccaatttcgcggatcaatctttcctttttccggcgaagatcctaaactttcgcccgagtttttcccgtcgatgtgggcttgatcccgagctcccgtgcctatataaaggaccccctagtcgtcctctacctatccccttaagtcccgtccgccgccgtcgccggaaacgctctccccgcgctcgccttctctctccacctccggccgccgctccagccgccgtgcgccgtcgcctaggccgtcgccctcctgcgccaccacctccatcggctccgcaaggtcgatctctaccccgtccaccggttcccctccgccaagtctcgctggaagtcgctgtcaccgtgaaggccgagttcgccgcctcggtttgatctccggccgagcctcctcgctgttgcggtcgtcgccggttcacccagaggccgtcgtcggcatcgcagcgccaagccgaagcccgtacacccctctgttgccgccgctcgtcaccagaaagccgtcgctgttgttgacccgtacctcgccgtcgtcccgatctcgtcgccagccatcttcttcgccgttcatcgctgtgtaagtgttggtaagcatcgccgttgcctcctcttcctcccggtgcctagaggtggccaaacgggccgggccaaaacgggcggcccgaggcacggcggaacctgtagccggcacggcccggcacggcctgctacagtaacgggccgtgccggcacggcacgagtagccgtgccgtgcttgggccgccggccgagcccgcgggccggcacggcacggcacggctactgtagtaagtccgcatctcatccttccgcaagtccgtatctcatccctcccaactgacggcccagcccgctagccgcctccgcaagtccgttgagcacccctcctagctgatggcccagcctgccagccacctccgcaagtccgcatcacatccctccgcgccatttcggttcctgggccaaccgtgccccgtccacggcccatttttcattcacgggcccgtactgacacggcgggccacacgcatgccgtgccggcacgggcacggcccggccatccacgggccgtgcttgggccggcggctcggcacgtgggtcgggacggcacggcccgtttcatgagccgtgcctaacgggccgtgccgaaacgggccgtgccggacccgtgcccgtgccgtgccgggccgggccgcccgtttggccacctctaccggttattgtgccgtggttcgcgggcaaccgccgctcctatgtcgttcaccggtatagtttatccctagggtcttaatcccatctaatcgaatcttgtttggccctagcgtcgtcatcgtcttcgtgtgttgtcgccggaccgtcatcgtcgaccctttctctccgatcgctttggttcagtgagacttctatccattctctcttttcagtggcatattatgtttttttatatatgttatctactaaatatgattcaatctatttccggaggttgttttaatattttatctcagttataaatcatttgtaaatggtttaattaatttagaatagtcttttctttaataggtttaattggaattaaatcttgtaaaattcgtaactaattcatatgaagtcggaatgaggccgttcaagtctcataattcatctaaaatcatgatctacatgtttgtttactttacatgtactgtttatttggtttttattagtctttttcctcattttacatgttagcttgtcgtttccgtcgtttcgaagattcgtgagtgcgtcagaagtattcaagaagattaattgaagaccctttattgcaaggcaagtcacacagatcccaaacacaattcctttgagcatgttaatcatatatttaaattctctatttattttaactgtgcatttattttcgaatgtcactgggtggtgtgaacctattcctttgttatggccaatttgcattgattaccctatttcttgattaccttgggttataatttgactaattggatttatatattggttcaactagatatattagatataattgcttagccatgcttagaaacattagcacactattgggataactaatgtttcactgttacttaatgatgtacatggtaaaggtagctcacgatggtcaatcgtgattggttaattaattaatttgacaactaaaacttgataatggtgggttgtgagcacatggttttgatggtcgtgctcattgcaattaaggaccggttcacgagattcagttgtgaaacattaaccgtgccaaccacaagccagagtgggcaacggctggacactttgtatagcaaggctcattgtggtgtgccagactgagaagtggcggagataagcccacgggggtcgctggggagtccatgccttgttttataagggggtaattatgatccaggaacggtgcactgctttgagttgagttatgcgaggggtcttgtcacaatcactcgccatggtgacgtgtccgcgcggcacggtgacatgacggtgggttgtgtcttgtgggtacagtggtacacctctggccagagtaaaactattcgaatagccgtgcccgtggttatgggcgggtctaacaatgtctttcgtgattagtctcacacttctcaccataataaatgatgctataactggtaataatttgattagctcttggtttagaatggtacattcctggtttggagatagatctgtacagccgggtatggttgttcaggatggttgggcctgtgtagcatgggtgtgctgttcagtgttgattaaaacttttaaatgtttgctaaatgctgcttttgcaaatgagtttatattatgccatcctttggtatccttgtgcacttgcatatttgttgtgtggcttgttgagtatgtcatatgctcaccttgcaataatcaatcaaacctcagttgaaaacaagttgcgaaggagaagacgtttggcttataccctagttgagctgcccgtgggagtggagctagagcttcgctagatcgttttttcgctgcagttttcttttcttttgtaagtatgtaacgttgtattattgatgattttgtatattaaattgttagtttgtgtacctcggctgattcttggacgaggattgaatgcacaaataagtttggatcggacagaggacagtcgatacagccgatagaggtgatgcagccgattccgatgatgacggtttcaaagatgtttctataatcgatcaaggtgcatcacaaggattgccatgatggagataaagctctcggataggcaattgtatctattaattaggatatttcatgtaatttctttagagatatgtttgggcaaaagtgtcggagcccaaaactaacaacttggatccgactagaattaatgtatcaatccctggatcagtaaatattgatacatacaatataactggttctttgttgcgaacgttaaagttttacaatactaagtgttttacaataataggtactcacctaactaattaatacacagcggaagtttctatacattatgactagggaggtataacctttagggattctctaagttatccgggtcatcgtagtaatagtcataagggtcctcctcttgacccaaatctgaaaaaggggttataagagcaaggatgagtatttacaatactcagcaagttatcatgggaatatgttatgcattgacatatagtagggttctttgcaaaaagtagtactagacaatctagaagagttatagcaagaatttataaaacatatagactttagatttctaaccagggtaccatatgagtcccggtactcaattccatgagtacggctattcggatagtttcaaagatattctactgcagcagatgtacgctttacccgcagtccacgacttgctgataatcatcagctttagtcatggcccagtattaagtcattaacaattgtggcacctgttccatgaacttatatcctcatatgctctgaacgtattgttaatagcagcaagaggagttctggcgttcccgagatatttaaggggaactgatcgtatgacaccatgtcatctcgatcagggtttagaaatataccatatagtttatactcgagtatcacaaaccatttacctgtacatggtaatggttaaagttgcccttcgcggctatagttgcctcctgcgcgaggacttaaaaataagaaccactatacagaggtgccatattgctaattaacataataacaaggtctgtccccattctagaaactgcggtcgtactcgttcgttcgacataagtacctggtaaaacttatatcgattgagacagtactagccacccggaaatcaaccaaatcttacgtactgtcccaatctaagtataaggtattttaaccagattgtaagcaaagtaagcaatactaaattatatgggtttctatgattgatttatgcatagaaaatagaatattgaatagaaggctataaataaataatttataaaatataggcttaaatgatcaacaggtatatggtaacttgccttgctcgatgtcttgagattgattgatattatctattgagtcaaaagaatcctcaagacctagggttagacatatataaaattcaaatttaaaaggaaatcaaataaaatccaaaaatatgaaaaatggagaaaataaaataaaatgcaaaaatagcaaaaaggggctcaaaagatagagaatgattttagtagaatattggtccaagtttcactggaattggatctatattttaaaagatatgggcttctaaagtttgaaaatcaaataaatgtgaaatggcactatgtgcgggtcccacctgtcagtctctctctctcctcttcttctacctccggccattccccaaatcggaccggcggtgctagggtttgggattacggcggcgatggagggggaaagtggttgtggccgaagaggggagggagctagggttctctggtgacggcgagtggcggcggaggggttaatttgatatgtggatgggttagcggctagggcggcggtggcacggttaggccgtaatggtgatcaaggtgatatgagttagacatggctaggggaggggttctagagcatctacgaggtgtctagagggattccggcagcttgccatcctttggcaagacgcggagaatagttgccgacgagcgcctccataggcggcggccgtgttcacgtcggcagcccagagggtggcaagatagtgcaaagggattgctaaaatggaatctaggtagtatgtagatggttgaaacggaagaactcaccgagatcggttgaaatggcggattacggccggaaaaacttctcggcggcgaagaacagagcagcacgggggcagcggtgctcggcttggcgcggcgaggtaaaactcgacgcagagcttcggttagggcttagtatactagaacatggtaggatataggtgttctaaggggtaattagggcggaggatggatggaggggtgtgaagtcgatcgcgcacaaggtgttcgaccgacgggcgatggtgattgatagaatggattggggaagcagagcttcggggttggggggttatggttgttgatgatcgatgatggacaaggaagggattggggtcctatttatagggctaggaggagcggatgagctcgggcaccgtcatcgccatggatgagctcgggatttggatatggctagggcggcagaggctgtgagagggcgggcaagatcaatttgagtggcgggaggccacgtttgaatacttaccggcgaaggattggcttgaccgcgtgcgaattcggctggcgacgtgttggcgccaatccgggcgcaacgcgcggcggcagcgaaggtgaaaacggccgactcgggggtgaatggtttgaattgtgagaggggataccaccgtctatcttcaatccaaccgtgcggcaagaattggtgcgattcaccccggatagaatcaaaatcggactcggcggcggctttggtcgggcgcgcacggcgtcgagctgcaatttcttgcggcggtcgtcgtcccggctttgtcgtcgtcaagattggtgcggcggtggtggtctgagggcatcgaacggctagcggtgcgccaaggcgattgggcacgcgcgatcgatcccgagaccgacgcgcggtggctcggcgcgcggcaaagtcagatgcccgggcggcgcgcgtgaaggggaggaagaagcaaagaaatccacggtttttgagtggggtatggtcccctaggatcaaatatagactttgcaaaggattgggtaggaattaggctgtgttagatgggctagacattttgccgaacaccttgagggcaatgaacagtaaaatccaggaattttgaatattttccctaaaaagatttgaatttaaactatgattttggaaggttttcactaaggtttgaagtgaagcatatccttactaatattagggtaagctaagaaaataatctctagtttgaaatttgagagaatttgctcaaatttactaaggtttggaataaagggaataattagagtaaattagtagggttctaaagaagtattacgtgaaccaatcaaatagatttttaaaacacactaatttaatcaaaagccagcatgatgcaatcaaattttagtttaaaatttgagattgttacaaaaaagtctgccgcaaagacttatggtatcttagagtttgttagagataagtatcgtgtctggcaaggacatatcttgtatctcaggtataaataggacccgaacccatgtaattaattaacaatcattcaatacaatctcgatgcatcgccaccctttttactttcgtttatttcgacgagttcttgctttcgggttgagctgcatcggtttcaatcttctactagaggtaaaacttgttatggcggcttgtgttctcgtggttaatgcttccatctttacggcactttaaccctgtttatgtaattcattgagttatcatatacacgacacaatctatattagttgcgctatataacttattatcggctggttcttatttttaggaagcaattggtagagttatgttttgttattaatctagattgtatcgtgtatctaccatctcttgtaggttttcatcatcctgcctagatctcatacttgtctttatgcttaatgctgcatcggttgagttcgatctattaagtagtatttataattataatatctggcttattttatgatcattgagagatatagtatcggggtttcagccgatcttacctgatttagctttatgtcccatatgcttaattgatatgctaaatctgccctttatattaatatcttgttgcaataaagtgtattagacttctatcatgatatgttctatctgttttaatatcttaatatagagtggtatcggagtactagccgatacatgctagatctatctgatcggctatgctataagcgcttataatctttatgttaatgtatacttcgatctaagtgatttatactgtctcggcatgacgaccgatctatcccaatcactttgtttaaatatacatcgacagaaggattatatagcgttaatatctacagtcgatcgagtagatttagtcttatcttgcttatttataactgccgatcgattcacatatgacatcggcttgaaaataaatgatacgtcatcggcgactggccgatcagctatcatttatggatttaaccgcgatttttcttgtctttgtttcttgttgattgcaggatcaaatcaactggcacgctcatgaacctaaaagcaagattttggacctgcactgaagttaagcagatcttctaggccagtgtgtgtttttcgcgtcaacacaacccaacctccttcacttgttgcacaacgagctcatggccacctagggcactaccgctgccgctaccgctgcagtgacagattggcggcggcgtgtacactccatcgctggacatgacagcaataacccacctccaatctgataccactgttggtggcccagctcacaagagcacgcactcacttagttgtttacacattgaagaaagaggctaacagatgaacataagaactctcacgcacaagctctagatgcacgcataagtaatattttgtggcgtaatgcattgtctattctccacacacaacacaatgcttacatgcttaattagccacacactaattaagcaatggctcagccacgattggccgcacgaccgaccgagcaatctcgtggctagctacccactcactaacttatctagtattgccattttccggctcaaattgcgtcgcctagctcgtgacctgagaagatggagccgcttccaggtcggggacatcaaactccagcttgcagtagcgttcgaagtaatcttccaactggaagtagctcaggaatcaaggctgctctctgccgaagaacaacatctgttgtcaggcctcaaaacaaaagtcttaggccttgcggtgctcaataaattgaggctaagacagtgcttgagattaacttggcttaaagaaggtgatgttaattccaaattcttccacattaaagcaaacacaagaagaaggaaaaactacattcattcgcttcaaaccccgtcaggagtggctgtttcggcacaaaataaggaagaagaactttttagatttttcaaggaaagattggggaccaatttccaaagaactttaagcctaaattggtctctattacaattaccttcgttggaccttaatgagctagacgaagatattacggaggaagaattaaaatccataattttcgatttgccccctgaaaaggcgcctggtcccgatggcttcattggggcatttttcaaaaccgcttggcccacggtgaaagatgatctcctcgcagcaattttatcctttatgcatctcaacacttctcaacttgcagaactgaactctgcctttatttgccttatccctaaaaaagatgatgctacaggcgctgatcacttccgtcccattagcctcatgcatagcttcgccaagattatcaccaaaattctggcaaatagacttgctcctcggctaaatgaaatgatctcacaaaatcaaagtgcttttgttcgtaaaagggcgattcatgacaattttctgtacgtccaaaacatggtgcagatgcttcatagatcaaaaaaacagagtctattcattaagatagacatagcaaaggcgttcgacactgtgaattggccatatctcctgaaggtccttcgtcatttcggctttgggcatcgttggttaagttggatttctaatctgatttccacctcctcgtcccaagtgctcctaaatggttccctagggatgagaattaatcatgctaggggactccgtcagggagatcccctgtccccgatgctgtttattttagctatggagccttttcaccggatcattaaagcagcggagagtgccaatgtgttagccccgattggcgtgagaagtggcagattcagatgttctctctacgcggatgatgtcgcggtttttgctctcccaaatcccgatgacctgaatgctctttctcgcatcgtttcgtgtgttgcacaaatttctggtttacattctaacatcaacaaaactgagattttccccatcagttgtaatggaatcgacatgcaacagcttcttgccggctggccagggcagatcaagaatttcccttgccgctacctaggtctccagctccacttcaggaaattaaggaaaattgatttccttcctcttatagacaagatcggggccagactaccagcttggaaaggtcgcttctttacctctgcaggtcatcaaaccctagttaactcggttttgagtgctatgccgatgcatcatcttacagtccttcatgcgccaaaatgggtcttcaaaagaatcgaccgtttcaaaagatcttttctatggaagggcgaagaccctgatcattcaaatccaagtgatagtctagtcaattggcaaactgtttgcaaaccgaaaagcttaggagggttaggcctaccggatctggacaggttctctagagcactctgactccgctggctctggttcaagtggaaagaatttgataaaccctgggtaggcatgaatgtgccttgcgatgagatggacacaatactctttcaagcggcaacgacaataatgattggtgacggagcaaaaactagcttctggcatgataattggatccaaaaccattgtttaaaagatattgtgcctagttgttttagcatggcaaagagaaagcaaagaacaattcagatggaaatgcgagataatagatggctcactttcttcagacaattcacttccgtgaaacaaattcatgatttggtacagcttggtggattactccaattggtttcactttcccaggatcctgacgacatcacctggaattggaccgagtctggcgtctacacaacaaagagtgcttaccttttccagttcgaaggctcatttgccaccaatgagtttgattctctatggaaatccccgactgaaccaaaaataaaattctttggttggctagttctccatcaaaaaactttgactgcccaaaatctgctccgtaggcattggccttgcaattggatatgttgcctttgtggttgtgtcttcgaagatacaaatcatttgttcagtgactgtgtgtttgtcagacaagtgtggaccctaatttgtcaattccaaaacttgtcttcggtcggaataaatcctgtcttggatgtgtcaacatggtagtctggaaccaaatttgcaggctctaagaaggatgtgcagctggtcaggggaactcttctaactatctggtggcatatttggttggaaagaaatagaagaattttccaaaagtcttcctgttcagagattgaagtagcttattttatcaagcaagctattgatatgcgctgcttggcctttaaacccccatgaattttttagcttttcctgcagttgtaattctctttccattccttggcttgtaacctctgaacctctgtgctactttgtatttttttctcttctaatgttaaattccggcagatctcctgccgtcgttctcctccaaaaaaaaaaaacaattgcttgcatgcagatcaccactaacacatgcatgcatgctagctgatccacacttcacgccatgactctcacttcacttgacttggccgctcctccaaggcaacgtgcactagctgcatgtaatcacttgcatgcaagtcatagctatcaccgatcgaactaattcacacatatatttatcaacttactctctctcacatacacatgactgagtacagctctactacatgcactcacacgacaagaacacataatcaacaagattaaacccaacaatcacctcctaatcttgttgtttttatttgagcccctcctcgttggtcatcacaacaaagttggctcatcatccatgtcaattgtagcaacaaccttttttccttgtaaaatttgccgtggtacttcttcttaccactgttgttgctgctggagccaaccccactcctcctctctcagcaaccttggcctcccactcagcacgcgttagccaaaaatcataaatggcccatcagccatgagctaccatccactaatggaaaagggataagtttactcttggtgtcttattttgtcgctgagtctggaattcgtctctaaaccacacaataccagatataatgcgtccctcaacttccaaaatcggtgcaaataaggtttcccaagtcggtttggacggcgggacgtggttcctgcatggcacttaaagtcaaaaaaaaactatatgatccacatgttaataggacccacgtcatcacccccatttctttcccctcttctctcccttcctcctctccgtcgtcgacgcaccccctctcttcgccctcttctatccctccctcggctgtgagcctaggatcgcggggaggagcagaggcggccgggcgaaggaggcgggagtggggaaggccacgcagagctaggcgcaatgggagctcgaccatggccgtgcaaagcgacacaggagcggaggaggttggacggcaatgaaacggtgagtaaagaggaaaccgagtggggcaaggcgaagaggaggaggcccacaacggcgaggtgatggtggtccagcccgggtagatccctccgcggacgtgagaagaagaagtggagttcactggtgaggtcgccgttgggctttgggctcggccttccccatgctcccctacatcacccatcccctccccgctcaccagcagcccagtcagagtcgtcgcgcttggcgacttcctcctatgtctatcttaggaagcagcccgcccacagcgggaggcctgctacgcccatgctatagtcgtccgctgcagcgtttgggccgggcatggagctcattggtgacttcctctgtgtgttgctctgccaccggccgacctcagctccatcattcctgtctctgccgcgacgtcgcctaccactacatgggagagagtgtaaagaaagatagggagggagagaaagagggtgccaggtgggacctgtatttttttttcacgcaatgacatgcaaagcaccatgtagacgccacatgcaacaaagaccaagttaaagcaccacataggataaagagaaaattccctatatacccctgaaaatttactcaatcccttcaatacccctgaatttgacattatcccttatatacccctgagttttcattttgatctcctctatacccatctccgttagttgaccattagttgaccgttaaatattttaaaatgactatattacccatattatacatatgtgtggtacctacccaataaattttcatatgaaaaataaacttatacaaaatacaagcaatataatcatttaatgcccaacttaaaaaataaaacttattattttttattttttaaaaattatgattaaatccatacattagtttcaccagaaaattaagagcaaaaactaaatgttatttaggtttaaatttttgggaagatatacgaaattcatcaaatttgatctgaaatttatttaaaaattttaaatttgttttctaatttgtgataaactaattatatcccctttgttttttcacaacgaatcttttttcactaaatatttgttgaaaagtaattttcaaatcttatgcagaacttttttttacaataaatctttttttattttaatgaaataatgttttattttcaaaaattcataacaaatatttagtaatttattccttattggttttcacaactcaaataatttacacataaaacatttctagcttttaacaatataacaaggacaataaaagtaatttctacaataactaacggtcaaactaatggtcaactaacggaatgggtatataagggatccaaataaaaactcaggggtatataagagatcaaacaaatttcaggggcgtagaagggattgggtgaaattacatgggcatatagggaattggccctaggataaaatcattgttccaaactgcccaggaacctgatttgttctggttttgatagttggcctatgttatgtcgcaagttttgttgctaagggatggtaataaaattcgacctatagttgagggacataaaatggaccttattgtcttacagatttcttgttacaatgggccttgaggtttaggggaaatagcccatcgacggtgggccacatagctagaattttggcgggaaaactagtgactgggtggcaactggtcgtccaaaaatatctcaatacggtctgacatgtggacccccaaaagaagaaaagctctgagcacagatgggtgcaccaagtccacgtacaccgagtgtcacgggttcacgacccccgctgcagaagaccgggcgctccgtggaacgagtccacgcccgcccagctccttccttctgcgctacggctgtcagagctctactacctccgtgaacctggctcaccgtgaaccagcaacccataccacctcctcggcttctcctctccggcttctcgcttccctttcccacagttcgcttcgccggcctcctccgccgcgcagaatgcgtctcccgctccgccgcgcgctctcccccgcggcagttcggcgcgccttctccacggccgccgcctcgcgccctcagtgggcgatgatccgccaggcgccgccggtcagatctccgtcgccgcacgcgtccctcctgctcgccgagcccccgcgcgactcctacctcctcgtgccggaccacctcatcgaccggcgtccgggccccgaccccagcagcgacatccgggggatcctaggcggcacggtccacgccacgagcggcgacggcggcctcctcctcgtcgtctacatggactcccacgccccggcccccatcatctccaagatcgtcaccggcgcctttcctgctcggcctcgggtcagcgatctcgccggcctcgacttgagcgacccagacttcatccgtttcgtctgcaaccccatcaccggcgagctgttccgcctcccggacatcgacggcaccaagaagaccatgttccgcggctgcgacaacgccggcctcctcacccgctccgcagccggagccgggcacggctcgcctgacagctacgccgtcgccgtgctcggcgaggaccgcaacggcgggaccttcaacatgcggcggttcctctcgcgaaccgggaagtgggagaagctagtgggcttaccatccccgctcccgctcacgcggcggatggacatgtacaccgaggcggtggcgttcgccggacggctatggtgggccgacctgacttggggcgtcgtctccgccgacccgttcagcgactggccggagctccacttcgtcgagctcccgaggaacagtgtgtggccagtgcccagcacagatcttgtacaagagcaggctatgcaccggcgtctgggaatcagcgaggggaggctgcgctacgtcgaggtgtcccaggaggatcctttcgtggtcagctcatttgcccttgacgacgacggcagcggctggacgctggagcacgaggtggcgcttggtcgaatctgccaggtgaagggaggaggcccgagggacaccgcgcggattgccgtcattgacccactgaacgcaagcgtcatgtatctgatcgttggcaaacatgttcttggtgttgatatggacatggggaaggtgatgggttgttcactggcagatgaaactgaaggccctccatatgctatcacctctgtccttaaaccatgtgtgctcccaccatggctttcatcaagcaaaatccctgctgcaggtaatcatgatcttccacatattcatgtcttgtttaagatgatatgtggttagggatagtagaattgttagatctgtagtacttattttccatgttctcttatattaaattatgtggttagttaggggcttgtgcttaggagtttgttttgttctatatatggctcatctcgtatgactgtttagaaacctcgaactcaaaaagggtggactaattgtagctgtctgtaatgtacatattataatatagcattttggtagtcttggcaaatgattgtgctaagccactaaccgatagcctatgaatattagcagtgtagtcatgaataacgtctttgaatatttcctcaaaaactaaaatttcagaatagaatattggtattagtaagcaaatccacatttctgttttaagtacatttgttataagaatgacatgctcttggtgtctaataaacctcaatagatgcaataatgtacaaaaatgtgagcttctacttttctttttctggcataatttttcatgtcctttcaattgaaggaactttttcacgcgacaatggtgacgccaaaagcaagactttatcagacatattggttcgtgcagacagcgacaagaggtgaagaaaattatttacttgtgtactctcctttggtacttatataattcaccatctatttccttatcaaacagttaagaaaccatgttagcaaatactagttaagaagtgctaattttctgttgaccatgataaccttgtttacagtgaaattggcacttctgttttaagcaaatgaacgatattatctgcgatcatgtaatataacgtcagaatttagatggggaagcacctttggtatggtggtggagttgtggattgcacccacccggttcaaattctggtgttgtacgtttgcatcctttgttgatgtagaggccagactttatttctattttctaaaaaataaaaactttagtgtcttgaccttgcttcagttgtacatatttgtagttgccagatggtagttcttactcaatacaaagtttgctttcgtccagtaaatcttattttgtagtaaaacctaaacaaatcttattcagatttctagttgtcttgttattgtctatattgcttagtatacccttcttgataagtgattatatcacaataaagaaactgtatatagaaaatcaacatttagtgtgttttaagaggaaaaaaaaaggaaacgggcatataatacaatgtcatcattcctgtttacttgctataattaatcaagaaaatttgcttcttcctccgctcatttttcttcatatgatcaattagatgtcatctatcatctctgaaatttaacagttgaaaatgtccttggtggactaggaagcgctatttcattttcagataggatatattaggatgtcaatgctgctgcaatcttgaactctcgttttgggggaaatgttggctgaagactgatgttatgatcttcacaatggtatcacacagaattgtgcttcacttaattgcttctgttacgctcattttttagtaggataacacagttctgttggcaagcgaccatagtcaggactcaagaacatagatgaagagcatcatcattttttgagtcatgacagaatagtttataagatggatttgtttagttgataatagttgagcaactgttgcctcttctgcagtcttaagggtagaggtagactacatcactacactaaaaattatcacaatcatgttctactcttgagtcttgaccttgcatcagtgtgcagattatagctttttttctgaacagcattgcatgacttacttgtatactccaaattaggctaatacaggtaccaaattaccaagtataaaagccttaaaagtgtttggtcttgtcatcattatgatttattttcatcaaatagatcattatgattattgtctcacataatattatggacaactaattaagagctttctatttgtgacacatgatcttgttctgatatttttcctgggatcaataaatttatagaaagtaataagcatatcatattcattgctttaaataaaatacaaagaggttataggggactatggaggtatttctgctggcttgtgtgtatacagtatactgaacaagcagacattattaagtgcacactagcactgtataagagctttcccagcattgttgtcatcatgctgagcaattgtcattctttagtcctaaaatatcatgaactatcagactaaaatgaagcttgctatttcataacaaggatcatggtgtaaccttctgccgaatcaagggatgaatatcaaacaatagatatgtactgtaatactctgctgaatcaggacaccaataaaacataaaacactactccctccgtactcataaaggaagtcatttaggacaatgtttaagtcaaaccttgggaatataaatcgtaaataactctcaagttgttgagtttgaaaatgtaaaaattatatgaatagatttgtcttgaaaaatactttcataaaagtatacatatatcacttttttcaataaatatttttatagaaacaaaagtcaaagttgtgttttggagaccgtgtcactgtcctaaacgacttcctttatgagtatggagggagtatctttcaatttttgtgagtaaaacggactacatggattgtcgtagtttcctgttttcttgcgtttatattgaacactgtaaattgtatttttgtataccagtagttctcttcatataattattgacatgcatcctaatgttttctatttgatccaggttatgtaaagacgaactgacaggtgttttaatagaaagctaatgaatggtagcttggagaagtctcgttttgggtaacttggagaattatttgagtgtgttggccctctcagtttacctgctgtcttattttgtgagaaaccgttactgtttcatgttttctttttttggtggacggtttgtgtggagattatggatatcccatatctacacggcgatgatatttggactgaatataggataccgaatatagatagaatatcttatttgtatctcgggtttgtttctcaacttgtacatcaaggaaataccttgagacttagtcggttacgactgtattttatctgtatctgcatattccgttagggatatagattatcttttgtaacacggactccttcctatatataaggggggtccggtgcctctaggggcatgtgttgattctctccaaatcatacaatcaataagatactcggcggattcatccccggacaggagtaggttattacttcttgaataagaaggcctgaacctgtataaatcttttgtctccaaacccattcacttctccagcttgatagccacccccttttattattgccgaaatctagtttcgacagttggcgcgccaggtaggggtccgtcaagcttttcgccgatcagtgcaatgggttccgtctccggcatcgacgacctcgtcttcccacccgggcagacgtttcggttcggcagcctcgacttcgtcaccaacaacttcggcaagatctctctccttgactcggagtcagaccagtcgggagagaaccggatttcagtcccgtttggactcccaaacgcggctgaaagttacttcaagaccatctcaatcgagttggcttcaaaccactcgggcgagatcgcatcttctccaatgtcaccagatcaagatgatgaggcttacccaccgatcctgatgaagctccccaacgatttggcggccgtctccatcacgacagcgtctccatcccgtaggcctaggcggaagtcggcttcaacaccgatttcgcctagcttcagggaagtcggcgtcatcctccaaccactcggcacggtttcgacggatcagctggatggctactacagctctcccaccgtcgactcgcgtcccaccgacatcgtagagtacgacgagtttagctctcgctacaacgacgcggatctcgacgacttcgacggaagcctagatgacaactacacccctctctacttcggcgtcttcatggccgataacgagacggaggagcaacgccaagcccgggaaaccgaagcacgtcgcgagactgagcgtcgccgactggaggaggagcgtcaagcacaagaacaagaacggctacggcgtgagcagcaggagcgtgagcgaaccgcgaaggaggctgagggccgacggcagcgagccttggaagcaggccgccgagcgcgtgatttcatcggccaacaagatgttgaagggacaccggttttccgcacccctcaacagaacgcggttgccgcgatcaccctcctcaacaccctcctcaaggaaaacgagctcaatcaatctgatcacgtcgtcaacatcttgaaccagacaaagaccatgattgcggcttcggtcccagttaactccgaaagcgtccgcacgccgactggcagccgactcccccacttccgatctcatgactaccgtcgtccaagtctcagcatcactggcgcaggatccaatcgcaggagcaggggtcacgacgagcggtccgttcactcgcctcccgaccatcatagggagcgccgagtggaacggcctcgctcaccacctcgtcgccgccccgtcgatcttcgcgacacaatcatacagcgccaagcagctcgaggccatcatcattcgccggaccgccacgacgacgaccttgatggagtagcagccttcaccgacgacctgcgtcgagtggattggccagccggcttcaagccgactggaatagagaagtacgacggcaccaccaacccagaatcatggcttaccgtctacggtctcgcgatccgcgcagcaggaggagatagcaaggccatggcgaactatttaccagtagctttagcggattccacccgatcttggctccatggattgccccgtggtacgattggatcttgggccgaattacgcgaccacttcatcgccaacttccaaggcaccttcgagcgtcccggcacacaattcgacctctacaacgttgttcagaagtccggagaatcccttcgagattacatccggcgattttctgaacaacgtaacaagatctccgacatcaccgacgacgttatcatcgccgcattcaccaaagggattcgccacgaagaattggtcggcaagttcgggcgtaaacctcccaggacagtcaaacttatgtttgaaaaagccaacgagtacgccaaagccgaagacgccgtcaccgcatcaaagcagtcgggtcccagttggaagccaaaaaaggatacgccggctacgggaggaggtggaagtaacaatcataaggaccgcaagcgtaagcctgaggaacttgttgcaaccgccattcactcttctcgacagcgttcgcgcgtcaacacgttcgacaagatcatgaactcccaatgcccgcaccatcctaactccaaccacgtggccaaagactgtttcgtctacaagcaattcgcggagcaatacaccaagactacacggaagaactccgacgaagaacaaagcacgtcgaggaagaaggacgacggcgacaccccggtaggatttcaagaccaccgcaaggagctcaaccatatcttcggcggccccctggcttatgagtctaaaaggaagcaaaagttgaccgaacgggagatcaatgctgttcagcctgacacgccccaatatcttcgatggtcagagattgcaatcaagtttgaccgctcggatcatcctgaccgagtggtccacccggggcggtaccccctggtactagacccagtggtccgtaatgtcaagcttcgcagaaccctcatcgacggtggcagtgcactcaatatcctcttcgccaagaccttggatgatatgcagattcctcgctccgagctaaaaccaagcaatgcgccttttcacggagtaattccaggattatccgcaactccactcggccagatcaccctcccggtcacttttggcactcgggaaaacttccgcacagagaatatcagctttgaagtcgccgatttcgagacagcataccatgccatactcggacgcccggcgttagccaagttcatggccgtcccgcactacacttacatgatgatgaagatgcctggtccccgaggagtcctatccctacggagcaacatcaagcaagccgtcacatgcgacaaggagagttgcgacatggcccaaacccgcgagatagcgtctgcccgggaggatatccgactggctgcagccacggcgagcgaaggagaagtgcccgctaccaagacttcaaaaagtggagaaagcgaagccaagactaagaagattcccctagatccttctaatcctactaaaactgctgtaataggcgccgagttagattgtaaataggaaagcgcgctcatcacctttcttcagaacaataaagatatctttgcgtggaaaccatctgatatgcccggtattcctagagaggtgattgagcactccttgcatgtcaaagaagatgccaagcctatcaaacaacgactccgccgattcgcacaagacaggaaggacgcgatcaaggaggaattaaccaagctgttagcggcaggcttcatcaaagaagtccatcatcccgactggctggcaaacccggttctagttcggaagaaaacggggcaatggcgcatgtgtgttgattatactgacctcaacaagtcttgccctaaagatccttttgggttgcctcgcattgaccaggtaatcgactcgaccgccggctgtgagcttctcagttttttggattgctactcggggtatcatcagatccgactgaaggaatccgactgcttgaagacctcattcatcacgccctttggagcatactgctatgtcaccatgccgttcggactaaaaaacgcaggagcaacttatcaacgtatgatccagagatgcttctcaacgcagatcggccgcaacgttgaagcctatgtggatgatgtagtcgtcaagaccaaacaaaaggatgatttaatctcggatctagaagaaaccttcgcgagcatccgcgctttcaggatgaaattaaaccctgaaaagtgcaccttcggagtaccgtcagggaagctgcttggttttatggtgtcttataggggtatccaagccaacccggagaaagttactgctatcctcaacatgaaaccgccaagtacccagaaagatgttcagaagctgactggatgcatggcggcgctcagccgatttgtttcaagacttggcgagcgggggatgcccttctttaagctactgaagaaaacagatgatttccaatggggacccgaagcacagaaggccttcgaagattttaagaaactcctcaccgagccaccggtcttagcctcaccacacccgcaggagccgttgttgctgtatgtatcagccacctcccaggttgtgagcacagtcttggtcgttgagcgtgaggaagaaggccatgtccagaaagtccagcgaccgatttactttgtcagcgaggtcctagccgactccaaaacgaggtacccttaggttcagaagctattatatggtgttctaattactaccaggaagctatctcactactttcaaggtcactcggtaacggtggtcacatcatttccactcggtaatatactgcacaaccgcgaagcaaacggacggattgctaagtgggctttggagttgatgtctttggacatatcattcaagccccgaatttcaatcaagtcccaagcgttagctgattttgtcgccgaatggaccgagtgccaggaggatacccctgcggagaagatggagcactggaccatgcatttcgacggatcaaaaagactttcgggcactggagcaggagtggttctaatttccccaactggagaaagattaagctatgtgctttggatacatttttcggcgtctcacaacgttgctgagtatgaggcgctccttcatggactgcgaattgcgatctccctagggataaagcgtctaatagttcgaggcgattcacagctggtcgtcaaccaagttatgaaagagtggtcctgccttgacgacaacatgatggcatatcgacaagaggtacgcagattggaagacaagttcgatggactcgagctcagtcacgttcttcgacacaataatgaagccgccgacagacttaccaactttggatccaagcgcgaggtggcgccctccgatgttttcgtcgaacacctttatacgccgacagtacctcacaaagatactactcaagttgcgggcactcatgacgtagctatggttgaagtcgactggcgagagcccctcatacgattcttgacttctcaagaactcccccaagacaaagatgaagccgagcggatttcaagacgaagcaaactttatgttatgcatgaagctgagctgtacaagaaaagcccttcagggattctgcaacgctgcgtatctttagaggaagggagacaattgctgaaagacatacattctgggatatgcggaaaccatgctgccgcacgcaccattgtcggcaaagcttaccggcagggttttttttggcctacagcagtgtccgacgccgacaaaattgtgcgcacgtgcgaaggttgccagttttttgccagacaaattcatctaccagctcaagagttgcagaccatcccactgtcttggccgtttgcggtttgggggctcgacatggttggcccgtttaaaaaggcagtcggcggttacacgcacctctttgtggccattgacaaattctccaagtggattgaagctaaaccggttgtcacaatcacagcagataacgctcgagacttcctaatcaacattgtgcatagatttggagtgcccaatcggatcatcactgataatggcagacaattcactggcggagtttttaaagacttttgtgaagactttggaattaagatttgctatgcctcagtggcacatcccatgagcaatggacaggtggagcgagccaatggcatgatacttcaagggattaaagcgcgagtttttgaccggctaaaaccctatgccggcaaatgggtggaacagctaccatcagtactttggtctttgcgtactacacccagtcgggccacaggccagtcaccttttttccttgtctatggggcagaagcaatgttgccgagtgaagtcgaattcgagtctttgcgctttcgtaatttccgcgaagaacgctacgaggaggaccgagtggatgacttgcaccgactggaagaagtccgcgaagcagctttgattcagtcggctcgatacttacaagggttgcgacgttatcataatcgcaatgttcgatcccgtgcctttctagtcggcgacctcgttttgaggaaaattcaaactacacgagatcggcacaagttatctcctctatgggaagggccatttatcatctctgcagtcacccggccaggttcctatcgactcaagcgcgaagacggtacactcgtcgacaactcttggaacatcgaacatcttcgtcgtttctacgcttaagcttatcactgtacttccctatcttgactgtcaacatcaagttttcttcttgaagttgtcagtcgggggctatcatcataataacggagtgtgattttttatcaattcaatttgcttccttggtctatcattgccttgtttgatttttttctacttagtttgcgaggactgaaagtttttaatagcttctttgggttttaggctcaacaaagcttgataaaagcttttaagaaatcaaagacttggctagaattatcaagcacagcataaatacaccagtattgtacaagttatgcctccatttgctacatttatgctcagtcagaatcagtcctttcatcatcagagttattactactcggctgaaggtcggtgttgcggaattgatctacgacgtcacttgcaatcttgtcagccgcattttgagcattgctgataagatcaagagcagcctctacgcttgtcccgtctgcaaagccatcaatggcgtcaatttcaatcctcgggtacaaggatttggtcatcaccaatgccgtgctagctcccatacttccagctttcttgatattcttgaaatatacatcggagcaactctcagcttgtcgaagatttcggttgcgtcgagtacactcggaccactgttattgaggaacatagcttggacgagtggtatagcgacattagcgacttcatctcttgctccttcaagcctcttgatcttaccaaccaggacgtcaaattgagcttgagatttgattttgcggtctacaaaacacatttatgataaaaatctactgcattaaaaagagagaagttcagattgtcagctggcagtaccttcaacctccttcaaggccgagtccctttgcgcagccagttctaccttgtctctttccagggcttcaatttgtttctccatttgagccatcctggcggcttgcgctgtttgaaatccaaatggttgaggatacagttacgacagcgtaaattaatgggacagatctagagattaccttttgatgaaccactcagctcgaagtttgaatcctggagctgagcaattcggtcccttaattccttctctgtctttttggcaagctccttggcctcatgtagctggtccctaactgcttcaagagttcccaaatgaggaaccagcttttctaaagttgcggtcttggcctcattgcgaagatggattctctgcatgatggttcatggtttagttttgctgaagagaaaacaaagtcatcaaaggcagtcacccggaagatttacattcacaatgcgagtggcttctccaagtgccttcttcagctggcacacttcctcatcttctttttgacgatttatgacgatgccggcagcttgtgagttctcgtcccaccatttgagcaagataggaggacgagagtcatcagccgcctttatgcgaggaatttcttcttcgtcatcgcctggtggtcctgatgtatttccaagatattagacgaataagctgaagttatttaaatcggcatcacttgagaagatgagttacttgaggatgttcctagctgagcgtggggtgatccttgttctttatctggagacccaatcatcgagtcgttaccagcctctggtccttgagaagttgtcgtctgcgcttcaacttcgggagtttcttgatctggacctacatccgactggtttccagtcgggggctcttgggttgttgtagtttcagttgccgccgactggttttcagtcggaggatggtcactcggattggccttatcacctgaagtatgggcgccagtcggctggctttcggcagtcggctcagaatccttggatgaacttggttctgtcacagtcggatcaggatcttttccagttggatctatgtcggatggtttcctgcaaagtgttctttcaatattcagtattatttccatgagagaagcatgtcgaagtgaaatggtaccaagaggtttatacctagaagttgttctgatctttggccttggacgactagccagttttttcctgggagtggtatgctttgggagtttattgggcgagcctttgtccccagatttgttgccgtcgtcgccttcgtcgtcattaagcaccagctttctcttgcgagaacctgtctgcccagtcggattggaggtttgaggttgcggatctgatctgattgtcggccctctacctccctgaacggtgtgctggcgaggagaccggcgctgagtgattggggggttagacttcatcaatacatattcctgagtgagatgcctccacggttagttaactcaacatgaagacaagattatgttttggtcatgggttgaagatttcagatacgtacctgcggaggcggattgaatgcgttatatggcacaactggcagctgatgtgagtagctgacgacaatggcatttgagaagtttttatacattctctccttcatgattttaaaatccagagaatctgattcttcatgattaggatcatgcttaccgtcaaactcgaatgccgtacgggatctttctttaattggtgccaatcggcatttgatgaagtgccgagtaatctgctctccttgtaagccttgttctttgagttttagcatgcgatccatcagctccaaggcttgggctgcttcatccccaatcggaagagagttccaggtatcttggtacaccggaggaagacaagagtactcgggaagagcaggctcaggattctgaatataaaaccagtttgcgtgccaccctttgtttgaggtcttgaagggcatagagaagtacttctggctcagagtccccctcagctgaaatccggcccctccgactacacatggcttactcttgtttggttggggcttgagaaagaagattcggcgaaacagagcgaagtggggcttaattcccaagaaggcttcacaaacatggatgaaattggcgatgtgaactatggaatttgggtttaggtgatgcaagctgattccatagaagcttaatatcccgcggaaaaattttgaggtcggaagagcgaagccgccatagaagaaatgggagaagaccacagtctcgtgtgtatcgggggtcggaaaagcctcaccgcacgctggccgccacccgatgatttccttggcagggagaacgccgtgcgccaccatctccttcaggttctcctccgtcacgtcggatggcgcccattggccttcaaagctttccttctcttccgccattgattttttttcgaatgcgctgatttgattcgagggatggctagggagaggtgaaggattgaggcggtggatcacgggaaggattttgatgaacttttcgaaggtggattcgagtggaatggtgaaccctagtttgccggcgtagctctgtactgtagcagggagtggggaaaatggcgagagttccggcgggggagatgaagtgtcgcttggatctcgggatttcttgttaagggtatcggaggtacgaatgggtttaggcctgaacagtacctcagcccagtacttttaacagcgtggcccattgtgctccttagggacttaggcattttttgctttggcaatttatgcgcacaatagtgttgcccaatgctgataaaatcctttttacgcggtcatataattctttggaattattacaatgcaaattaaaaggtgcccgacagaaaggtgttatgctgtttttgtaagcttttttaggctacaaaagctgtctgggttaacttggaatgacttgtttttaccatagtcatttcctcggtatgttatatgcctgttttcattatggtaaatagtcatagcctaggctattagacttattcattaccataatttttataatatttggtgggtaatctttagagttttctattcggatgcctgtcaagtgtgttcattcgtgaaccttttagagtgttaaccactcggattccttttaattatggctaaaaagcagtcggctaagaatgcctctttaggcgccgtgtatgcttttgtcatatgatgcacgattgtgctattattttgttctcaactatatgtttagtttgttaactaatcacatagttgggaggtacacctaattaggtgcatctattcgatgcaccatattctttatcttttcgccctttacagtcttcgtcttcgctactcggcaggccttggcatgaaaagtttgaagcattcggattattatctttgagaaggctatgatggttgactgcaaaggtctcgggggctactgtggagattatggatatcccatatctacacggcgatgatatttggactgaatataggataccgaatatagatagaatatcttatttgtatctcgggtttgtttctcaacttgtacatcaaggaaataccttgagacttagtcggttacgactgtattttatctgtatctgcatattccgttagggatatagattatcttctgtaacacggactccttcctatatataaggggggtccgggtgcctctaggggcatgtgttgattctctccaaatcatacaatcaataagatactcggcggattcatccccggacaggagtagggtattacttcttgaataagaaggcctgaacctgtataaatcttttgtctccaaacccattcacttctccagcttgatagccacccccttttattattgccgaaatctagtttcgacagtttgctttcaagcaaattgagaacattgctttaaactgtgaaagtgatccagttcagtcagcattaaactgccatcacttaagattatatatgttgtgttagttgtataccattaccatgcatcttatttaggcatcttctctgcatactcattctcttaagatacctgcgatcacattgtctcaggtagcaaacaattcagtatcagcttcctttttatcttggcactaaggtgacgatctattgttactggcaagatatgaaaagtcccttttatttggagcagatggctagaaattccttcgaatgcgcaagtgtgcaaacaccagtgctttgcttgttggtggtgtttatcttgtctggtttggaaaggaaaatttgaggcaacatatctatctatcaatctacagagggaagggggacaggaaggggaaggggaagatggaaggggagggatgctagctgaattgttcggtccttcaatgtgatatttgaactccatatgtaatagctttctacttactactctactttacttactaatttagtcggatatacggtaccaaatatagatagaatatcttcatgaggactcgggttagattctaaacttgtatgtcaaggaaatacccgggatcctagtcggttacgattgtattttatctataatcccatattctgttaggatatggactgtattttgtaaagcggacttcttcccctatataaggaggggtccgtgtgcctctcggggcgtgatcttttttccggtttatacaatcaataatacactcggcggaatcatccccggacaggagtagggtattacttcttgaataagaaggcctgaacctgtataaaattccttgtctccaaacctatccgctttcctagctagatagccaccccctttcattattgccgaaatcttgtttcgacagttggcgcgccaggtaggggtagcgtcaagtttttgccgactaagtgcgatgggttccgtctccggcatggacgacttcgccttccctcccgggcaggcgttccggttcggtagcctcaacttcatcaccaacgacttcggcaagatctctctccttgactcggatttgaaccagtcagggagagaccaggtccccgcgccgtttggtattccgaactcagccgaggcctactccaatatcatctctcccgagtcggcttcaaaccacccggacgagatccaatctactcctctgcgaccagatcaagacgacgggtcctatccctcaatcctgatgagactacccgatgatttggccgctgtcttcacagccaagacatcttcggccccgatccaatctagatccagagaggttggcgttatactccaacctcttgggacagtctcgacggaagagttggacggctaccttagctcccctggcgtcagttcccgaccaaccgagatcctcgactgcgacgacttcggctaccactacgactacggcgacttcgacgacagctatgaggataacaacacgcctctctttttcggcgtattcatggctgacaacgaaacggaggaacagtgccgagcccgagaagcggaggaagagcgcacgcgacaagacaccgaacgtcgccgactggaggaagaacgacaacgacaagagcgagaacgactacagcgtgagcaacaagatcgcgagcgagttgcaaaggaggctgaagatcgacggcagcgcgccttggaatccgggcgacgagcgagggatctcatcgggcaacaagacatcgatggaacagcggtttttcgcaccccccagcagaacgcggttgcagcaatcactctcctcgacaccctcctcaaagaagacgcactcaatcaagctgatcatgttgtcaacatcttgaaccagacgaagaccatgatcgctgcctcggttccagccaactccgcaagtgcccgcaccccgactggtagccgagtccctcatcttcgatctcaagactatcaccagccaagcctcagcattgccggcgccggatctagtcgcaggagcaggggacatgatgaacgatctgttcgttcgcctcctgaacgacatagggagcgccgagttgaacgaccacactccccacatcgaaggcgccccatcgatcttcgcgacaccatcaaccagcgccgcgcggcaagaggctatcattcaccagatcgctacgacgacgatatggacggagttgctgccttcacaaatgatctgcgttgagtgaattggccagccggctttaagccgactggaatcgagaagtatgacggcaccaccaacccggaatcctgtctcaccgtctacggtcttgcaatccacgcagcaggaggagacagcaaagccatggcgaactatctgcccgtggccttggcggattctgcccggtcctggcttcacgggttaccccgcggcacaatcggatgatgggcagaactacgcgaccacttcatcgccaacttccaagcacttttgaacgccctagcacacactttgatctctataacatcgttcagaagtctggagaatcccttcaagattacatccgacacttctccaagcaacgcaacaagatctccgacatcaccgacgacgtcatcatcgccacctttactaaaggcattcgccacgaggacctagtcggcaagttcggacgcaaacctcccaagacggttaagcagatgtttgaaaaagccaatgagtacgccaaagccgaagatgctattactgcgtccaaacagtcgggcaccacttggaagctaaggaaagacacgccgaccgcaggagggagtggaagtaacaaccacaaggatcgcaagcgtaagcccgaagaacttgtggcaacaacctctccatcttcccgacaacgttctcgcgtcaacaccttcgacaagataatgaactctcaatgtccgcatcatcccaactctaaccacacggccaaagattgcttcgtctacaaacagtttgcggagcaatacgtcaagaacgcacgtaagccctcagacgaagatcaaggcacatcaaagaagaaagatgatgaagacgatgccccgactggttttcaagatcatcgcaaagaactcaatcacatcttcggcggacccctggcttatgaatctaagagaaagcagaagttaacagaacgggagatcaatgtggttcaacctaacacgccccaataccttcagtggtcagagatagcaatcaagttcgaccgctcggatcatcccgaccgagtggtccacccggggcagtaccccctggtactagacccagtggttcgcaatgttaagctccgaagaactctcatcgatggtggcagtgcactcgacatccttttctctaagaccctggacgatatgcagattcctcgaacggaattaaagccgagtaatgcacccttccacggtgtcatcccaggattatccgctacaccactcggccagatcactcttccggttacttttggcactcgggagaattttcgcacagaaaacgtttgtttcgaagttgctgatttagagacagcataccatgctatactcggacgaccggctctagccaaattcatggccgttccatactacacttacatgatgatgaagatgcctggtcctcgaggagtcatatcattacagagcgacatcaagcaagccgtcacatgtgataaagaaagttgcgagatggcccaaacccgcgagattacactcgcccgagaagagatccgactggctgcgaccatggcaagcgaaggagaagtgcctgcaaccaagatgcccaaaagcggagaaagcgatgccaagaccaaaaagattcctttagatccctctgatcctaataagacttctgtaataggcgctgagttagattgtaaataggaaagcgcgctcatcacctttcttcaaaataataaagatatctttgcatggaaaccatccgatatgcctggtattcctagagaggtgattgagcactctttacatgttaaggaagacgccaaacccatcaagcaatgactccgccgttttgcacaggacaggaaggatgcgatcaaggaggaattaaccaagctgttagcagagggcttcattaaagaagtccttcatcccgactggctggctaacccagtcctggttcggaaaaagacggggcaatggcgcatgtgtgtcgattataccgacctcaacaagtcttgtcccaaagatccttttgggttacctcgcattgaccaggtagttgactcaacggccggctgcgagctactcagttttttggattgctacttaggatattatcagatccgactaaaagaatccgactgcttgaagacctcgtttatcacgccctttggggcctactgctacataaccatgccctttggattgaagaacgcaggagcaacctatcaacgcatgattcaaagatgtttctcagctcagatcggccgcaatgttgaagcttatgttgatgatgtagtcgtcaagatcaagcagaaggatgacctgatcacggacttagaagaagcttttgcaagcattcgtgctttcaggatgaaactaaaccctgaaaagtgcatcttcggagtaccgtcagggaagttgctcggatttatggtatctcaaagaggcatacaggccaacccggagaaaatcaacgccatcctcaacatgaaaccgccaagctcccaaaaagacgtccagaagctgactggttgcatggcggcgctcagccggttcgtctcacgactcggcgagcgggggatgccctttttcaagctgctgaagaagactgacaatttccagtggggactcgaagcacaaaaagcctttgaagacttcaagaaacttctcactactccaccagttttggcctcgccacatccacaagagccgctactgttatatgtgtcggcgacctcccaggttgtgagcacggtcctggttgtcgagcgtgaagaggaaggccatattcaaaaagtccaacgaccagtttatttcgttagcgaggttttggccgactctaagacaagatatccttaggttcaaaagttattatatggtgtcttaattaccgtcaggaaattatctcactactttcaaagtcactcggtcacggtggtcacatcgtttccacttggggatatacttcataaccatgaagcaaacggatggattgcgaagtgggccttagaattgatgtctttggacaatatctttcaagccacgaacttcgatcaagtcacaagctttagctaatttcctcgccgagtggactgagtgccaagaagacatgccagaggaaaagatggaatattggactatgcattttgatgggtcgaagaggcttacaggcactggagctagggttgttttaatttccccgaccggagaaagattgagctacgtattgtggatacatttttctgcgtcccataacgtggcggaatacgaggcgctgctccatggattaaggattgcaatctctctaggcattcgccgactaatcgtccgtggagactctcagttggttgttaatcaagtcatgaaagagtggtcttgtctagatgataatatgactgcttatcgacaagaggtacgcaagttggaagataaattcgatggactcgagcttacccatgtccttcgacacaataatgaggcagcagacagattggctaattttggttcaaaacgggaagcagccccttctgatgtgttcgttgagcatctttatgaaccaaccgtgcctagaaaagaaacaattgaagccatggatactcaaggtgtaaacatgattgaagccgactggagagaacctctcataagatttttgaccaaacaagaactccctcaagacaaaaatgaagccgagcagatttccaggcgcagcagactctatgtcattcacgagaccgagttgtacaagaaaagtccatcaagaatcctacaacgctgcgtatctttggaagagggaagacagttgctaaaagatattcattcaggcatctgtggtaatcacgcggctgcacgaactattgttggcaagacttatcggcaaggtttcttctggcccacagctgtttccgacgccgacaaaattgtgcgaacatgcgagggttgtcaactctttgcccgacaaactcacctactagctcaggagttgcaaaccatcccgttgtcgtggccgttcgcggtttgggggcttgatatggtcggtccattcaaaaaggcactcggcggttatactcatctctttgtagctgtggataagttttccaattggattgaagccaaaccggtcgttacaatcactgcagacaaagctagagatttcttcatcaacattgtacatcggtttggggtaccgaatcgtatcattactgataacggcactcaatttaccggcggagtatttaaagacttttgtgaagactttggcattaaaatctgttacgcctccgtggcacaccccatgagtaacggacaagtcgagcgtgccaatggcatggtacttcaagggatcaaagcacgagttttcgaccgactgcgtccctatgctagcaagtgggtagatcagctgccgtccatactttggtctttacgcactactcccagtcgggctaccggccagtcgccgttcttcttggtctatggcgcagaagcaatgttgccaagtgaggtagaatttgaatcccttcgatttcgcaacttccgggaggagcgctatgaggaagatcgagtggatgatatcaaccgactggaagaagcccgtgaagtagccctaatccagttagctcgatacttacaagggttgcgccgttatcataatcggaatgttcgatcgcgagcctttttagtcggcgacctggttctgaggagaattcaaactacacaggatcggcataagttatcgcccttgtgggaaggaccgttcataatcgctgaagtcactcggccaggttcttatcgactcaaacgcgaagatggtactcttgtcagcaattcttggaatattgaacaccttcgtcgattttatgcttaggcatttcgtttgtatctttcctctttgactgctaacttcaagcttttccttgaagtttccagtcggggggctattatgataataatggagtgtgatttttatcaattcaatttgcttacttgatttatcattgccctgcttggtctttcgacttagtcaatgaggactgaaggtttttaacagcttttgcgggttttaggctcaatatggcttgacaaaggcttttaagaaatcagaagctaagtatggaacaccaagcatagcataaattcatcagtattgtacaaattatggctccatcttcattaatcatcaaaatcattgttatatcaatcagtatcagttttttcatcatcggaattatcagacccagtcggccgaaggtcgacatcttggaatctctcaaccacgtcagcagcaatcttgtcagcggctttttgcgcatcattgatgaggtcgagggctgcttcttcactcgtcccgtctgcaaacccatcaatggcatcgacatcgattttggagtataaagatttggtcatagctaatgccatgcttgctcccatactcccagcttccctgatattcttgaagtaagtatccggagcgactcttagcttgtcgaagatctcggaagcgtcaagtgtactcggaccggtgttattgaagaacatggcttggatgagtggggtagcggcattagcgactttatccctggccccttcaagcctgttgaccttttcaactaagacatcaaactgtgcctgggacttgatcttgcggtctgcatcaacagattcacattaatgaatcagcatatagaagataatggcttttgaggtattgattattggtaccttcaacctcctttaaagccgagtccctctgtcttgccagttctgccttgtcattttccagagcttgaatctgcttctccagttgagatatcttggcagcttgcactacattgactctggttaatcaagattacaaacataatagcatgagttagttgggcagagtttgtgcgtaccttttgatgagccactcagttcaaaattggattcctggagctcagcaatccgatccctcagatcatgtttattcttcctagcaagttcttttgtctcatgcagttgattcctggtggcttcgagggttccgagatgagggactaacctttctaaggtcactatttagcttcgttcctaagatgaatcctctgcaagacagtttaatcagcgcttgaactaaatggcaaacgagatggttgagatcaggcgccaaaaagcttacatttacaatgcgggttgcctgaccaagcgcctttttcagtagacataactcttcgtcttctttttgcttatttattacgattccttgaggctgcatgttgtcatcccaccacttgaccagaatgggagggcgtgaatccttagctgctcgtatctggaggatctcttcttcatcaccaatcattggccctagtgtatccatgaataaagatgaagcaatcaaataaagtctgttggatcgaaatgatttcagatagcgtgtttacctgtgatgattcccggtcggggacgagtggactcttgtgtcttcacaggagatctggtttctgagtcattgccagcatcctttccgggaggactgtttgtttgagcttcaacctcgggaatcttttggcttggccctgtatccgactggtttccagtcgggggctcctggttaactccgactccagcttcggccgactggcttgcggtcgtgggttcgtcgctgggttctacattgtcgctggcctgcggattatcactcgggtgatcttttgcagtcggcccggtttcttttgaggaatccgcttccatgttagtcgggtcagagtctttctcagaaggatctatgtcagatggtttcctacaagttttaccatcagtgttattttcatgatgggagaataataatacaaggaaggttgctatatgatttgtacgtggaagaccttctgatttttggtacaggacgactggaggttttcttcttcggattagttggcttcggaggtcttccggtcgctcctttatctctgagctttccggtaacatcgccttcgtcgtcacttagaaccagcttcctcttgcgagaatctgactggccgactagatcagaagcacttggttgggttttagaccgaattcttggtcctccgcttccctgaccagtttggcagcgaggtgattggtgctgggcgattggaggatctgacttcatcaatgcgaattcctaagcataaatgtcaagcaacttaacaagagacgaaatcatgtttttaaggaaggttggaacgtttgaatacataccggtggaggaggattgaatgcattgaacggtacgactggcagcaagtgtgaatagttgacaacgatagcatttgagaagatcttatacatcctttccttcatgaccttgaagtcaagagaatctggatcttcacagtttgggtcgtgcttgccgtcaaattcgaaggctgtgcgagatctctctttgattggagctaaccgacacttgataaagtgccgggtgatctgttctccttgaaggccttgttcttttagctttatcatcctctccatcagttccactgcttccgcagcttcatttcccattggcagtgagttccaagtatcccgataaactggaggaagacaggagtactcggggagagcaggctcagggttttgaacataaaaccaatttgcatgccagcctttgtttgaggttttgaagggcatagagaagtatttttggcttaaggttcccctgagttggaagccagcccccccaacaacacatggtttgctcttgtttggctgaggtttgaggaagaagatgcggcggaacaaggcgaaatacggcctaatacctaaaaaggcttcgcaggcatgaatgaaattggcgatgtgaactatggagtttgggttcagatgatgcaggctgattccatagaaattcagaattccccgaaaaaatcatgaggttggaagggagaaaccgccatagaagaaatgagcaaataccacgatttcatgcgtatcgggggtcgggaatgcttcgccgaatgccggtcgccacccgatgatctccttcgccggaagaacgccgtgcgccaccatctccttcagattatcttccgtcacatcggagggcgcccactgactctcgaagctttctctttcttccgccatgaatgtgaactggatagtttaatttggtcctagatacggctggaaggggatggggaatcgaagcggtggacgcggggagaaatttcgtaaagtttttgaggatggattggagcggattgatgaaccctagcttcgtcggcgcggttctgtactgtagcagggagtggggaaatggcgaaagtctcggcggggaagacgaagtgacgcttggtcttcggtgtttttagggtatcgggagtactaatgggcctaggcctgtacagtacttcagcccagtattataatcagcgtggcccgttgtgatccctagggacttaggcgctttttgctttggcaatttgtgctcacaatgatgtggcccaatgttgttaaaatcctttttaatgcggtttgataattctttggaattaacacgatgcaaacaaaaggtgcccgacaggaaggtgttatactatttttgtaagccttattaggctgcaaaagctgtttgggttgatttgagatgactaatttattaagagtcattctcttagcatgttatatgcttaatttggttatggtgagagtcatagcttaggctattagactcgttgattaccatgatttttatcatgtttggtggatcattttaagagtttcttactcggattcctatcaaatatgtctgtttttggaccttttgagtgtttatcactcggcccttttcgtattttttatccttgatatgttcaagttgagaagcagttggctgagtgttttactgagtaccatgcatgcttcgctataaaaccactcggttcttgactacatgtttagtttttcaactaatcacatagtcgggggctacacctaattaggtgcatctactcgatgcaccaagttttattttcgcccttcacagtctttgattttagcactcggtaagctagagcaagttgaattgaagcgctcggattactgttttttgtttcgagaaggctattttgtcaactgcgaaggtctcgggggctactgtggagattatggataccccatatctacatgacagttataatttagtcagatatacggtaccaaatatagatagaatatcttcatgaggactcgggttagattctaaacttgtacgtcaaggaaatacccgggatcctagtcggttacgattgtattttatctataatcccatattccgttaggatatggactgtattttgtaaagcggacttcttcccctatataaggaggggtccgtgtgcctctcggggcgtgatcttttttccggtttatacaatcaataatacacgcggcggaatcatccccggacaggagtagggtattacttcttgaataagaaggcctgaacttgtataaaattccttgtctccaaacccatccgctttcctagcttgatagccaccccctttcattattgccaaaatcttgtttcgacagttaatggccatataatctagacatgtaatttgtggtgttatgttgactatgtcatactgtcaaagctcccttctactccctccgtttcacaatgtaagtcattctagcatttcccacatttatattgatgttaattttttagataatgaaagctttattaatctcagtaaaactctatcaagtgatacaattattctgagagcacctccagcttctgcacccaaagagtgcacacagccaacaagaaagaaacagaagataaactcatcatccaaatagcatggacaaaaagaacttcaggagccctctaaccgtagcctagaacgccacccatgcgccggagtagaaaactccatggccactagctccaattgttgacaagccgcaatgatagtaccccgcaaattgaccttctgaaggatagcccatgagcggagccaatgtgtaatcaaaaagataacctgcaaaggagcagatatgttttttctttcaaaaaccacatcatttctacaaagccaaatagaccaaatagtggtagttgcccataataagaccaaagatctcaaattgcgtggttgtcttcttatccaatgcccaaacatatgagttgtactattaggtaaactaatattcgaagcaaactggattaaagaccaaactacgtgggcaaaacaacaatcaaagaacaaatgattaatagtttcatctttgtggcagaaagaacaagacttgtttcccctccaattccttttaataagattatcttttgttaagactactccacgacgtaagtaccataagaagatcttaatctttaggggggcattgatcttccagattcttttgttaatattgggaacatcggtctgcaccaacgcaagataaggagatttaaccgagaatctgccatcagtggttagattccatttaaactcattttggtcataagataatataatattagcgatgcgtgagagaaggtgattccacgccactaacttagagcgagtaaggtccctgcgccaagaaaagcttagaggactggtttggaaaatttctgaaatagttgcatgtttatgcctaacaacgttatagagacaaggatattgttgtcttaaacaggcattcccaaccatttatcttcccaaaaccgtacttgagagctatctttgatgttgaaggagccaaacctgagaaaatcaggcttggccttcattagactagcccaaaagtgtgagtctcctgctttccactgagcttgagacaaaggctgtgaccccaaatatttgttccttagcatttgttgccatacaccatctgtagtgagtagtttatgcaaccacttgctaaggagagccttgttcttaatttcaagatcttgaattcccaaccccccttggtctttaggacgacatatgatgtcccaccttgctagtctatatttccttttgtgtccatccccttgccaaaagaaccttgatcggaaataatcaatcttcttgatcactcctttaggtatttccaaaaaggacatcatatacattggtaggctggtaagcactgaattgattagtgttagtcgtcctccaagtgataaaagtttgcctttccaacttgccaaccgtttttcaagccgttcaatcacttccttccactccgaattacgaagtctcctatgatgtataggaatgccaaggtaacggaatggaaaagaaccaacctcacattgaaaaaggttagaatattgatcctgagttgtttgggcttcaccaaagcagtaaagctcgctcttatggaaattaatctttaagccagataattcttcgaaaacattcaacaacattttcagattacaagctttctctagatcatgttccataaagagtacagtatcatcagcatattggaggatggacaatccaccatcaatgagatgaggcaccactccaacaagctgtcctgcattatttgctctctggatcataaccgctagcatgtccgctataatattgaataaaatgggagatagcgggtcaccttgtcgaaggcctttctttgtttgaaagaaccgtccatcggagaaaggggcaatgaggtggtcattttcagcctctgtaacttgggggatatcatcaattctatttgcatcaaaagagagagtacttgcatctggtggtccaaagagtttcttataaaactcagtgatataattctttatagcttcattcccctcaatcttaccttcctcttgatcttagactaaaaatacgtttcttccgatgtttgccatttgcaatcagatgataatattttgtattattatctcccaaacgaacatcatcagtctttgcaatcatattgatgttaatgaatctagatagatatatgtctagattcattaacatcaatatgaatgtgggaaatgctagaaggacttacattgtgaaacggaggaagtaacttgcttttgttggatattgatgtgtgctgttgagtatggtgctactttgtgatgcttcacatgttatatgtgatatgttggaaatatcacttgaaatcgtggcaacgatattgctgaaattttgtccatgatattgtgctatgtaatcttttacaaattgtgttcaaattattgatgaatttctatcaaaattttgtccaaaatattgtgttctgtcatcttttacaaattgtgttaaaattattgctaaaattctgtcaaagttgtccaaaatattgtgttccattatattttacaaattttgtcaacacttaggtcccatatgaaatacgcataaattcaacttgaaacatgtccagtgttcgcgacaacgttattgatctcaatagtagggctatatttgtccattcaccacacatttaaacaccgttaccatgagttcacagagtatgggtagtaggttgcttcatttcaaaaaagcaggagcaaaatcacaaactctaaaaagcaggctaaaatcacaattgaactagaaagcaagggcaagaacacaattgcctccaaaggtctatgtggagctcaaggtagggaaataaaaatgaggcattacttatatcacatatattgtaaatcagaaggtggatcaaagaagaaaacaaatcatacaatctggtcaaggtgagggctcaaaggttgaatcttgtgatgtggaaggtacaagatccaattcaacagttgagggcttctcatgggtgtgctcgatttcctggatggtttcgctgctgatgaaggaggtgttctctaggatacgatccaagagttcccttccttctatcgtggttttatgtgcaaaggtacctttggcgtaaatgtgaagatacggagcatattccttgtttagacccaaacaaaaatgttataacaagacatgatcgggtatagatgttggtatttcttaacgacattactagaaatataattcccagcaatggcgcagaaatactcctggtatattatggttagagagtttatccgcaagcgcacggatataccattgcagcatttcacccgagagtattacaagggtatcgtatttaatttatcccgtgggaagatcatgtagagagaacttgactaataatttatatattacttgtgataattatattctaagcaggggttaagataatctaagggtagagtgacacacaagcatcagctactcattctcataatatattatctaagctaagtggaaagaaaagagagagaatctattcctatacttctaatgtacatagtatacatacattcttagttaactgatacactagctaataccctctatccgatgccctcctggtacttcgagaagccacccctgactgccgagttccttacgtcagaccgtcatgaccatacaaccggggctaaatacggaggaataccctccccagggaattaacttaggattatatacaggcgcggaggaatacctgtactgagctgtcaccaacagcggcccacctctcatccgtagcatataaccccaaataatgatatcccgtaatctagacaccacgtctaaactaccagatactactctaatatcatcgtcatgacatagagtaattacataagcaaacattatacccgcaccaaagcatctgccagataagctagccgtacattcagtataacatgaacataatgtaaagtaggcattcatatactcggaaagtatttcaataccataaatgtagatagaagagtattctaataaaagtacaaggcttacaaaagaggagaaaagctattagagccatacccgaactctttcgaagactttcggactcctgatttctactctattccttttccactagctagatactactaaactaaacttgagagaaatgagagagctcttgcttgaggtgtgtgagtgaagtgatgatgagagctccttttatagcctcccaatgacggttgtgacggttggaaaggtcggtaatacccaccaaccgtcattggggagccatctcagctgtccaggagaaccctggatcaaacggcactgcagggggttcggctgaaccatgggctgggccgacctggcccaatttcggcaggcagcttcctcttttgctctcatacacagacttgtgaattttggcctggtttgttgtgtcaattctaagttcttgtcccattcatacacaagtctgattctcgacatcgtccgattgatttatcgtttgagttgatgttgattctcctccactttatgatcattctctgcaaaaggttagtaaacccaatactagtggaatattattattctaacatatttatgcattgcaagcatcactagttctcctctgttttgataaaattgacggtcgaaactgatcgataacgaccgtcaacaatagacaactctaaccaaattgagttaacaatgagaacctaagccaagctgctccaataaattcctcctttctctgctgaaagccaaggatttccatccgtagggagacaatactggatagcgggaagaaaccaagacaaaacctacttttgagttcccccattcgttgttcgtcttcctaacggaaagagcgtaccattgttttacctcctcaatgagagagaagggaaacaacttccactttggagtttcttgtgtcatgcctgagattgtctggcacgagcacaattgctaaaactctcgtagatgacagtagggctttgagctatcgcacccccgagaaggattgttctcgaatggctataaagccaggacagagttcatatccagatgtgagaataagttttgatgaagttgctggctcacaaaactcgcccttcggaaacatttcatatagatagttgctccatgatggaaaagaaaagaaaagaaatataaaaagataagataagaaggcaaactaggtttgaagataatataacaactgttccatagtaacaccgccagaaattcttatattgatatttattactcacagataaatacgcaagcgcacggatactgctgtagcacttaaccatatcgaatctcagggaacaagtgtgtaaaatcaaggaaacaggttcatccagggacaacaatttaatggtaggagggggatagagaggatccagatgggttaataatcttgaattaagttaaggtaaaactctatcacttgcttagggcactggcttttccatggtttgccaaacgaatcaggcctatagctctatgatgtacctgaatgtgaatcattacaaagtatgaacggagctatcaccacgtgttgcgtatctctacaacccatggagcacacaataaacaaaggtaatttttaacctagacacacgcttacgttatcgattacttctctagcccccacacaagaagtttcttctttatctagagtcttactagagcacttaatataaatattaaacgatgaacccataatagtgagaatatatcttacttaaaaaaattaaatacccaaaagaaatcacgaatactcacttaatgtggaatcctgtatacttatacagttgatccccactaactattttgctgtcctctcagttagccacgtcactttttattcttatccgttcgatcaatgtgttcaacgcagcagatagcttcttgagggttttctttcctactcagcgggcccagtccaaattaaccaccttgggccaaccggtgaatgacccctgcccttcccctctcgagttcccactagcgacacgaatcctttacgattttgctagaaatctgatgtcaaattttcttccccatatctgacgttttttgcgccgtccgatctgctcttcaagattcgtgctgatatttatggtattagtcaatgcgcggtctgaacgctgtcaaatttcgttttccgcgccgtgtctgtagccgtagctcctctttatctctcctactttctccggtatcttctccattcttctttcttctctcctcctctctttttgcttttttcttctctttctctccggcgagaggctttttcttctctctcgcgctcgagaaggagaggaatctcattggatttctctcatctgctccagatttgatcggttagttttgtgtcgttcgttgctgcttggtttttttgcatcctccggttgtttttttgagcgattttgtctaggtagttcgattttgattcagtttttgaaccggttgcgcgcgatagggagaggaatctcgtcgaatttctctcatctgatccagatttgatcggttagttttgtgtcgtttgttgttgcttgttttttgtttcatcctccggtcgttttatttgagcgatttcgtctaggtagttctattttgaatcggttgcgcgcgagaggcaggattttgaattatttttgtgttgattttgtggtcttagaatccaaatcctttttggatttatagtcagaatcctgtgtcgccgatgattcctaagttttttatgctgatctaggtgtcgccgatgattcctagttttttttagatctggcctatacttgtttttggttttttagttgtagttttaatttgaaatatgtcgatctgcttcttctgaggttctagacatttatttcctgaattgttttctagatctgattaggttttggttttgattttttccatgttgatgggttttgatctatgatttatggtgatggctattcaactcatgttgatttatcattatagtttttagtttttagattttttcatgtttgatttgtttatttttgtatttccagatccatgagatatcttatatagtgtttgtatttagttctatgctttctccatttctgtataataatgatgatgccaatatttttaaagttaaagctccacatgaattggtttggctagttcaggtatcatgtttatgtgtgtttcgaattacttagtgctaatctaaatgattctgtatgacatggttcactagtaatataattttctttttagtttctgtaccttttgttgttattatctgtgttatgttcattttgtaggtctaggtagatgtccaaatgacatgtatttgggttttggtatgttaattcttttgttcttgcattttttaaaactttcgatgttgattttgattagtttagccagccaaattcactccagtttttgtttaggatcaataaataaacctgattatttctgctacacctgattaaagcagtattgttttggtgagatttctgtgtgcaattggataaagcagtattgttttttggaattgaggtgaaatctgaaaaaacttgataaatttgtactcatgggatggctttatttttcttcattgaattttgattgtgcttgattgctctattaaagaattacatctcaaaattacttcttaagcacatgatatgaaagtcgtaggaagctgacaattgacattgttgtgattttgcatcattttgtattgcaaacttgacctgttcaattgacaaaaatagctgatcaatacttgttaaagttggactctatatgtgatgacaattaattggaactgtatgtatttttcctttacttaggtgacctggaaatgttctaatgtattaatgtcttagttctttaagctcatgttttttttctttgtattgatgagaatgcatctgatcttgatgagaatgttggtttactttcttacagaaaatctgtgtgatgcgatttaacttatggttctatgat

SEQ ID NO: 7854 - DNA, 724 bp, Oryza sativa
gggcgaattcgagctcggtacccgttcttagtgaggtgcatcacgtcgattgcatggcggacgtctaagaattcccaatagggtaactcccaaaatatagagttctttttccacatcgccgcgtgactatcttcgctctctataggctggctggcaggcccctttccaaacactactttaagatctttcaccatagcaaattgttttcctgctgcaatgtttaggcttcgtacggtggtccgccttatgttcaaagagcttgcctttcttccgtactgggtggtttgcagcaaggaatcgacgatgacctatgtacacaaccctcctacagtgcttaagatacgtactttctggttcatccatacagggagtgcaagccttgtaccccttgttagactgtccggatagggtgctaagtcgaggccaatcgttgatggttacaaacagcagggctcgtaggctaaactcctcatgtttgtcctcgtcccacacggagacaccttccttcttccacaacagtttaagatctttgaacagtggtcttaggtacacattgatgtcgttaccatgttgcttggcgccttgaataataatcggcatcattatgtacttcctcttcatgcatagccaaggggggaggttgtagatacacatcgtaacgggccaagtgctatggccgctggccgttgctcatctctccaaaaggattcatgccattcgtact

SEQ ID NO: 7855 - DNA, 11112 bp, Oryza sativa
catttgtcctcacttgcattgagttatcttcatatgcatttgattggagttgttcctgaatcaaaggtgtgcagaaaatttaagatatgtgagcacacatatatatattataggaagataatgagaaacttgctttgttcaggtgaggatctacagtgtaatgaccggtgtcaggcgacaccgatgatttttagcaaaaactatagcgaaattgcttatccatataatataacaccataatctaaatataattagcatattatgacactaatagacacgttatgacaccaacgaattgattttttggatccgccactggctttgttgatcttaaggtggattgtgaaggtccatctgtttgtgtattttctaatgccgtaacatcttttcctatgagattaaaatagagaacaaaagtataagttaacaacaaaatagaagagaaggcataatttagtttagagaacctacttttctttcttgttttcttatttgaagtatttcttcctctatcaagtacactttttgatcttttagaatttagaccttttttgtgtggaggaactctaaaagagacacgtgtcttcacaacatcttcagtgcactgaattgtacatttaggaagatcatcatctaaactgactttgcttagcaagttatctattgtcaggcccaaaaattcactagtaatttccgaactaatttgtgcattaaatcctcatccaggaatcagccgaggtacataaaccgacaatttaatatacagattcatcaaataactaaatcgacaaatacttacataaaaggcactttagtccttaccacgaagaaaactgcagcggaaaaaaaatctagcgaagcttcatctccacttccacaggcagctcaactgggatctaagccaaaggtcttctccttctggatcctttttcttcaattgagatttgatgatgattgcaaggtgagtacatggaatactccgcaagccacacagcaagtatgcaagtgcacaaggatactaaaggatggcataatatagtgttcatttgcgaaaacaacatttagcaaagatctaagagtagtaacacagcagagtaattaatcatcaatattaatcaacactgaacagcgcacccatgctgcttaggcccaaccaaacctgaacaaccaaccccggtcgtacagatcaatcctccaaactaggaatttaccattccaaaccaagagtcaaattaattatcacattattaacattaatgagtagtgtgggactaatcacgaaaacattgttagaccttgccataatcgcgggcacggctattcgaatagttttactctggccagagatataccactgtacccacaagacacgattccacacatgttgccatgccccgaagtacccccacggcactaaaagggggaaatcgtgacaatacccttcgcataacacaactcaccacagtgcaccgttcctagatcataatcacctcctctacaaccagaggcatggactcccagcgacccccacggacttctcgccgcttcttagtctggcaccccgtaatgaaccatgctatacaaaaggtaaagccgttgcccatgctggcttgtggttggcacggttaatgtttcacaacagtagctcgcaaaccagtccttaattgtcatgagcacgaccttcaaaaccatgtgctaacaacccaccattgtcaagttttaattatcaattaattatcataacacaattaaccatcgtgagctaccattaaatataaccataaataataatgtagtatgattcatcccattaatgagctaatgtttctaagcatggctaagcaattatatatatatagcatttacctgaatcaatccaatatataaggtctaaactaatcaatttattacccataggaaaataaagtcatcttcggccataattaattgggaaaggctcaccacccgatgacattcgaaaataatgcataagttgaaataaaacaatagctttaaacagattcaacatgctcaaagggttgtttggaatttgtatgacttgccttgcaaacaagcgtcttcaattcgtcttcaggaacttcttcaacgaactaacaatccttcgaaatgatcgaaaactaaacctagaacgcaaaaaaggaaaaacacaaataaaaaccaaataaacagtaggtagagtttgaatttagatgaattatgagacttgaacgaatgagttcgtatgaattagctatgaattttacaagatttaatataatttagcaaaaggaattacgatttatttggaacagaaaaatagacgctgacgtcagcgatgacatcatcgccggcaacgcaccggaccgcaaggtcgcaagcgctaggaggctcggccgggctatccgagtgcaccaacgcgaataggacgacgagacgaactcaccgaggggcggcacgaccacagacgatgacgggagatggccggcgacgagattgagacggcgaactccggggaaaaaggatgggtggacgggcttcctgaggaccttgcgatgccgacgcaggcttctgcgatgaccagcggagacggcaacggcgacgcagcttggctgaggatcgaatagatcggcctcacggggacgacggtgtactgatcgacagcaacgtcgaagctccggtggtttgcagcggcagcgcatgggtgaacaggcttcggcttggcgctgcgataccaacggaggagacggcggggttcggcgaccacggagtcgacggcgatgtgcggctggagaagcggcaaaggccgaaaccctcgggttcgcgtcggcaagcggcttccggcgggatttggcgaaaaggaaccggtggacggggtagagctcttcactgcgaagccgaggaaggcgacggcgcagttctgggatgaccgaggaggcggcgcgacgtggctggagcggcggccggcaaaggagagagaagccgagcgtggcggcggctctagggctagggaaaaattcaaaaaaaaaggaggaaacggatgaggaggccgaggggctgccaaaggagggggggatcggctcggatacgaggggaatcggcggcgaaagagctagggttcgtcggcaaaatagaagataaactacacttcgaatccacgcgatataccacgggagtcttgttcctctagatccggtttctccccttcttcagtggttgttcttccggtggtcactggcggtgcggcgcccgctcccctcttcttaggtgctcctcccttcttaggctagggtgcttccagtcgatgccggggaggtccttgtttcggtagggatggcgtgcgggattggattctggcgtcctgtctggtcatcggccacgccgtaggtttgctgcagctgggttcctgtgggtgaggtggtctttggtcgagctgtagtgtgattgaatgttgaggcggagtcggagctgtttgtcttgcaagctcggcaacgatgacccccaacagatgtcccggcaatgtgacgagggtttggaggtggagcattttgagagagcctcgggtgaaaaccttgcctagtgtatcctaggttgatgatatcgacgcctatgggcgccgtttcctccttggaggtatcgtcatgttggctctctctcccttcaggtgaaaaccgggttcctttcggaacgggtgttgatagcatccttgatgttgttcccttattgaaggcttcgcttagaaggtttctgctccactagaggatgtttggtggttctggaggcctcgtttgcattatgttatcgaagctgcttgcctttggtaagctcggcaacgacgacttttgtgaggtctcaatagttgtcttctttttccttttttgtataggttttgccggtttcccgattaattaaccgtgcttgttcggtttttgggtccagtttcccttattaactgggccaattctcttcctctatatactccggcaagagaaactcctgccgtcggttcctcaaaaaaaaatataatatgcatatgcatgatttaaaactgttaaaaactgtaattatcatatataactagcatatgcatgatttaaatttgttaaaaattctaataatcatacataattaacatatgccatacaacaattaatttatatggatattcaatatatccaaaatagtttacatcgtgtacacaacaattacggcaatacatcgacggtgacggttgaccacacgtactttctcctcactattgttccttccttgtgatcgctacgtgagtaaagggtgtcttcatttgataggaggatgctagcgtcaatcctcaccgtgaaagagggttgcccatcaaactgatcataatcctcgtcaatcttgtcctctactccgacaattttccttttgcctgggagaaccacgtggcgcttcggctcgtcaggcccttttcccttctttcctttgctagacatgtccttcacgtaaaatacttgcgttacattattggcgagaataaaaggttcgtccgagtatccaaccttgttaaggtcaaccgttgacatcccactgtcatcaatcgttacgcctccaccggtcaacctaacccattggcaccagaacagagggaccttgagaggtccatagtcaagttcccatatgtcctcgatggcaccgtaatacgtgccagttgtaccatcgtgtcccatggcatcgatatgaatagcactgttctggttcgtggatttcatgtcttgggctctcgtgtagaatgtgtacccattgatctcatatccctggaatgtcgcaattgagccggatggtctcctcgccaggaaggccagttgttggttaatcgtttcgttaaccatgagatgttgtcgcagccacggggaaagtatcaatgtgatgccgtgtaatccatgcatcggacttaccgatgtttctggcgcgaactagagccaagtgctcctcgatgtaaggagccaccaatgaagattgctgcagaaccgtgaaatgggctttacggaataaattgttgtctaccgtcattattgctttccttccgagagtcccctttccctgtagtctccctttatggcgtgattcaggcaccccgattgggcgaaggtcttcaataaattctacgcagaattcaatgacctcctctgctccataccccttggcgatgcttgcctctagacgagcacggttacgaacataattcttcagaacgctcatgtacctcttgaaaggaaacatgttgtgtaggtacacaggcccgagaataccaatctctttgacaaggtgacaaagcagatgcgtcattatattgaaaaatgaaggtggaaatatcagctcaaagctgataagacattgcaccacgtcattttgaagggcttctaatctatccggatcgatgacctttcacgaaattgcgtacatgaaagcacatagctttgttattgttgcccggacattgtctggaaagataccccgaattataactggtagcagttgtgtcatcaacacgtgacagtcatgagactttatgtttgtgaacttcttctccttcgtgcttattattcactttatattcatagagtatccagacagtaccttgatgctctacaagcatttaaacatactttccttctctgccttgctaagagtgtagctggctggactcaagtaatggcttcctttctcctttggttccgggtgaaggtcgccgcgttgttctatatgcttcagatctttacgtgcttccagtgtatctttcgactttccatatacagctaggaagccaagcaggtttacgcaaaggttcttagtgaggtgcatcacgtcgattgcatggcggacgtctaagaattcccaatagggtaactcccaaaatatagagttctttttccacatcgccgcgtgactatcttcgctctctataggctggctgccaggcccctttccaaacactactttaagatctttcaccatagcaaattgttttcctgctgcaatgtttaggcttcgtacggtggtccgccttatgttcaaagtgcttgcctttcttccgtactgggtggtttgcagcaaggaatcgacgatgacctatgtacacaaccttcctacagtgcttaagatacgtactttctgtttcatccatacagtgagtgcaagccttgtaccccttgttagactgtccggataggttgctaagtgtaggccaatcgttgatggttacgaacagcagggctcgtaggttaaactcctcatgtttgtcctcgtcccacacggggacaccttccttcttccacaacagtttaagatctttgaacagtggtcttaggtacacattgatgtcgttaccaggttgcttggcgccttgaataataatcggcatcattatgtacttcctcttcatgcatagccaaggggggaggttgtagatacacatcgtaacgggccaagtgctatggccgctggccgttgctcatctctccaaaaggattcatgccattcgtacttaaaccaaaccgtatgtttcgtgcgtcctttccaaagtctttaaatgttctgtcgatgtttcgcccctgcgaaccatcggcggggtgtctcagcatcccgtcctgttgacgttattcagcgtgccaacgcatcattctagcattccccttgtttctgaacaaacgccgtagccgtggtattatagggaaataccacatcaccttagcaagaattttcttcttcattggctgcccgtcaacttcacctggatcatctcgtctaatcttgtatcgtagtgctttacaaacagggcatgcttctagcttctcgtactcctcaccgcgatataggatacaatcattcagacatgcgtgaatcttctgaacttccagtcctagagggcagactatcttcttagcctcgtacgttgtctcgggaaatttgtttccctccgaaagaatgttcttgacgagtttcaataaatcgccaaataccttgttactaacactattttttgccttccattgcaagaactctagagtggtatccaactttttgtgcccctgctcgcaacctgggtacaacgaagttctgtggtcctctaacatatgctccaatttatgggcatccttttcactttcacagtcctccttggcgtcctacaacatctgaccaagatcatccgcaacgctgttatcgtcatcatccctgtccacctcgcccgtttgatttcattcaaatccagcgtactgagcctagtccggaatgttctcatcctccacttcatcttcttccatttcaaccccttgctcaccgtgggatgtccaacaattatagcttggcatgaaccccgactcaaagaagtggaaatgaatagtcctagatgcagaatactccttctggttcttacttattgcatggacaacacataaaacccttatgcttgttagcttcggccactctcaaaaaataatgcacgccatcgataaactctttggaccgccggtcagcgtacatccattgccgatccatcttacatgaaatgaaaaaaaatcgtacataaataaattttcgtacaataatgacagtcatacaataatgataaaataattaaaaactctttaaacagtcatacaataatgacatatcattactcatacaattaataattataaaataatccaacaaacaattcttttatattatttttgaagttctaaactaatattaatgttgtattatattatttttgaagttctaaggggatattaatgttgtacttcttttaattttcaatttattttattttctatttttaagattaattttcattatattttaaactatgagaataaaactttttaagtaaacaaacaaaatttctatatattcatcttccccacaaaaattttctctctcatcaacttacaacaacgttttagagacaaaaaaaaaatgtgtgaaacatagctccaaaagtattataacaacaaaaaacattgaagaatgaagttactaaccttttagacacctccgatttgtatattatcactaaaaaaatttcgcaagaaattttggcatgacctcccctcttttttggagaaattttgaagcttgctcgggctggaggaggaagaagacatatataaagggggagatcttttgtcccggttggtagcaccaaccaggactaaagttaggatctttagtcccgattggtaacaccaaccgggactaaagatcccggggggcctgacaactttagaatcgggactaaagatcacatatgcccattgtagccccaaccgggacaaaagatcatctttagtcccggttttttgtggaaccggaactattgtggatttcgggcgaccaaccaaagatggtttctccaccagtgcaattgtaaggattctcatgtacagtaaggtgcaggtctcctttgttattcttgcctcttcacctgatctcatatatcatatatattgcagaaaatatgcatttctctatacgatttgtggacagtagatagcacttagaaggatcacagttatattgtatttcatcactggtgtgtattttgtaagtaaaatttccttgctattattatttagaaagctgaagtgtagtaaaattagaacatgtataacttcaattagttctaggagccaaattaaagttgttgttaattaactggtaaaattatttataaaggtttgcaaccatagtgtcctgattgcctgccttttgattgattgtgtacttactatttagcagctcagagaacaaatttcttttagcaaataagtggctcagagaatggaagttatgcttagaactctctatattggatagtgcaatgtgattcactggtgcaccttgcttttggggtttgacagtttgctattttgcacctgtgaactgtgaaaacttgtgcaagtgatagttcatgtgtttctagctgccacctgataaggagttcatgacttgattgcctcatttacctgacataagacgtgaaactttcttcttctttttttctacggggagacgtgaaacttactttcagcttctgaataaatccaacaaccatcttcttttcccttttcttcatctaggttttcaacaaaatgaattaaatattgttcagttattggagcaatactacagcttaaccatgttattagaaactctgtaacatgtatggttcaatggatatatagtgttttctgaccaataacagtcgcaggtcacaaccaaattaaggttgtctagcctccatccttggtaaaatagatcatcttccgtagtatcttatctctcacatatacaaaactttaacacatttctaaagtttcaatcgatctatttttcgggctggtgaatgtggatatgggtttttcgtttaaaaaatgtggatgtgggcgaggtggcggtgctggtgcacagaacaaaacactttttttttcttttcattctcatgcttgttttcaatgggaatgggtgtaaaacttgatttcttaattctttagaaagagttttcttgatttgttcatgaaagtctcagttggggctggacgctcatgaggtgacagcttccattatgcctcatgaaattttcccttgttccgggaatctgatatgttcatagcaacaacctctggcttgtgttatgcgtttctgttttcagttctacaagcaagcaaaatatgcatgtatggagtaggctggcagctcttaccaggtgcattgacacttgaacaagtttatttgatcaatgatgtggtctttgttgggatacacgtaggctacgatagcataaatcaaaatttttctatcgcgtaaaccagaaaccatgcaagctttagatcatagatcgttaccactcgacacgttgcgcagcggaagaaagcgctaaggggtcgaaggaaccctcgcgatgtagcgcgcgtcgatgtaaaggaagtagtcgatcgcaccggctcgatcttctcctcctcgttcgtcctccttgccgtactcccacgccgatcagcaccgcaaaccaacggcgcggcgcctctaccggtatccacacgtatagggatggaacgccacgcgcagatgtgctagcacccgcacgctactagggttttgctcggggaggaaaatggcggctagggtttctcacgtgatgcaatacctccgccggtcacacccctcacgaatatataggatccatcactcgggcctccaaggcccgtaggactcctattcggatccctatccgaattaagctcatattggatctatatccaatccccttattctggcccattaagcgtgcgaccctataggttcatgtacactcggctgtaacccgaaaactccttttcggtccacatgtcaacagcggcccctagcagaatgtattgacccaccggtcatacataaagatcatatcggctgaacctctagtgtatacttgtatgaacccttttgccacgatatcaattaagctcaaggctagatatgtgccatcctctaatagctcaatcattcactcgaacctgtgatagattatataacttgtgattgactcctcaatcacctttggcatggccatgcacttttataatctataacatcgagaggcccaaagatatctctccataggaggggcaaatcccatcttgattattcatatcccactacatgtttcatagcatacccaaaaactacttttataactatccaattacggagtagcgtttagcagtctctaagtaagctactacacatgttgggaaccatgataatctcaggtctaaggattcaacaccaacactaaatgagatcactgatgacacaacacatatggctcttgcagtgtctcatgttgggtctatctgtaacaccctgaaaattcgaccgacaaaaatcaaaactctaaaaatacggaccttcaaaaactttttaaataaattgcatcatgccgattttattcgcctatttcattggattttgatctcggaatttattaatcgtgaataatgaataactaactaggaataaaccctaaaaatcaaattggctaaataaataattaaaatataaattaaaataaag

SEQ ID NO: 7856 - DNA, 5723 bp, Oryza sativa
agccccgcgcgccaccccgagccccgcaccgccatcacgtcgccgcccgtcacgtcaccgccatcgtgtcgccgccccgagcccccgcgccgctgtcgcatcaggccggccacccgtccccctctctttcttccccctctcccctataaatactccacaccccctctccatttcccccactccatctccctcgttctcccctcttccctctccaccgagccaccgccttcgtgccgccgcgccgccgccttcgtgccaccgcgccatgtgccgtcgtcgcgccgccgcaccgccgccttcgtggcgccgcgccatgcgccgtcgtcaccgccgccgccgtcgtcggtaagcctccgcctcctccccatgctcggtcgccgtcgctagagagccgacagagagaggagggagaagaagccgggagggagagaaagagagaaaagaagaaagaaagaaaaaggagagaaagagagaaaagaaagaagggaaaagaaaagaaagaaaagaggagagacaaagaaaagaaaaaaaaatagaaattagagggagattagggaagttagaaaatttaaaataattagaatttaattatagatcaaatatagtcgtagaattgcaaaaatttaatataattatagattattttggtaatctctataggtgatcaattcacggtaggtactcggatttaattaataggaattttagacgtatattatatttaatcgtttagtcatagactaaattaaatcgtataatattataagataatttttggattccgtccgatatttagctcgcgatagaaatttctaacctattatatggatataatactcgggtagattaaattaaaaacttaattggtatggatataaagatttgggtggtgtccggaaaaggctagtgccgtccttggtcagttaaggaccgagccatgaagttaagcatgaaacgacccccgtacaaccgcacttctcgtatgggtatagacctagcggagtagatagctgagcggaggtagtatctatgcatagtggtttcttgatgtgtgaggcaggggctctacggtggggcaaccattggtagaaccgcgaggcgggtgtctacagtggtgtcgccatcggtaggactgccatgtgagaatctaaacataattataacttaatgcatgtgtgagtcttcccttcccgggtgcgccagaactcctctcactgctagaaaccgtgtacgcctagagtgcatgaggatgtaaagttcatggagcgggtactgccaatgcgaggttatcgaaaagctttgccgtgacgcatctcatgtgttaggacgaggctcatgtgttgggcagtcgcggagtgcgggtaaagtgtacatccactgcagtgtgagtaaaccaaatctattcgaatagccgtgctcgcggttattgagcaccgggacatgtattacacttggctagactctaaattcttaacttgtgtgggatgggatattgcatgatgatttctatactgatggagccacttcctgagaggcgggaatgtggacgtcctcagaaaaccatgatgactcaatggcaggaagctatccttgggatcacaatggatggtggacagaaccgtcattgtttaatatgaacaatggtactaaaatttgatcagtctgtgctaggtcttaggtttgtgaaaagaattataaaacttgttttgcgcaaaagaaccatagccatcctttgaatacccctgtcatgtgcattgttgctgtggtggcttgttgagtacggttggtactcacccttgcaatatacaaacttaatcagaggtcggagatgaagctttggaggatccctacgcttactaccaggagggtgatgaagacgatggcgctcgctaggtcttagttacggttgttgcctgtggcaatggcgtgccgctgccttaactccgctgctttatctacttctgtttttggaatgtattccagaccgctcggtccgatgatttaagactatgcctgcgggcttttgatgtaataattcgcactagactttcgtgtgtgtatttggtattttgtcacgcccggaaattcactagtaatttccgaacttatttgtgcataaaatcctcgtccaggaatcagccgaggtacacaaactgacaatttaatatacaaatccatcataataataacgttacacacttacaaaagaaaagaaaacagcagcggaataacggtctagcgatggcttcagctccactcccacaggcagctcaactggggtataagccaaacgtcttctccttctggatcctttttcttcaactgaggttgattgattattgcaagaatgagcatatgacatactcaacaagccacacagcaaatatgcaagtgcacaaggataccaaaggatggcataatataggctcatttgcaaaagcagcatttagcaaaacatttaagagaagtaaaacagtggagtaattaatcagaaattttaatcaacactgaacaacacacccatgctgcacaggcccaaccatcctgaacaaccatacccagctgtacagatctaactccaaaccaggagctaagcaaattattaccaggtataacatccataattattgtgagaggtgtgagactaatcacgaaaaacattgctcaacccgcccataaccgcgggcacggctattcgaatagttttactctgatcagaggtgtaccactgtacccacaagacacagccccacatcatgtcaccatgtgcctcaataccaccacggtacctcggaaaggagcttgcataacacaatccactgcagcgcaccattcctggatcataatcaccccctcaaaaaccagaggcatggactccccagcgacccccgtgggcttatctccgacacttctcagtcgggtgccccgcaatgaaccatgctatacaaaaggtaaagccgttgcccacgctggcttgtggttggcacggtaaatgtttcacaaccgaaactcgtgaaccggtccttaattgtcatgagcacgaccatcaaaaccatgtgctcacaacccaccattatcaggttttagttgacaagtaattaattaaccaatcacgatcaaccgtcgtgaacttccattaaatatccataagtgatagtgaagcatgatttatcacattagtgagctattgtttctaagcatggctaagcaactataaataacatctagctgaaccaatccaatatataaggtccatactagtcaaattataacccatagaaaaataaagtcatcttcggccataattaaaggggaaaggctcaccacccaatgacattcgaaaacaatgcatcagttgaaataaatcaatagctttaaacaggttcaacatgctcaaagggttgtttgggatctgtgtgacttgccttgctggccttggaactcttcaaattcttctcctgcgaaaacggactctccggaaacatcggaatctaaacagaaaagagcaaaaacaccaaaacagcacataaacaagcatgaacagtatatgtggatatttttagcatgtagatctcaattttagaaaaatttagagacttgaaccaactaaatccgagctaagatgatttagttatgaatttctgaagatttaatctattagaaaaacaggaaaaagaaaaacgatgatgacgtcatgatgacctcatcaatggccggaccaagatggcgacctcgccggagattggatggtcggctgcgactttggaggacatgtacacgtagaggacgacgagacgaacccaacggtactcaccctcgaaccaaacgacgaacgacgacggccggcgacggggtctagcggcggcgcggcttcggtcgacggcggcgacggggctccggtgatcagcggcttcgggggtcaggcggccgggcttctccaccctcccgcgcaccttacggcggtgacagcgaccggcggcgacgacggaggcgacggcgcgacgcggatggagctcggccggcgacgacggcggggtggagcacgtggcggcggcgctacgaggcacggaagatcacgggagagggggcaaacgaaagaggaggactagggggtcctttttatagccttggattgaagagatcggactcctcccgcaagaaatcgatccgggaaatcaaaaactcggttttggagataaactcgaaaacgagttcgattcggatgagatactcaacgattagctccgattttttgggggtaaagatagaggaggataagaggaatatttcccctcaactaattttagaaaaacacaaggggaaaggtcagatttggaggagaaaaaccgagccaaatcggtctcagttcggctgctagaggtagaagataaacagtgtcgagggacgcaaattagacttttcgtcttgggctggctgaaaacaaagcaaagaaagaaagagaagggggaaactcggctgggccgactagggctgcacggccgtgcacacaaaagagggagatcggccggaaagggcccaagactaggaagaggattattattacttttccaattaaaataatcacttaaatgatctttgaattgttaaaaatacttccaatgctcaaataatttcaagaaaaatcctgaaaatacttggacactcaaagtacttaaaaaaattataattagagcatttaatgattaatttaatatgtgggtaattactgaaatgctctttgtatgattaaaattaggaattgagctccgaaaaatctgagaaaattccagagagtataattaaccatggataatttaataaaaattaaatccatccatgctttatatttaggaaattttatttcccacatttaacttcacttgtaaattaatgaacatttaatataaattctaataataatttattaaataatttataaatcctgaaacaaaaatcaggatgtgacatatttcagctatgaactcgtgtgtaccagactacttgatccagggaaatggtactgtttacacgattgattcctgttataaaaacgggggtccacagagctggtatcagagccatacgactgtaggaaaagaccaaaaggcgccccaccccttttctaagttggcgaagggagaaattcccatttagtaatactttcaaaaataaaaacgctatgcttacaaaactttgtatgattttcatcttactcttaactattttcttcacaaaacgagttttactcttagttgaccttgggttttttaaaattagatggcagatcaggattcacccgctacctgggagatgggcgtacctcgcttagagggatacgtcattgagctacaccggctgatgaggcatctgcgataccccagatttccgatctaccgagtgagacagtgtggatctgtttgggaggctcgggtcgaggttcacacacgagttccttcagagtcagactaccgcttcccgacccgccaccgtcgcgacttaccggagactgcgatgcaggatgcagcccgggaggcattcctccgacttagctctatccaccgagctgagttggcgagtactgagtttgctcaccacctgtttcgagaggagagcaactccgtctgcacagttcaggacacaccttgctgctacaacccgatagtgacccgactgtcacgatgggctgaggcagtagacgacttttacgaggaggctctgttgag

SEQ ID NO: 7857 - DNA, 3661 bp, Oryza sativa
tttcgtgtgtgtgcatttggtatttcagctatgaactcgtgtgtaacagactacttgatccagggaaatggtactgtttacacgattgattcctgttataaaaacaggggtccacagagctggtatcagagccatacgactgtaggaaaagaccaaaaggcgccccaccccttttctaagttggccaagggagaaattcccatttagtaatactttcaaaaataaaaacgctatgtttacaaaactttgtacgattttcatcttactcttaactattttcttcacaaaacgagttttactcttagctgaccttgggttttttaaaattagatggcagatcaggattcatccgctacctgggagatgggcgtaccccgctcagagggatacgtcattgagctacaccggctgatgaggcgtctgcgataccccagatttccgatctaccgagtgagacagtgtggatctgtttgggaggctcgggtcgaggttcacacacgagttccttcagagtcagactaccgctttccgacccgccaccgtcgcgacttacgggagactgcgatgcaggatgcagcccggaaggcattcctccgacttagctctatccaccgagctgagttggcgagtactgagtttgctcaccacctgtttcgagaggagagcaactccgtctgcacagttcaggacacaccttgctgctacaacccgatagtgacccgactgtcacgatgggctgaggcagtagacgacttttacgaggaggctctgttggagatcgacgaccagcagaggcgtgtgggagagttagagactgaggtgactgacctcacagtgcagcagcttcagctggaagaggagcaccaggctatgaactcgtgtgtaccagactacttgatccagggaaatagtactgtttacacgattgattcctgttataaaaacgagggtccacactatccaacaacatgttcacaaccatgtgtctacattattaatttggtatctctataccatgatccatgagacatgatcatcaattaatacatgtgctgatcatttaaatatatttgttccacatatgatatttgatcagggatcctttaaaaatagtaacaaataacataaagtctcatgaaggaatcacatattcattaaccaataatgagttatctatttcaaggaacaatgtcggataaatatgtaaacatagtatgtgatacaatcatctctatgattgcctctagggcatatcactaacagtctcccacttgcactagagtcaatcatgaatgtatcttatacccattgccctagtgtgtgcctcatgcttaggctgagggagtggctttgtcaacggatctgcaacattcaaatccgtatgtattttgcatatcttcacatctcctctacccactatctcgcgaatgaggtgatactgccgtaaaatgtgtttggacttttgatgcgacctaggctccttggcttgcgcaatggcaccactattatcgcaatagaggtccatagagctagaagcactcgtcatcacacccagttgagaaacaaatttctttatccaaacagcctcagaagcggcaatgtattcggcttctgtggtagaatcaacgactatatcttgcttggaactcttccaactcacagcgcctccattcaggcagaacacaaatccagactgcgatctaaaatcatctttgtcgatttggaagcttgcgtcagtgtaaccatttacaacgagctcttcctgtcctccataggcaaggaacatatccttagttcttctcaagtacttcaggatattctttacagctatccagtgactctcacctggatctgattggtatcggcttgttgcactaagtgcatatgaaacatctggacgtgtacatagcatagcatacatgatggatccaattgccgaagcatatggaatcacactcatcttatttcgctcatcagtcgtttgaggacactgattcttgccaagattaatgccatgtgacatcggtaagaaacctttcttagaatcttgcatgttgaacctcttcaacaccttgtcaatgtatgtactctggcttaatccaattagcctctttgatctatctctatagatccttatgcccagaatatatgctgcttcccctaagtccttcattgaaaaactatttttcaacgatgtcttaacggattcaagcatagaaatatcattcccaatcaacaatatgtcatctacatataagattagaaacactagtgcgctcccactaatcttcttgtatacacaaggttcttcttcgtttctgacaaagcccaacgccttgacaacttcgtcaaaacgaatattccaactccgagatgcttgcttcaacccataaatggattgatgcaacttgcatatctttttagctgattgtggatcgtcaaatcccttaggttgtgtcatgtatacatcctcatccagatttccattaaggaaagcagttttgacatacatttgccatatctcataatcgaaataggcagcaatcgctaaaacaatccaaataaattttagcatggcgactggtgagaaagtttcatcatagtcaacaccttgaatttgtctgaaacctttcgccaccaatcgtgccttgtagatgtgaacattgccatctacatctgtctttttcttcggatcttcgcgaaaccggtgcttccacaactggttcaacaacaacttgttcaacctggtgaacaacatcttgcttagcttgttgtggttgtgtggacgtggaagcattttccggtgtttccttaatttcttcaagtcgcaccatgctcccaatatcctttcttgaaataaactctttttccaagaaaacaccgtgtcgggcgacaaacactttgccctcttcctgattataaaaataatatcctttcgtttctttaggataccccacaaagaagcatttatctgatttgggtgtgagtttgtccgattgcaaacgttttacatagacccacatccccaaatctttaggaaagacaaactgggacgcttccctgtccatatctcgtatggtgtcttatccaccgatttagatggaacactgtttagtgtgaacgcagttgtctctagagcgtaaccccaaaagcttagcagaagattagtttggctcatcattgatcgcaccatgtccaacaatgtacgattcctccattcggacaccccattccattgaggcgttcctggcggagtgagttgtggaacaattccacactcctttagatgattgccaaattcaaggctcaagtactctccaccacgatcagatcgtagatacttgattgtctttcccaaatgattttgtacctcattatgaaattccttgaacttttcaaaggactcagacttatgcctcattaagtagacataaccatatctactaaagtcatcggtaaaggtaaaaaagtacccaaaaccacctctggcagttgagctcattggtccacatacatcagtatgtactagtgccaatagttcacttgccctttcactttgacccgtgaaaggtgcctttgtcatcttgccaagtaaacaagattcgcatgtctcaaatgatcaaaaatcaaaagagtgtagaagtccatctctatgaatctt
